United States Patent Application Publication US 2020/0377945 A1 - sequence listing, part 27

SEQ ID NO: 4958 - DNA, 279 bp, Unknown
  gut microbiota DNA sequence
cgacggacaccgggatctccctggacttcgtggttcccgtcggccctgcaggccctcagggagaatccggcccgacaggtccccagggcccggaagggcctcagggcgagcggggcgaaaccggccctcagggacctgcgggcacgacacctaccgtcactgtgggaactgtctcctccggtactgccgcagccgtcaccgccaatccgacggacaccgggatctccctggacttcgtggttcccgtcggccctgcaggccctcagggagaatccggcc

SEQ ID NO: 4959 - DNA, 11609 bp, Unknown
  gut microbiota DNA sequence
ggcaaagccggcggcccctctttacagaaatgcgcggggaccggacaggcatccggtccccgcgcactctgagattgatcgtctgacaagcgtcagtctgccgtctcctcccggccgaccttcacgcccatcttgtcctcgtaatacttgaccagtgccgcctggtcctcgtcgatgtggccgttgtcgttcatccagtccatcacatggaggaccacatctgtcagcggtgtgtcgatgtccagcttgtgggcatagtgcttggcgttcaggatgtccttccggtggacggcgatccgcgcgccgggggtgtagtcccgcttgatgatcttgggcaccttgttgtcgtacatgggaccgccggcaaagccgccccgggtggcctcgaacgtggtctgcaggtcgatgcccgccttggccgcgaaggcatagccctccgcaatggccaccaggatggcgccgccgatcatattgttcaccagcttggtgacgctgccgctggcggggccgccggtgtaaacgggactgcccatgcacgccaggaccggctttaccttgtcaaaggcctctttgtcgccgccggtcataatggccagtgtcccggcgatggccatggggttgccgccgctgaccggggagtccagcaggaacatccccgcgtccttggcctgctggtacagctccagaatgatgtccggtgcggtggagctcaggtccacaatcacattgccgggcttgccgtactggatggcctgctccacgctgttgcggatgatgggatgggtgggcaggatctggaggatcacgtcgcaggccttgtagatttctgccgggtcactgacggggatgccgcctgcctcccggaaggcgtccatctgctgctggaccacatcgtagcccagcacgggcagcccgcacttctgcaccacgtttttcgccataggcagtcccatgacgcccattcccaaaaatccgattttttgcatatccaagacttcctttcttcgcaatcagcccgccatgatgctgggaagcaaggtggtgaggggcgagacataggtgatgaggaacaacacgataatggagatcagcagcatgggcatcatggccttcagggagtgagacagccgggtttcgccggtctggttgcacagcagcagacacaggcccaccggcggcgtcaccaggccgatgcagaggttgaagctcatgacgatgccgaactgcagcagatcgatgccgaaggcattcaacagcggcagcaggatcggggtcatcatcaccacagccgcgttggcctccatcagcataccgatgatcaggaacagaatgttcagcagcagcagaatgacgacggggctgtttgtgatggagctgaagaaggagaccagctgctggggcaggccggaggtggtgattacatagctggaggcggaggacaggcccaccatcaccatgatggtggcggtggaaactgcgccctccacaaacacctggggcagctccttgaagctcatgtccttgtatacgaagaggctgatgatcaggctgtacaccactgccacggcagatgcctcggtgggggtgaagatgccgccgaagatgccgcccaggatgatgatgggcatcagcagcgcccagatgcccttgcgcacggaggagccgatcttcctcaggttgggcttctcatgggccggcagattgtgcttgtggccgtaatacaggccgtaggcaatcagagccaccgccagaatgatgcccggcaacacggagcccaggaacagctccgccacggacacattggtgatgctggcgtacacgatcagcacaatggacggcggaatgatgggacccaggatggaggagatggacgctacgcccacggcgaagggggcgggatagccctcccgcttcatggcggggatggtgatgccgccgatggcggaggcggtggccacgccggagccggagatagcgccgaacagggcggaggccagaatggtcaccagggacaggctgcccttgatgtgtcctataatggcattacaaatgtcaatcagttttcctgtaatactgcgggacatgatattgcccgccagaatgaagaaggggatggccagcagggcgctgccgttcatgcccgcgaacattctctgaggcagcacaatcaggggcaggtccgccaggttcagggctgccagggcgccgatgcccagggcgatgtagatggggaatcccaggagggcgagacccagcagcagaatgatgattaacaggccggcgttcatacctgggcctcctttccggccccgcgcagggcagagatgttcttgaagaggacctcaatggaagtcaggagcatcagcacgatgccgacgggcatacaggaataggggatggacatggggatcccaagccccgcagacatggtgcgggcgccggtctgcaccagggtgatggagtaggacagcaggaataccatgaacaccatgccggccagagtggcgatgatggtgaggatggtccgcaccttcggcttcatcagattgatgagaatgtcgatctgcagatggctgttgcggcggatggcaatggctgcaccgatcatcacgtcgtaaatgaacagataccgggccagctcctcgctccaggagttggcgtgggcaaagatgtaccgcatgatgacctggtaggcgatgatgatgaccataatccctacggtgacagccaggatcgctttctcgaccttctccaggacatctaggaatttggaatatcctctcagcatgtttgacacctcgctatgtccttcgtggcggttgtcaggcattgggagccagtgcacggatctggttgcaccagtcggccagatcggggaagttggcctccgcatagccgctgaaatgctcggtaaaggcggcgttgtccacatccacaaaggtgacgccttccgcggtcagctcttccttggcggcatcctcccgctccagcacctcctgaccgatctgctcgccggcatagacggcagcctcctccagcgcggactggatgtcctccggcagggattcaaagtacgccttatccatgataatggtgttggcgctgtatacatggttggtcagaatccagtaggggcagacctcctggaaggaatagctctgggagtccaggatggagttctcctgcccatccacggtgccctgctgcaaagccgtgtaggtctcgcccatagccaggggagtcggggcggagcccatccactcccaaaccttgatgtagccctccagattggggctgcggagcttgaagccggcgaagtcctccacggtcttcatctccttggtggcggtcacgatccgggcaccacggtaaccggcgcccatcagcttgaagccggagtcattgcccacggtgtctagaatctcctggcccagctcgccgccccagaccgcctggaagtggtcgtaaccgttgtagatgtacggcatgatgtcgatatttgccagatttgtgaagggagccagtgtgcccacggactcgcaggtgatgtccgctacgccggcagccatgccctccagcacctcagtggtggaacccaggctgttgccgccgtagaattcaatggagacgcggccggatgtgagctcctctaccttctccttgaagaacgtggccatatcatagcccagctcgccgggggcactgccgttcagcgccatgcgccaggtgtattccgcgccggtgccgtctccgccggaatcaccgcctccaccgccgcagcctgtcagcagggtaaacatcatcacaagtgccaataccattgccaacgtctttttcacatcaaacactcctttttcttttatcctgtcgattctctgcgaagggtcgcttgctgccgggacatgacagttgtgccgccggcctgacaacaaaatatgttgccttataaatggttttaccatttatatttctcgctttattttatagcactttacccaatgctcgtcaagcgttattaaaataacgagctattttgcacaatttttaacaatgtcgcgtgcggatatgtctcgccactcctgcaggcatcctacggactctcccttgattccggctttcgagtatgatatacttttcacaaaaagcaggaagggtaaggagaaccatgatggagcagccttcttccaaggccctcttcacgcctgccaagacccagcgggcgtccgaggctatttacaatcagatctaccccaagatcatttccggggaactgcgtccgggggaccggctcccgccggagcgggagctggcggagatgttccagcgcagccgccctgtggtgcgggaagcgctgcggatgctccagcaggagggactgatcgaaaccgccgtgggcagctccggcggcgcggtgatccggggcgtctccctgaaatccgtggaagagcccctgaaaaacctggtggccatgggggccatcaatctggatgagctgctggagtatcggcatatcaacgaccgcagctgcgcccgtctggctgccatccaccacacggaggaggatgccgaggcgctccggcagaccctggagggcgcgaaggccaacctggacagcctcttcagcttccaggagtatgatgtggcgttccacagcgctttggccaaggccagccacaacacgctggcctctctgattaatgacgtgattgtccgcctcaacacggatgtgtttgtggagacgattcgggattacacaccggagcagctgcgggagatcaatttgcggatctacaacacccattacgccatcatggaggccgtcctcgcccatgaccccgacggggcggaccgcgccgtggcggccatggtccggctgtttcaggatacggtccattgaacaggcacggagcttcacaagtacggcagcgcgccgcgaaaagaaacgctcgccgctgcgcatgagggggcgcatccggatcctgctgcctgggaagggcagggaaataccgttcacaaatttctgcgatgcagctgcgtcgcaaaaaagctggctgcccgccgggcagccagcttttttgccatgatgttttggaaaggagttcccgcggttaggtgccgccccgcagggtgttctcctggatgaagcgaatcagctcccaccccagcttgggcagatagcgcccctttttgagaaagaaccccacgtcgaacaccaccggctcctcgaaggggcggatcgccagcccttcgcagcccagggcctgctggccctgggccacgctgatgatgcccacgtaccggcaggagcggaccagattcgccatgcacagcacctggtcataattgaagagaatgtccgggatcacctgatggcgctcaaactcccggctcatcaactccttcaccttggattgggcgtccatcataatgagcttctcctcccccagccgcgccagggggatccggtccagccgcgccaggggatggtccggatgcagcaccgcgtggatctccatagtgcccataggaatgatctccagctcctccgcctccggcgctgtggggaaggcgttataagccaggtccagcatttcacccgtcaccatctccacgtgcttgttcatggagccctcgttcaggtagatctgcgccttggggtgctcccgcagaaaggtggagaagatcatgggcacgatgggattcgtcagcacgtgggagattcccagccgcaggcgctgttccgccgtgccggccagatcccgcatggcattttccgccgcttcacaggtgctgaggatgcgccgcgcccagatcataaactgctcgccctcgtatgtaaaggtaacgcccttggagctgcggaccaccagccgcacccccagctcctcctccagcgcctggacggcggaggagatggccggctgggacacgtagagcgcctcgctggcctgggtgaaattcttatactggtagaccgcgtccagatattgcagccgcttcagattcagcatccggcagacctcccatccctccggcggcgcaccgccgcgcttttctttaagaataaaggagttttattgaaaaatcaagattttctttatgccaaaagtgcgaattgacatttttttgactagctgtttataagtttttgttattcctgcataaaaacatggtatttcactattgaattgccagttgctaaaattcaaattggaagacatattggggggcgcgggaaaggagggtacacggcaacgggcgccgctttcatcaaatctgacagagaaggacgggaggatatagacaacatgatcgtagtgagcgtgattggaatcattctggcattcgcggtgctgatctttgcggcttacaaaaaaatcagcatgttcctggcggcagtgctggctgcggccatcgtggccctgttcggcgggctggacgtggcggcctccctggtgggggcggacggccccttcctcatcggcatgaaggacttcgtgggcagctggctggtgatcttcgccctgggcgccctgctgggcgcgctgtatgacaagagcggcgccacctggcgcatcagcagcaccctcatcaacaaggccggaacccagtggacgctgctgatctacgtgctggtaggcgccctgctggtgtacggcggcatccaggtgaccgtgatgatcttcgtgctgctgccctttgccaagatcctgttccccaaggcgggcatcccatggtacttgttccccggcatcaccggcctggccatcgccacctttgccatgggccagatgcccggcagcctgcagatgcagaacatcattcccactcagattctgggcacggcgctgaccgccgccccggtggagggcgtgctggccacgctgttcatgatcgtcgtaggtgtcggctacctctactggcaggtgaagaagggtcatgacgacccggaggcggccatcgagctctaccaggtccagggcggcattttggacgagaaagagctggagcagcgggctccgggcttctggatctccctgctgcccatggtggtgaccttcgtcctcatcaacggcttcggtgtggagctgctgtacggcctcacggccgggtgcgtgctgtccctcctgttcttctgcaaatccctgggcggcgtcaagggctttggagaaattgtctccgagggcttcaacaacgggatcttcccctgcatcatcatcgctgccgtggtgggcgtgggcaaggtggtctccgccaccgatgtatttgccctggtgcaggagaacatcatcaacctgccgctgccgggcctggtgaaggtggcggccatcaccaccatcatcgccggaatcaccggctccgcctccggcggcctgactatcgcgctggagctcttcggtgagaccttcatctcctggggttacacgccggagatcatccaccgggtggcctccatcgcctgcggcggactggacaccctgccttggaacggcaccgtagtgatgctgttcgccctgtccggcgtgtcctataagaagggctacaagcacgtggcgatggagacggtcattctgccgctgctgtccctgatccctgtatttatctactattccatcgtacactgagaaaggtcgtgttgaatcgtggctacctatgaaaagagctttttgttgtccctgtaccgggacatggtccggatccgggcctttgaggaacacgccgccgagtgcttcaccaagggcatgctggcgggcaacatccacctgagcatcggtcaggaggcagcggaggccggtgccttcgcggccatcgagcccagggactacttcacctccacccaccggggccatggccatgccatcgcccgcggggcggaccccaagcgggccatggcggagctgttcggcaaggctgccggctactgcaagggcaagggcggctccatgcacattgcggacatggagaagatgaaccacctgggcgccaacggcatcgtgggcgccgggcagcccatctccgccggcagcgccctggcctccaagatcatgggggacgactccgtcaccgtgggctgcttcggcgacggctccaccaacgagggctccttccacgagtccctgaacatggccgccgcctggaagctgccgctggtctggttcattgagaacaactgctacggcgtgtccacggagatccaccgggtcaccaacaccccggatctggcctcccgggccgcggcctacggcgtgccctacgccgtggtggacggcacggacgccatcgcggtgtatgaggctatgaaggtcgccctggaccacgcccgcagcggcaagggaccctatgtggtggaggccaaggtataccgctatcagggccactactgcggtgacccggcggtttaccgccccaaggagtacatggagcacgccctggcaaacgacggcatcgagaagctggggcggcggctgctggagagcggcgccgcccaggaggagctggacgccatccggcaggacgcagaggccgagatggacgaggctgtgaagttcgcggatgcgtccccatatccggaccccgcgacggtgctggatgatatgtatgtgactgacaacgaaaggtgcgtggcgagatgagcaagaagatcaccgtcagcaaggccatcggtgaagccttgcacgaggaaatgctccgggacgaaaaggttttcatcatgggcgaggacatggccgtcatgggcaatgtgttcgccatcaccaagggctttctggaggagttcggccccaaccgcgtcattgacactcccatctccgaggaggggtttgtgggcatggccgtgggcgccgcgatgcgggggctgcggcccgtggtggagctgatgtacgatgacttcgccacggagtgcgcggatcccctgttcaaccaggctgccaagatccgctacatgaccggcggacagtgcagcgtccccatggtcctgcgggcgcccatgggcgccggccgccggaacgcaggccagcattcccagtgcttggagaatttcttctgccacttcccgggactgaaggtggtggccccctgcaccgctgccgacgccaagggcctgctgaagtccgctatccgggacgacgacccggtagtgttcctggaacacaagctgctgtacgcccacaaggaggagatccccgatggggagtacaccatccccctgggtgcggcggacgtgaagcgggcgggcagggacctgaccatcatcacctggagccgtgaggtccacttcgccctggaggccgcccagaccctggaggcggagggcatcgacgtggaggtcctggatctgcggactctggtgcccctggactgggatgccatcgtgaagtccgtctccaagacccacaacgtcatcatcgtctccgaggaggtcaagcggggcagctacgccggtgagctctctgcccagatcgcagaggagctgtttgatgagctggacgccccggtggaacgggtctgcggcctgaacatctgctcccccttcagcccggtgctggaggacaagaacttcccccatccggaggatatcgtgcgggctgtcaagcgcgtgctgaacaagtgaggaggcgtgtgagatggcttatgaagtactgatgccccagctgggcctgaccatggaggagggaaccgtctcccagtggatcaagcacgagggagacgctgtaaaggccggggacgtggtggtggagatcaccactgataagctcaccaatgaaatcaccagcgagcaggacggcgtcctgctgaagatcgtggcccaggagggcgaggatgtgccggtgaagggactgctggcctacatcggccagcccggcgaacaggtgggggagactactgcccccgctgtatccgcggcttctgctgccccgtctgcggagcctgcggctgcgctggcttctgcccctgcggcatccccggcggccgggggcaagcggatccgaatctctcccctggcccggaagatcgccggacagatgggcgtggactacaccgtcctcaccggcaccggccccagcggccggatcgtcaagcgggacatcctggccgcggcggaatccgcgcccaaggcagctgctcccgcccctgctgatcggaagatcgccgcgcctgcggctgtctccggcaccgccttcccggtgaagaatctggagctgatggagggtgacacggtggagaagctcaccggcatgaggaaggtggtggcccagcggatgtacacctctgctgtggagatccccaccgtcacccagacggtgaaggtggacgtcaccgccctgctggccttccgcaaaaagctgaaggaggagggccatgccttctctgtcaatgactttgtgctgaaggccgtggccaaggccctgcgccgtcatccggagatcctggtgagcctggacggggagcagatcatccgccgggcccatgtgaatctgggcatggcggtggctctggacgcggggctcatcgtccccgtgatccgggacgcggaccttctgagcctggaggccctgtccgccaaggccagggatctggcggagcgggcccgtgccaaccagctgggcgccgacgagtacaagggctccaccttcactgtgtccaatctgggcatgttcggcgtggagagcttcacccccatcatcaaccagccggacgcggccattctgggcgtcaactgcacggaggatgagctggtgatggaggacgacggcaccatcgccaagcatcaggtgctgcggatctccctgaccttcgaccaccgactgctggacggcgcggtggcggccaaattcgagatgacagtccgggatctgctggagcatcccatggacatcctgctgtgaggagcgtaaacaatggcaacggaaatcaaaatgccccagctggggctgaccatggaggagggcaccgtggagcggtggctgaaggcggagggcgatcccgtcaaggccggtgagcccctgctggagattaccaccgacaagctgaccaacgaggtggcggcggaaaccgacggcgtcctgctgaagatcgtggcccaggagggcgccgacgtgccggtaaagggcctgctgggctacatcggccggcccggcgagcaggtgggggcccccaccgcagccgcggcacctgccgccccggctgtggaggccgcggctgcccccaacgggcctgggacggtgctggtcatcggcggcggccccggcggctatgtggccgccatccgggcggcccagctgggcgccagggtgaccctggtggagcgggagcacctgggcggcacctgcctgaacattggctgcatccctaccaagtgcctgctgcacagcgcagagctggtgtcccagatcaaggaccagggcgcggagatcggcgtggaggcggacggcgtccgggtgaacttcccccaggtgatcgcccacaagaacgccgtctccaaacagctgaccagtggcgtagcgggactgctgaaggccaacaaggtggtgaagatcgacggcgaggccagcttcaccggccccaagaccctctctgtgaagaagtccgacggctccgtggaggagatg

SEQ ID NO: 4960 - DNA, 118133 bp, Unknown
  gut microbiota DNA sequence
tgacgtcaccggaggtggtggtgaggctgcggtcatagtggccgctgcggtagccctgacgggcctcgctgcgctcatagcgggccgcctgcgtcagagactccgcctccttctccagaagttcgttcagggtttcctccacgctgccgcgaaccaattccttgatttggcccttgattacttcctcgtttagctgtacaattttctcggacatagtttgctgtctcctttcagaatggtgtgtggtaacttcattctaccagagcctgcaagctatgtcttcttttatgcattttccaatttgcgcaacttattgtacattatcgaatttacgaccagagttcttgtggtcacgactgaaaagtggatacataaacatgatcagcccgccggttcttttcggaaccggcgggctgatattctgcctatcaagcgctgaattggtgtagatttggtgtaaatcggggacaccagccacagaatatccagcggtatcaagggtcagcggctattttttagtacatgccgcccttatccctggtcaagggctgttcatcccgcagcagccttgcatcgatgcccagagaggcacaagtgtcctggcaagttctcttgttcaagcggacttaaagacgctcaaataatttgcatatatagaagggtcctctgaatatattcatcattttcaaacattgcagatagccttccctttgcgtgtccccgtcgctatgcggtcaggaacacgcaaagggagcaatagccattcaaataaacaattaactcaagacctgtttaattgcaggcagtcaatccacaactctcattaatcgcttcaaaaatcaatttgccaactgcagctccgccatccagtagccccacacttttctctccataatatgcagctctcccccaaaccgctttcattgctcgcgtctcctcaaatccagcggcggctgctctcatggctgcttcaaatgcgactttcggggcatccttcgaatgatcttccaacacttttaccgccggaaccattgcatccaggatcgttttttctcccggtttcgaaccggccttattcataatactgtcagttcccgctctcatcgcatccgccaattctaccagatcaaatgtttctttgccattgagtgcagccgccattcctttcatgaagaaggagagaatggttccaaggctgctgggggcatccctgttaaatacatctgcggctaaaccaaggacttttcccacgtctttttcctcagtctctctgacagatctcaatgccccctgaaatccagtttttacagaaatgcccagatctccatctcccatcttttgatccagttcggtcagcagctcaacatttccggaaattttctcaaatatgttttcgaatgcaacttctaatgaatgaacgttcatatcttcttccgcttctttctacttattatgattggtataaaagggtgtatccgccggatcatacaataagccttccagctcatcgtccaatctgcaaatagtaatggaaataccagccatctccatggaggttgcatactctccaatatgcggcattagcacatggactccaatctcttttagcatctgagcagctttgcggtagataataaactgttcttcaagaggagttgcccccaatccgttgatcatgagcgaaacctcatcatttcgattcagcggcatatcttctaaaatcttacccatgatgatttctgttattttatctgcggtcatcattttacggacctcaagacctttctccccatgaatacccataccgaactctatctcatcatcagcaataaaaaatgtgggttttccaacttccggtattacgcaggaagagagcgcgattcccatcgtacgtgtattttccacagccttgctggccaccctggagacctcttcgagcggcatcatacgatttgctgctgcgcctgccattttatacgcgaaaagtaatcccgcaactccgcgtcttcttgcctcttccccctttggggccgatgcaatatcatcagaaacacgaacgctttttaccctgatattgtctgcttctgcatcctcacaggcctgattgaagttcatcttatctccgccataatttccatacaagcagagaacgccagctccgaagtcacatgcgcgaatagctgttagtattgcctggtaggacggtgaagtaaaaacattcccaatggcacagccatcggccattccgtcaccaacatatcctaaaaataccggcagatgtcccgatccgccccctgtgacgatgcctacttttcctttcttatggggatattttgagagaataactctgttgttctcttccgaaatctttaacttatccggataagctaaaagaataccctctatggtttccttcacgaagtcagaaggggaattcatgatttttttcatggccgttatctcctataataatcaacaattaaaaccggcttgtgtcaaacattcagaaaagctgtgttcacaagtcatacggcttcatatgtacctgacttgtagcaagatagtcagaatctatcctccagcagatactgtaaggtcatcagggcctctctatcactctttagaaatggccttttacctgagcactgactccgacacagactcctcaacaattcctttcagtgctacacatttagtaagcatcatttcttcaagtgtcagcatcaatccctctgtaccaattccactcattttatgtccgccgaagggtgtatacaaggtgcggtaatcaccgcagccattcacaactgtcgtcccgctctcaagtttaagcgctgtactcagtgcggccttaatatcacgcccaataactcctccggacagcccatattttgtttgattagcaatttttattgcctcatcattttcctcaaactcaataatcggaacaacaggcccaaatatctccatatctttggcaatgtccatatccgccgtaacatctttcagaactgtcggttcaaaataagtcttgttatatcgttttccgccgaaaacacacctcgccccctgtttaatagtctggttcactttattttcgacttcacatgcagcctgttcactaaccagcggccccatgtcgcattctttctcatgtggctcacaaacctttaataacttcaaggcgttaatcagtcgattcgtatactcctcagcaatactcttttgcaccaagacacgctttgatgcgcagcaaacttggcccgcattaaacattcgtccttttatcgtctctctcacagcgagatcaagatcggcatctttcataatgattaacggatcattgcctcccaattccaaaaagacccgggtcaaatttctggatgcccgctcagcaacacttaatccaacctctgtgctgcccgttaagctaatcgcgttaattttcggagaggcggccaactgtgcccctattttttcaccgctcccagtaataatctgaagcgcttgcggtgggattccggccctcagcaaaagttcggtcataaagatagatgccaacggggttacagatgctggctttacaatcactgcgtttccagccgccagagccggtgccgccttaaacgcatagaggccaataggaaagttgaaaggtataatacacgcaactactcccagaggttctctcttcaccacaaccatatctgtaacatcgctgggaagcatttcgcagcagctgtgttttgctttttctgcaaacgaccgaaaggtttcgccaacgctggctgcctcgtctaagcactgtttgtaaggtctccctaattctgcacacaagaggtccgccatttctttgctgttctcttcaagaatacccgcggcctttattaaaatggacactcgctctccaaccggtgttcttccccagatttttgctccttgttttgcatagtctaacgcaagatcgacatctttttcagttgcattcggtacagtgtcaattattttatgtgttgccggattgtacaccggtatttcgcaatgattagttgcgtcaactttttttccgttcaaaaccatacgcatttcactgggatcccctttcaattcaaattgtgtgttttgttctcttgatcaggctatcctgcacctctttcgaaagtgcaatgaaataagcggacaatccccccaaccggacccgcagattttgatacttttccggctctctctgcgccttctccatggtctctcggtccacgccggtcatcgtcagcattaaaccgccaagttccagaaaagatttcataagagcaacaagcctgatcaatccctgctcaccgcaaatttctcccggattaatctgcaaatccaacggtcctccgattgcatacggcagcaagtccggttttgttacagatttgactgctgcagtggggccagatatatccatgccaatagccggtgaaaaattgctgcccagcggctcctgagccagtcttccgtcagctgttgcacccacatcgtgcccaaacttagcataaaactcaaatgtcgcaattccgcagccaagaatatagtcggatggacaatccttgcgaacgcgctccacaatttttgcgtagtcgtctaagagccgaaccgccaggtcatcaacctcaggctcgtcattcccaaatttggggattctgtttaagagcatttgtcggaagctttcctgtccggcaaaattactcttcaatatttttgcaaaatcagccagagtcaacgccttatcttcaaaaaccagttttcggattgctgtcagagagtctaccgtgcttgcaaatcctgtaatcatgaagcagaaaaacttatacttggctccgccgtttgaatactctctgcctcgtgtgatacaatcatccatcaatgcggaaagcaggggtgagggtgcaattttatagcgcgccttactgtatttaattttatttttcatctccaggcgcacaaagcgttctaataaagcaagataggatctgtaaaacgcctcaaatgaatcatagctgtctattggaggaatatcttcacattccagccggttgcgcaccaagctatatccattttgcagcagatattctaactgttgcaaaatctctgtaccgcagaatccgaaattcgtcttcccaggaatcaatgtctcccagcagccatcgttggcatagtcgcgcgcatcctcaaggggaatgcccattttgcacagtccaggaatgatttcatcatcattatacaaaaccggttctcccgatcccttccgcagaatatccgcacacagttcaaacaattcttgcgggctgtttttatgcagccgtacggacattacaggaactatcgcctcaagatatgaccaattttttaaaatcatatatgtcagctcatttgttgcatctttgccatcccgtgtctgtccgcctaaaatcatattaatcagccagtgattagcggatgtgccaaaattgtaggattcgtcattcgcatagcctgcggaagcagctgaccctttcagcctttcgggatctgctccattatattgtgtatcctgttcggtcaaatgcatttcccattgttgcggatcaagctgtacccgctcgctaaattttgcaagccaactgccaaccagttcatcggcttgttccgctgtgatgacatgattatcaatatcgcgtctgtagtatgggtagagatattggtcggagcgtccaatcggcaagaattccatcgtactgtgaaacagtacaaacgttatccaaagagactgcagagcctcatgaaaactgctcggcggattttccggaactcttgtgcaaatttttgacatctcaagcaattccgcccgccgagccatatcgtcgcaaatctctgctttttccatcaatagtacggcgtagcgccgagccagttcgccaactgcatccaagctgatcaaaacagatctgtagaaatcatacatttcttgatctgtctcccgcaaatcctctttctgcttcaggctcgtgtaaatctcttgtcggattcctttgaggcccaaggtcaaaagcttttcgtaatttgccggatgatgtccaaaaacggatttctccgtataagatgattgggccgcctcttccttttcctcgggtaaagcataggaggggaaacatttgccgaagccaaccgaggccatcgtcggaacaccaacaatcagctcatcatctttaacttcgattggcatattcctcgctacatgtaatacggccagagactttctaacaataagcggctcagactttacctcttcgtttacaagaattgtctccccttcaccccaccatgatttacgagttacatactctctgttaaataatctctctttaattttctcaattcttttcatatatgcctcctatcagtgcagagaaagttttaagtcctccagcgttgcaccacgctcacattagtaaaggcaagtagacttatttatggtataatgcggtaacctataaggtcaccgcattatacctactttactaccgtagctttattgctccgcaagaacctcatccaagtcaatataagagccttccaaaacttcagccatattgtcttttgtaataacgcttgcgcccatgctgatcgtgggaatgtttccgtagccattgttcgtattatagttcggctcaatatggggcttaacattcagttttgcagccaggcagctgttcgccagttcctgaaccatctgggtaatatccttataaatcgtcatggactgagttccttccatcacccgcttaagcgcagcgccctcactgtccatacccgtgacaaccactttcccggccaaccctttttgctcgaggacagagataacaccagaagcaatgctatcattcatacacataaaaacgtcaatgtcattgtccgccagtgtcaaagcggactctgcgtgcttcatcgcctcttccgctttccagtcctcgcaattctgctccagaacgatattgatgtcaccgctgtccacatactgctggatatcggtcatcatgccggcataaatctggggaacatcagtaatttgccgtgcatcacctttcaaaatcacaaaattcccggaagtaatgcctaatgtatccacaatatactgggaatgcagctgaccaaggagcgtgttgtcagtattgcaatgataggccactgggcaatctaccgggaggcgggtctggctgacaacgggaattcccatctcagcaatttcagtaagaaccggcccaagcatggaagcgtcatgagcgccgacccagatggcatctactccctgtgccgcgagactctggagctgctgaatctggcgatcagcatcattatccgcaaccaagatcacggcctcataaccacgcttttcggcatcctcttcaatcagagtcatctgaatctgccaaacttcttcctgcacagtaggcatagacatgccaatcttgtatttttcaccgttttccttcagcggccactttccgtcctcctgcaaaatggaatcaaattccgggagattggcccacgcttcctttgaagggtctgtaatcggcaccgggtcattgctggacgttgcttccgcatcatcagtcccgctatcagccgtattatttccaacgttttcttccatttctccctgcggagttgtatcctccgggctctcctggctgcagcccgtcatcaacagcatacacattaccaagatcatcgccaaaatacgagtcatttttttcatacgtgtcatccccttcaagtaattcgtcataacaatgtttggggctaattggcgttaccctccatatcctcctacattgacgttcaaaccgtagccctcaaaaatactgcgggcacgctttaaaatatcggggcttggttcatcttttcccgccagcagataatgtctgtctaacgatttccatttagactctcccaattgatggaaaggaagcaaatgtacctgatatgccccaaacttcaatgcatactttgccgtattgcgcaggttcttctcgttgtcattaaaatttggaatcagcggaacccggataattagaggtttctgcatttttttaattacctctaaatttttcaaaggaagctcatttccagaccccgtatactttttgtgcatttctgtgtcggtatgcttcaagtcaaacagtaccaaatctacattttccagcaggcgtgtaaaatcttcctcacagcacacaccacaggtttctatggcggtatggatcccgagctgctttaaccgcaataacagttcgcaagcaaattcaatgtgtgccacaggatctccgccgcttagcgttacacctcctcctgaatatttataaaagacctcatcctgtaatactttttctatcacctcttctactgtgtatttcctgccaacaatttttcgtgctccagaaaaacatactttgacgcattctccacattcaacgcagcgggtccggtcagttacgatttcttctcccttcacactcactgcctgcttcgggcaagcaaggatacatgcgccgcaatggatacatttgctttcaataaaaaaaagctgcggctgcttacgctgggtttccggattatggcaccagatgcatcttaaaggacatcctttaaagaatactaatgtgcggattcccgtcccatcatgaaccgaaaaccgttgtatgtccgttatctctgcctctgcattcatctcctctttcacccccattgctttgctgaaatcctcgcatcccatatttctcacaagtacctgctgtgtgaaaggcatcagtggccatgccaaatttgttcacttactcggcatttttcttgctggaaatatcgatactaaccgcaatcaaaagaactgcgccttttacgatatactgaaatgtcgaatccaaattcatgagactcatgccgttttccaggcttgccatcatcatcgtaccgataatggcgcctataactgtaccagagcctcctaaagtactggttccgccaacgatgcagccggtaattgcgctaaactcaaagctctgcccaaccatggcagttgcctgccccacacgcccaaggaatacaatgctggcaatcgctgtgatcaggcccataaacgcataaacaatcatctctgtgcggggaatattgatgcccgccagcctcgccgcatctcggttactccccagggcataaatgctgcggccaagcgtcgtactctgtgataaaaatgtaaacatggcagccaataggaacagcaacacgattgcatagggaattcccttatactccagaagcactacgagcagcaaaatcgaaagccctacgactacaactattttgaaactctccagccggacacttaacacaggaagcccatagcttttctgtgaaagtctctttttcaatgtgtacgcaacaaacaggcacatagtcagcactacaaaaatgatgctggcactatttagcagaaacccacggcccatttgcgcaaaagaatcgcttaccggcccttgagcctttccctcgccaatcagcaaagtcagccctttaaagatcaactgtccggccaatgttgcaatgaacgcaggaatccttcggtatgcgatccagtatccattccagcagccgatgagagttcctataatcaatgtaaaaagaatggttggcgttgtccccaaattatgctgcgtctgcagcactgctgcaaaatttgccaaaaagccgagcactgcacccgccgaaagatcaatgccgcctgacaccattacccaaaccataccgattcctaaaattgaaaaggtgcatccctgcagcagcagattgctgagattcaggcttgagagaaacacaccgtgtgtcaatatctgaaacagaaggaaaatacccgccatttctataaccattgcaaacttcgtgatatttccccggatgtcgatctttaacacttggtgttcattctgctgagcttccaacatattcacctctttctcctgacgcacaatacaatattttttcctgagttgcattttctcttgtcagttctccattgatcgttccttcatgcattacataaattcgatcactcattccgagaatctccggaagttccgaggaaatcataataatcgcaacgcctttggacaccaattcattcataatctggtatatttcgtattttgcgccgacatccactcctctggtcggttcatccaagatcagcacttctggttttgccaacatccattttgccaagattactttctgctgatttccgccgcttaacgtctctgtgcattgatcaacatctcgcaccttgatattgaggtcttttacatactgctgggcctgtgtaatttccaaattttgattgatggtccataagtgtgtcaatcgctttagacttgccaaggacatattgcgtttaacgtcatgcgataatattaggccgtattgctttctgtcttctgacacatagccgatccccattcggatagcttgctccggtgatctgatttggactttctgtccattaagccacaattcacttttttcatctgccttgagcattccaaataaactcagtgcaaactccgtgcgcccggcacccatcagtccagcaatcccgagtatttcccctctatatacgcttatgttgacatcatcaaccaactttttcccaggctgctttgtgttcataacggtccaccggtgagtttccaaaatcttttccctgcgcgtgtgtgcctggtgtggaaatagctgaaccaactcacggccaaccatataggatatcagcttttcttcattaacttcactaatcccctttgtaacgatggtctggccatctctaagtactgtaacgctgtctgcaatttgaataacttcatttaacttgtgggaaatataaatgcatgttgttccatctcttttcaattccttcaatatccccatcaagattcccacttctatttcggttaaagaagctgttggctcatcgaggataatcaattttgcttttttattaagagctttggcaatttcaaccagctgttgtttgcctactcccagtgaactgaccatggttttgggcgattcttgcagctttaccgttctcataaggtctgctgcaattttgtattgttcgttccactggattacccgcttttttctcaattcattgccaagaaaaatgttttcgcagatgttcatgctcttaaccaaattcagctcttgataaataatcgcaatcccggcaagctccgcatcctttgtgccccgaaaatgctgctcttcgccaccgagtatcaatcggccttcatagcttccatctggatatactccactgagaattttcatcaatgtggacttacctgctccattttctccgactaaagcgtgtatttcccctttttccacctcgaaggaaacatcatctagtgctgtaacaccatgaaatcttttggtgatatgttccatttttagcatgcacttttccaatgtatcgtctcccccattctaaatcaagcgtcatccgaaagcaggaatatctataaccttaccgccctgcatagcagactgatgggcacaaattccaacgccggtccaatacgctcccatgatgtcatccggtacgcagggacgctcctctatgatggatcttacgaattcatgcactaagtgtggatgagatccaccatgcccgcctccttgcttaaaggataaatgcgtgtttttgtcgttataaaccgtctgtctcgtaaaatgggcaatttctttcggcaaccggtctgcgaaatcagggatctccacccgttcttctttaatttcactgccgcggaaaaaccgttccgggtctccatctaatttataagtttccacctcacgaagcgcccctgttctcgtatagaaaactggagattcactcgctaactgttgccactcaaagctcttcttctcaccatagatgcgaaaacattcagaataactgcgggcaacgccatacaaaaagcgctccatttctatcgtcaaatcactgttttcaagttcaatcagcgcactttcgaatgcaaacggagaattatactgcgcaactaactcatcccggattttcccggaacctcgtccatacacacgtttgggcaaatgtcccgccagcatcaggcagggtgctactgcatgcgtgggatgcataagaggaggaaagccattccagtaggaaggccagccttccatatcctgataatgggcgcacgtcatatactgtatgcgccccaactcgcccttttcatgcagctgcttcacatataaaaattccctctgaaaaaccgtagtctccataaacatataatttttattggattccttgcgcgctgcaatgaccgcattcaattcatccaaagataaccccattgggatcgtacatccgcaatgcttcccggctttcagcactcgaattgagagcggtgcatgcgttgctggtggcgtgacaaggtgcaccgcgtcaatgtctgggtcatccaaaacttcctggatttcgcatgtacagttctcttccgggattccataccgattttgtgcaacgtgcagtaaagatgcgtccgtatccacaagataaactttctctacatcggggtgttccagataaatcggaacaaattccagtccaaagcttaatccgacaacagcaacgtttagttttttcatttttgatcctctcctcttttccaaaatcttttatatgttggtttacatgttgtaaaaattacgagtttttagggtccctgcattcctatgaatacgaaaggggaatcaagtttccatgctcacaaaagttgaatccgggttttggttattgaaatggtatcaccaaggaatccttgaagaaatagattattactcgaagcttttagactattccgagaatcttctgaaaaatatgatttggaactgataaaatttttgctcttctctgtctgccctatataataaagcaactcctcattcaatttcgtgttgtcaattgcgccagaggcatatgcttccatgagccaaaaaggccagaaatacaggagaaagttgggattatagaaaagcacctcgaaaaatatgtgagcaggtccagaaaaaacgggcagtgacaaaaaccccctgatgtaggaaaacagactacatcagggggtattgctgtgagcaaacgaaatcatacacatatacaggtagtgctgcctgaaatcaaagctatgctggcagaggggaaggcgcagcgggaagtagcgtcatattatagatttttaataaatatgtggtgaaacatttgctggcacgagaacgcaggaaaaaacgaaaacaggaatcagggatcctttctcggcccaaaggacggccaaggaaagacgccttgccgagagatattgcagcggagcaggccaatgagatccggtagctgcgcatggaaaacaagctgctgcgggattttctgcgattcatgggaaggaagtgatgccgagggtaaaatgccacatcatctatcggcacagagcagagtatccagtaacagttatgtgcaaattctttgaagtattcaggagcggctattatgagtttgtccagtgccttggcagaccggggaaggacacagctcttgcaaaaatcattgccgagcagagaaagcgcagcttccgcacctatggctaccggcggatgtggccatggccgaaaagccggaatatcttctgtaatcccaaaaccgtgctgcggatcatgaagaagcatgatctgctgtctgatatccgccggcgcagaaagtggcagcagatggggcagcaggtccacaagtacaaaaatctgcctaacagggagtttcacgcggacaaacccaacagcaaatgggtaacggacatctcctgcatccacgccaggcagggcgtactgtatctgtccatgatccgggagctctacggcaacagaatcgtcgcctacaagaccgaaacacagcagacagtaaacctggtgtgggacaccattcgcctggccatgaagagggagaaaaagagagcctccgcggagttgcagctccacagcgaccagggatttcagtatacctctcaggcgtacttcaacctggcccaagcatacggcattacaccgtccatatcaagacgaggaaatccgtatgaaacgccatggcggaaaatttcttttccatcctcaagactgagtgtatctgccgccataaaccggcctcattacgcgaggtcaatgagatgattgaccgctatatccgcttttacagccacgagcgtatccagttaaagactggagaggcgccgccgatgcgacgcctctccgcttaaaacttgatttttcctgccagggttcttttttgtgctgtccgcataatttggggcggttcaatatcgtcttcggggtgctttggagagaactgctaaaatttagatatttctaaaaactatattggttatcctgttttacagttgattgccctaattgctttggctattaagcccaagcaaagataaaagaactttttgctgatgacctgaaaaccgttgatacatttaagccctataattacattccgactgtaggaaaacctcaaagccataacggctctaaggctttttccttttccgctgtgtgcgttgcgtttacaccattttgcacgattatatacactttttgctgtcttgcgtggtacatatggggtacaggtccgggggataaaataaaagcagggagcttttttagctccctgctttcttcttttccggacggggcagatccccgcgaaagtagctctcggaccttatcgagggtttcctgctggtgattttctgctgaagaaatacttgtttaaattgaaacggaaatgtgaatctgtaagaggataaatcttttaatccaaggattaaaaataattggtatatgcagattactggattgcccttcaggaaggacatctgacctacggtacttttgaggattataagagcatcatcaataggcatatcaagccatcaatgaagggacttcgaatgcgcgatgtgttgccagatgacatcacacgaatgatgaaagaagtggccaattttagcaagtcagtccatgataaaacctatatgcttgcaaagcaaatgttcacaaatgcctatgacaataagcttatctctgaaaatccatgccccaaaatgcacgcaggaggtcgtgatccagtggaacgtcaagctcttacgaatgaacagatgactacccttattgaggcggtcaagggcacaagggcctatgtcttttgtatgataggcttatactccggccttcgccgcgaggaaatccttggcctcaagtgggactgtgtccggttgacagggacaccttcaatccttgtaaaaagggcctgccggtttgtccacaatcgtccagttgttgaagagcgcctaaaaactaaggcgagcaggcgcgtgatccctattccgccacagctggtacagtgcctgcaggaggctaaggcaagttccaagtcctgctacgtcataggaaatgaggataacactccttataccgagacacagtttaggagcatgtgggactatgtgcggaatcggacagtaggcaacaaatcctactatcggtaccgtaatggtaaaaaggaactatactcgtttgaagccaaattgggagaacaggctcaaaacaatccaaaggtaaaatatacgattgatttcaaagtcaccccgcacattttgcgacatacgtacatcacaaacctattgctttccggtgccgatgtcaaaacagttcagtatttggccggccatgagcgggcatcaatcaccctcgacatatacacgcatttggtatacaataagcctgaagagttgatggaaaaagttcaaagagcgtttccatcatcagaatgaggcctctttgtatggacattgcggaagctgagaaagatgagggagcaggaatgaaggtgtacatcgagaggacggccgtaatgaacgtacttgagcagtactatcctggcgtaaatgagcgattgtacattgtcaaggatattacttctctccccgccgccgacgttgcaccggtgaggcatggagatgggcggaatacgatggggccgataaagggttccactactgttccgagtgcaaagggcaagctttcaattacgaggaaaatggagaggtgattgagattctttcaggttggtgccccaactgcggcgctcgcatggacaaggaggacaactatgtacggaacgactgaaaagaaaatcactcacatcatagatgaatcccgcgaaaagggatggggcggatttgtcaatactgtttgcgggaagtggattcgcccagactggttaactcaggacaggccggatgggactaggatgtgcaagctgtgcgccaagaaggaggccaccatgaagtttcggaacccttagacggggaaggtttttgatgttactgaaggtgcaccagggacaggattctgtagtgggattcattgctttgactgtccaatacatagtgaacacccgtattgtaaggaatttatcaatgcccgcccccacgaagccgctcgcctgatggggtacgaggtggtggaggacgataaagtggtcgaaaccgacacggttaaaaaggaggccaacatgggcaagccattgaaggactgaacgcttggagagatccaagagcggtgttatcaatacaggaaatcccacacagacaagccgtgtgagcagacttgtcccaatttatcagaggggtatttgctctcttaaatgggtgcactagtggaatttagacgacaagccccgcttcacccagaaggaggtggagagggcgaaggcgattaaggtgttgtacccagaggcagacagccttgatgaatgcgatccgcaagttaaggtattgaacaccaaatttgttatggcaacgttagatacagcattgtttccatctcttcgtcccagcgaaaccgtcacccttgacgagatcatcggaggcgcggccaatgcccaaacctaacgccatgcttgcccgcattgaagccgccgctaaagcacgctatcaggctcgccttcatacttctatggacatgctccttcagctgggacaggatgctgccgctatcgctacccatgtagtctttcaacttggcccaggcggagcagagcagttttttgtggcctaccgagaagctatcaacgatatggcccgccgtgttgtagattcggaacaaaaaaacgattttggaaaaactgtttggccgaagtttgaggttacaaatgaggttacagacgaaataaatcgaaaaaaatccagtgttttcaagggtttccgacgtcagggcgtaaaaaatacggcctcaaggccgcccgtcgggctccccagttctccaagcgctgattcttcgattgcactttcaaaaatcccgccacagcaatgtggcgggattttttcttgtactcctgcagcccctgcacaacggagcggcacttgccttcacgccctccgtgtgctactatatcccacaacggcaaatttcgacaggaggtttttatgcagacaaaggatctattggattgcagtcaggacgtcctgcgtgcggaaaaggcgctggaagttcagtatgaggagtattacgaacagctggccgaccagcaaagcctctctccggaggagcaagccgccctgcgaagcgacgtgacccgggaggtggagatgctggaggatgcctcctcctgcctgcgtcaggcccatcagtgggcctccgacaaggccgacgagctcaccacccgcctgcgggaggggcaggagagctcccagcgcaagggcctcttccgccgtgcccccgccaactccgttatcgacctggaggaggagcaggcagatagctttgcctccggcgtcaacttttacaaggtcgctttgatctgcatcgccggcagctttgcgggcgtggtggtggagatcctgtggtgcctcttccgcaacgggtatatcgaaagccgctccggcctggtttacggtcccttcaaccctgtctacggtatcggcgcagtggtgatgaccctggccctgtaccgctatcgcaaccgcagctcctccatctcctttttcggcggagctgtggtgggcagtgtcattgagtacctgctctcctgggggcaggagactctcttcggctccacttcctgggattacagtcggatgcccttcaacctcgacggccggatctgcctgctctactctttgttctggggcattctgggcgtcctgtggatcaaaagcctctatccccgggtcgctcaggtgattttgaagatccccaaccggttcggcaaggtcctcacctgggtcctcaccattttcatggtcttcgactgcgccatgagcctgctggcagtggaccgctggtccgagcgggtccgcggagagacccccgtctccgccgtggatgtgttttttgacgagcatttcccagacagccgcatggagcgcatttacgccaatatggaattcggcacgaatccagcctgatcggcgcagcagagcggcgggcgctatgcgcccgccgctctgctttctcttacgtataggaccgctccacgttcaccacggcgtagtaattgccgtccagcgcccgcacggcgctgcggattttctgctccacctcctggtccgtgaggcggaagccgaagggcaccaccgcgtcgaagatcaggttcgtatgggtgggtcccgctaccatgcggaaatcgtggatgtcgatggcgtcgtcgatgcagtggatcagggtctggacccgccgccgggtctcctcggtgacgccgtcatccgtcaccaccgggtccatgtggatcactgcgtcgcaacccagcttctcccgcagctccttctccacgttgtcgatctcatcgtggagggccagcacgtcctcgttggcgggcacctccgcgtggagggagatcatcacccggccggggccgtagtcgtggacgatcagatcgtggatgcctagaatggtgctgtgggccatcaccagatcccggatgcgctggacgaactcatgggtgggcggcgtgcccagcagggggtccagcgtgtcccgcaccgcattgatgccggaccagagaataaaggccgccaccagcacgccgcaccagccgtcgatctccaggcccgtgaaacggcccaccagcgtggcgatcagcaccgcggcggtggccacactgtcgctgagggagtccatggcggtggcctccatggcgggagaggccagcttcttccccagccgccggttgtagaggaacatatacagcttcaccagaatggacgcgcagaggatcgcaaagatcagcgggctggagtccaccggttccggatgcaggatcttctcaatggacgtcttccccagctccaggcccatcagcaggatcaggaccgataccgccaggccggagacgtactccatcctcccgtggccgaaggggtgttcggagtccggcttctgccccgccagctgaaaccccaccagtgtcacgaaggaggacccggcgtccgacaggttgttgaaggcgtccgccgtgatggcgatggacccggagagggtgcccgccagaaactttccggcgaacagcagcacgttcaggcagatgcccacaatcccgcagaggacgccgtaggccctgcgggtctccggctcttcccgggccgggtccggtttgataaacagccgcgccagcagtgagatcaaagcaggttccttcctttccatggggccgcggccccggtgtctatatccagccgggcatctccggccaggaaaaagccgccctgcggcggcgtggttttgggccagggtgcgcttttccgtcccatggccggaccggtggagcggatcagttccgctttccggggatcaccagcttcatgtggcagcagagatcgtccaagtcccggtccgtggcggccgggatccgaagcttggccccgcagtcccggcagatgagatccacggcgctgcggcggatctccataccgtaccgtccgctgccgcaggcgcaggtgattccatccggccgggcggcgatatccttcagctcagacaggatctcgtacatgatgacgttgtccacaaatgcctcttcgccgtcctcctgctgctggtgctccttctccgccagcaccgccagatcccgcaggtttttctccaccgtcccctccgggccgataaagcagcagaattgccgcgtcttggcgcagcccagggcggtggcgccccggagcacccgctccggcgggcagtgggcctcatgggtctccccgcagatgccgcaggggacgtagatgtggtactctgtcccgtcgaactccaccttcagggcagacttgccgcaggcgcactccacctcggcgttggatgcctccagcgcaaagacagatcgggtccccatgacggttttgccgcactgggggcagaggtatccaaatgtccgcatctcttctttcatggtatgcgcctcctgaccgggatgtttccattagatgaagattataccaccacgcggaacagttgtacagagttttttgaacattagcagaggctaactgcccgttttctctgaaaacaggtctgttcaagtcgttttttctgtgctatgatggggcaaaaggagggagctgtatgtatcatctgctgtccgtgtcctctgcaatgctcatctcctttttgatcggcctgctgtttgccgctatgtgtgccattgtgggccgccaaaaagggtattccactgcattgtgtatcctgctgggcttttttggcaggctcatttgcttgcttattctgattcttctaccagatcggatgcaggagcagtacgagtccgaccatctgaagcaggagctgtcctctctacgccaacggatggccgaactggagcaggctttggaaccaacgcccgccccggagcctgccgccccggcagcggatgctcaagcagcgccccccaagcgtccgccggacgcccctgccgtctttcccgcccggacggaggaggtcatcgcctgcccccggtgtggccgccaccagaagggcaatcgggattcctgctacgcctgtggcctgccgtttcaatatgaacatgaataagtacaggaggtgccgctatgtttgctgcgctgaaccttgatgcgaacgacgcctcgatctctccctcctgatcgtcatggcctgggcagtcatcagcttcttctgtggccgttatggccgggaaaagggctactccttctggttcagcttcctgttgtgcctgttggggcagctgatcggtctgctggcagtgctcctgctgccggacatcgcccgtatccgtgcggacgccgtaggacgtgaccgcgcccaggatcaggagatcgccacattaaaggcgcgcctggctgttttggagagcggatctggcacacctgctggcacccgagttgaaagcccgcctgccgcccccgccgtctttcccgcccggacagatgaggtcatcgcctgtccccgctgcggccgccgccagaagggcaatcggcattcctgctacgcctgtggcctgccgtttcgatatgaacaggaatgacctttcagaggtccggcttccgccgggcctcatatttttgcctctttgggacaatctagctacgaaaactttcttcaattgcgaggtggcgcatcatgaatgacaagcgtctgggccgccagaccgtggccctggcccatcccccctccgtcctctccttttccaatattggggggaaattcgagggccagggccccctggcggacttttttgacgagatcagcaacgactccttcttcggggaaaagacctgggagaaagcagagtccgccatgcagaagacggtccttcagcgagcgctggagaaggcggagctgacgccggaggacctggactatatcctggccggagatctgttgaaccagtgtatcggctcctccttcggcctgcgggacttccgggtgcccttctacgggctctacggtgcctgctccaccatgggagagagcctgagcctggcgtccctgctgatcgatggcggctacgccgaccgggccgccgccctgacctcctcccacttctgcaccgccgagcggcagtaccggatgccggtgccctacggcagccagcggacgcccaccgcccagtggacgaccactgcggctggctgcaccatcctgggcagcgacggccccggcccctacgtcacccacgtcacctgcggccggatcgtggacaagggcattacggacgccaacaacatgggcgccgccatggcccccgcagcctacgacaccctttccgccttcttccgggacaccgggtacaagcccgcggacttcgacctgatcctcaccggtgacctgggagagctgggccacgccatcgtccgggacttcttccagcgggacggtgtggacatgggcccccagttccaggactgcggcctgctgctgtatgaccggaagcaccaggatatgcacgccggagcctccggctgcggctgctctgcctccgtgctcaacggctatctcctgcgcaagatgcgggagggcaagtggaagaccattctcttcgcccccaccggggcgctgctctcccccacctcttctggccagggggagtccatcccctccatctgccacgccgtgcgcctgagcgccgtccgggagtaattggtcaacctatataaatttcggataaatttttagcggattcagcagatttcttgtgaagaacgtgtcttgacgctgtccgtctaccgtggtaaagtgttctccatcaaaggcaagggcgcctgtgagaccatctcacagacgcccttgcctgtatttgttccaaggcgcggcgtgacgcgcggccgccgcccgtggtgatttaggagggaacacgatgtattcatcagtcaacaccatctgggtcctgctaggcgcggcgctggtctttttgatgcaggcgggcttcgccatgtgcgaggccggcttcacccgggccaagaacacaggcaacatcctcatgaaaaatctcatggacttctgcatcggcacgccggtctactggctgctgggcttcggcctgatgttcgccagcggcggggccctgatcggcggcctggaccctatggtccagggggactactccgccatcctgccggagggcgtgcccctgttcgcctatctgatcttccaaaccgttttctgcgccacatccgccaccatcgtctccggcgccatggcggagcgaacaaaattcctctcctactgtatctattccttctgcatttctgccttcatctatcccatctccggccactggatctggggcggcggctggctcagtgatctgggcttccacgactttgccggctccacggcggtccacatggtgggtggcatctgtgcctgtatcggcgccgccatcctcggcccccgactgggcaaatacgacaaggacggcaaaccccgggccatcctgggccacagcctctctctcggtgccctcggtgtgttcatcctgtggttctgctggtttgggttcaatggggcctctaccgtctccatgaccggagacaacaccctggtctccgcggggctgatcttcgtcaacaccaatatgtctgctgccgtcgcctgctgcgtcaccatgctgtacacctggctccgctataaaaagccagatgtgggcatgacgatgaatgccgccctggcgggactggtggccgtcaccgccggatgtgatgcggtttccatcggcggcgccgccatcatcggcatcgcagccggcctgctgctgcctatctccgtgaacttctttgactctgtgctgaagattgacgacccggtgggcgccatctctgtccatggcgtctgtggggccgcaggtaccttgctcaccggactgctggcagtggacggcggtgtgttctacggcggcggcttccatttcttcggcgttcagtgcctgggtgtagcggccacggcggtctggaccattgtcaccattaccattgtgttccaggtgctcaagcataccatcggtctgcgggtttcacccgaggaggaggtcaagggactggacatcaccgagcacggcctgcccaccgcctatggcggctttgcctttgcctatgacgataccccggacggcgctgctgtgctgaatcctgccgccccggccgtcgcgccggtcccggtgcaggaggcggtgccggtggaggtggtcactgccccggcagatgcggtatccgcttcccccggcgtcaagatgaccaaggtggacattctctgcaagatggagcggttcgatgccctgaagcgggccatgttcgacatcggcatcaccggcatgactgccatcaacgtcatgggctgcggcgaacagcggggcaagaccgagggctacttccggggggccagggtggaggccactatgctgcccagcattcaagtgtccattgtggtgtgcaggctgcctgtgcgcctggtggtagagaccgccaaaaaagttctgtacaccggccatatcggcgacggcaagatctttatctacgacgtggagaacgtcatcaaagtccgaaccggagaagagggatacggcgcactccaggatgcggaataaacatctcttttcgccccatggtttcatcacggcccggagatctgtgtctccgggccgcactgcataatcccgccggaaccgggcacactgctcttatgaaaagagggggagacatctcatggaatatctcaacgcgtttctctgcggcggtatcctgtgcgccgtgggacagatcatcatcgacaagactcagctgacccccgcccgcattctcaccggatacgtggtagtgggcgtgctgctcagtgccctggggctgtatgagcccctggcccagtggggcggcgccggggccacggtccccctgacaggcttcggccacacgctggccaagggcgtccgggaggcggtggcctccgatggctggatcggcatcttcaccggcgggctcaccgctgcggcggggggcgtcacggccgccgtggtggcgggcgtgctcatggcggccatcttccggccgggggacaagcggtaagggaaccggggccgccgcggcgttcgtgcccgcagacgcatcaaattctgggttcagccgcctcctgcgcacggccgaaaccacttcccgccccatctgtgcaagacctgtccgtctcctatggcgggcaggttttgcgcgctgggtctgcagctctaaaagagtggctgcagccacttttttgcggtctcagggcaaccgttgccgccctgttcttattttgtcatttttttgttgttctttcctgtccggtttcctgctatactatggtcaccgacaaaaatcgacagaaaggaacatccgatcatgcgccgttttaccgcactgctgcttgccgcgctgatgctgctctccctggctgcctgcgggcagggagcctccgctggcggctccgctcaaaatgccgccggagacccgactccggaagaggaggccccggagttgccggagccggaaccctatgagatttcagaccccacggtcatgccggagggcggcgttcgggacggtgtcacctacgcggcctatgacggcatcgtggagcacctgttcttccatccagtggtggcctatccggagctggcctttgacggagacgcccaggccaacggcattgacgattacatggtgacggtggatgagtacaacaaaatcctccagagtgtctatgacaagggctacgtgctggtggacatcggcgatgtgtggagcgagaccaccggcgaggacggtcagcctaagatggttcggaacaccctctacctgccggagggcaaaaagcccctgatcctctcctacgacgacaccaactactatgaatatatgcttgccaatggcttcacctacaagctggtgatcggggaggatggcaagatcgcctcctggggcaaggacccccagggcaatgaggtgacctcccgggacctggacgccatccccatcctggacaagtttgtggaagagcacccggacttttcccccttcggcgccaagggctgcctgagcctgacgggatatcagggcatcctgggctaccgcacccagacggatcaggatgtggagtggaccgcggagcgggaggccaaccgccagaaggagatcgaggcggtgaagcctattatcgcagagctcaagcgcaccggctggaccttcggcagtcacacctgggggcacatccgcctgggcaccaagagcctggaatccatccaggcggacacccagcgatggtttgacgaggtgggcagcctggtgggtcccactaccatcctgttttaccctcacggggagcggcccgacggcaacgactggcagaacaccggcccggtgttccaatacctccagagccagggcttccgagtctttgcctccgtgggcattgagagcttcagctatatcaagaaggatctctgcgccgtcatctgcgaccggctccacccggacggcaccaccctgcgccattccagagaccggtacttgcaattttacgacgcaaaggatatcatggatgtaacggttcgtccccagcgggagatcgactgggcgtaaggggggagagccaccgtgaaaaggtgtgtctatttgtttctgctgtccatccttctggtggccgggctgacggcctgcggctccgggaaagcagaacaggaggttccctccctgactgagatcgagggcatgacgaatgatgaagccgctgaggccctgtccggtttttgccgccaggacattctggacgcctggggaaagccgggcggcggcctgtccggcctgttcggggacatttatgatgcccccaccctgggcggctgggtgatcgtccagtatgatatcccggccaccaccagcacggacaccgacctgaatgctctgccggtgagctgggtgtcgcttccggccgtcagttgagcgcatcttgcaaaggagtgtatttccatgacccgtgaagaactgaaggccgcggccgtcgccatgctggaccgggcctacatcccctattcccacttccccgtgggcgccgccctggagtgcagcgacggtacggtgttcaccggctgcaacatcgagaacgcctccttcggtcccaccatctgcgccgagcggaccgcggtggccaaagccgtcagcgaggggcaccgggactttgtccgcatcgtgatcgccgggcggagccgtgagctctgcgtcccctgcggcgtgtgccgccaggtgctgcgggagtttgcccccaacatcgagatcatctgtctcaacggcgccggagaggagcggaccttcaccctggaagaactgctgccccacagctttggcccggagtacctgcagtgacggctcccgccgaaggggcgctgcgcatcctgaaactggagccggtggacttttgctgcggggaggtcctggccgagtcccagatatgggtgctggcagaggaccggaccggaaagcgcctctcccgccggatcccagccaccaaggccgcggagctgggccttctcccaggcggtttctgccgccggtcggatctgcacatctgaatcaaaacatgccgccggtgctgaggcaccggcggcatgggctttataccagcttttcaaagtagaagaaggtgtcgtcctcccccttcttccgcatacaggccgacaacatcttgtaggacgcctggttctccttgtaacacttggccaccacccggctcagatggattttgtacaggccccactccgccacagcagcgaaggcctcggtgccgtatccgtttccggcgtatgccttgtcaatccggcagcccagctccgcgccgccccggcagtcgaaccggtacagcaccgcctcgccgatgagcttcccatccagccggacggcaaagttcaccgcctgccggttttcaaaatcccgtttcgccacgtcgaagaagctccgctcctccacccggccgcccaggccgcccacatcgtcatagccccaccagcggttccggtcggcgtccagcaccagggcgttgtaggcggggatatccgcctctgtcagggcggagagggtcagccgctccgtcttcagctccggaatggcctgcacgtggttcagcagctcattctggggatcgaaccggtacttgggcgccagcctggccgggccgtactggagcttggaagtcctgaggcccttgtccgccgcgtcatcctcccggttgatccactggcagccatcgccaaaggcgtcggcgaatgcctggaccagcgcaggatatacaccggtataggagtagagggccttttcaatgtggatgatcagggtgtccccacacttttccgccagggacagggcgatcagcttctccccgtcaaacatgccgccggtgaaaaagtagggcttgccggtcatcttcagcatcttcttggccagctccagctcatttttggccttggcgttgctgtccttggggaactccgcctcatagtcctgccagaactgctcgatcaccggtgcgtccgccgccgtcagggggcggaactgcgcatccggccacttggaccggaacttgttgatgtggttccgctggccggagtaccgccgcccggcgaagaactgcaaatcctcccggtaatagacgtagtcccgccaggtccgcacatcgctgacccgcacatagggataccggcccagcagcttggcggccctgcactccggcaccacagagatcaccggggggataccccgctccagacagtcgttctcaatggcctccagggccgcatcctcgtccccctccgggccgggaaccgggtagtcgaagactacctggccgtcgatctcattgcggaccaccaggcatccggcaatctccgcccaggccgggtggagcgcggccttccacatgagcttggtgcccacggaatactcacacaggccgaactcacaggtctggtaataccgccggaggcggggggcctcctgctttgtcactggtttgaactctagcatactttcattccttgtccttgatcgtaaagcacgggatatgcctgtgccgtttcctactcttcccgcaaagtatatgccccgctccgcaggggtgcagtcgttttcgcaacagctctccgggctgtcagcggagaaaacggccgcgggtgccagcccgcggccgctgcgtcacacatcagttcatctgcttgcggcggctgagattcatcgtgccgtcctgcatggcgttcagggagtccagactcttgccggtgcccagcgccacacagctgatagcgtcgtcggcaatcactgtgtggatgccggtccgggccgtcaccagcttgtcaaagccggagaccaggctgccgccgcccgtcatgacgatgccgttggtggagatgtccgccaccagctccggcggcgtccgttccagtacggagtggatggcctccatgatccgctccaccggctcctcaaaggcatccatcatctccgtggagctgacggtgaccaccttgggcaggccggtcagcaggcagcggcccttcacgtccatggtctcctcctcgtccttggggaagacacagccgatctgcttcttcatctcctcagcggtgcgctcgcccaccagcaggttgtgcttgcggcgcatgtacttgaccacggcctcgttcagctggtcgccggcgatcttgatggaggcgctctccaccacgccggacagggagatgacagcgatgtccgcggtgccgccgccgatgtccaccaccatgtgaccgtcgggctgggtgatgtcgatgccagcgccgatggctgcggccaccggttcttcaatgaggtagaccttccgggcgccagcttggatgcccgcgtcgatgacggcgcgctcctcgacctccgtaatgccggagggcacgcagatgatgacccggggcttgaagaaggacacgcccgccaccttgtggataaactcccgcagcatccgctccgtcatgtcgtagtcggagatgacgccctcccgcagggggcggatggcgatgatgttgccgggggtccggcccagcatggcctgagcctctgcgcccaccttcagcagcttgccggttgtcttgtccatggccaccacggacggctcgttcaggacgattcccttcccctttacatataccaaaaccgacgcggtacccagatcgataccgatatccttcgtcatggacatactgactccacctcatttgatctttctgtcttatagtataagcggttttcccgcgaacaatcatacagtctttattatactggcagtttcctgggaatgcaacactaatttgtgaacaatttccaccgattcaggcctttttcccgctgtccctctccagcggcgtcaaggccgctgcggcgcagaccacgtctgccgctccggcctcccgcagcacccgggcgcactctgccaaggtggcgccggtggtgcagatgtcgtccaccagcaggatacgatgccccgagatccgctccgggtccaccgcctcatagacccccagcacattggcccggcgggcggcagcttccttcagtcccgactgggcggggttgtggacggtcttgcgcagcagcggcagcggcttcgtctcccacaggcggcaggcgctctccgccagcaggcgggcctggtcatacccccgctgacgcaggcgcctggggctgacaggtacccaggtcaccgtgtcgaacgctccggagaagtgctccgccgcgcacccggcgatcagctctcccaggggcgccgcagcagaggacatcccccggaacttgaagcggtggagcccctctcgggccaggccctggtaccacagaggcgccgcgcagagaaagccgccgggcccccggcgcagggcgtcggctccctccgtccagggaagctccccgcgacaggtgtcacagatgcccggtctgtccaaaacacggccgcagaaggggcacttggctgggaagatgaggtccaggagggcggacagcaggctcatcgtttctctgcctccgccagcagttcgtcatacgtggtatgcaaagcgtcacggataccccggagctgggaagccttgatatgctgagcccctcgttcaatcttcaccagcgattcccgggtgatttccacgccctccagctggagcaggcggaccagtgccatgggcttgatgcctcgattttttcggatccgccgaatattggctccaatccggatgtcctgcttgatcttctgctcctccatagacgcctccgcaacaggacctgtttcggtccgattttgctttattctatggaggaaaggtaaaaaaatgggacccatatgggtccgtgttgcacgcctgttctatgaaaccgttggcgtcagtttccatctgcaaaactcagccatgacggctgggcggatacgcaggggacgccggatggcggcctcggggtgtctgctcccgcaggggctggtccagcagggatacagcccccgtttctcttttgtctttccaaaagggaaacgggggtgtatctgcccagccagcagcataactgcccgtcccgcgtccaatgggacgcaccccatcctccaccggcagcaaacctggcggcctttatctctccgccggatccgcaaaatgtgccagcctccaccggaggccggaataccgccgctgctgacggtcgttggccgccatggcccggatggccgcgtcgtcccccaccacgatcagaagctctcttgcacgggtcagggccgtgtacagcactccccgcaccatcagggacggcgctgccggcatggccgccagcaccacgcactggtactcgctgccctgggccttgtggaccgtcatggcataggccagatcgatctcattgagcatatccagcgtgtacgtggcgatccggtcatcaaagttcaccaccagcagctctccggacgggtcgatctccacgatccttcccacgtctccgttgaacatgccggtgcccacggtgccgtccgccttttcccataccacgttgtagttgtttttcgtctgcatgatccggtctccggtgcggaacagccgctctccccactggatctcccgtttgtccgccgccggcgggttcagcgccgcctgaagacagcggttcagattctccgtgccgctgggccccttccgggtgggcgtcagcacctggatctggtccgccgggatgcccatgtggtccggcagccgggttttgcacagctccaccaccgtggagagggtccgctccccatcccggcggcagaggaagaagaagtctccctggttgttggccagctggggcggctggcccaggttcaccgcgtgggcgttgcggatgatggccgactgctccgcctggcggaacacctcccggaggaacaccgtctccaccctgccgctgcggatcaggtcggagaacacgtttcccgcccccacggagggcagctggtccgcatcccccaccagcaccagccgggtgccgggccgcagggcccgcagcagagcggaaaacagcgccaggtccaccatggacatctcatccacgatcaccgcgtccgcctccagcggctccttttccgtcttttggaacgtcacctgatgggtgacgtcgttccagctcatccccagcatccggtggaccgtctgggcctccatgccggtcagctcgctcatgcgcttggccgcccgcccggtgggggccgccaggacgatctccaggcccatccgccggaacagggccacgatgccccggactgtggtggtcttgccggtgccggggcctcccgtgaggaccagcacccccgtccgggcggccagctccaccgcctgccgctgcaggggcgcataggtgatgccctgctgggcctccagctcgtccaccgcccggcccgcctgggcactgcggtctgtatccgcagccagcagccccgccaggcggatgcaggcggaacactccgcctcccacagccgccggaggtagcaggcctccacatgggccacctgttcctggaccaccgcgccccgttcaatgaggctgtccagagcctgctccaccagctccgccccgctgtccagcagctgggtcgtggcggagatcagcttgttccggggcaggaacacgtggccgttgttttcattgtggctcagctcaaaggtcaccgccgcctggagccgctggtcgctgtccgcagccagccccatgcccatggcgatcccgtcggtgacggagaactccaccccgcacgcctcgccggagaggaggtagggattctcccgcaccttctccagcgccgcgtcgccgtactgccgccgcagctccatagccaggacaggaggcagctggtactgggccagaaaggccatcagccgccgcaggcccatgtgctggcggaagctctccgcgatctcctgggccttgcgggcggtgacgcctttgagcgtggtcaggcgctccggctcccgctccagaacgtccagggtctccgccccgaaccgctccacaatccgccgcgcggtggcggggcccacccccttgcagatgcctgaggagagatagctgaagatctcctcctcgtcctccggcaggctccgctccagctccaccgcccggagctgttccccgtgctgggggtgggtctccggcacgccggagaccgccaggtgctctcccggcgccacgcaggggatacagcccaccaccgtaatcacctcaccctcctccgtcaggaggcgcaggaccgtatagccgttctcggcattttgaaaaatgatgctatgtaccgttccctcacaggtgaccagctcttccatgctcttcctctttcgtatgctcgttttcgtccagacggatcacagcgccgtccgtcagcgccacccccggatcccggtccgccagataggccgccagcgcccgggcgtcccgggtcagcccacagtccgccagcacgattctggccccgggcaggcgcccccgcaggcgccgcagctcccgcacgtccgcctccatggccagggcctctccccgcaggggcagcaccagcagcagccccggcaccgccggccgccccgcccggaaaaaggcccctgccacgatccacaccagggtggtcacgcccaccgcggagaagaacgcgatcaaaccgtcttgcagcaatgtcatcccaaatcacctcgggatagtgtatgcaacggggcagattcggtgttccggggcgggagtgtttggggtgcgtcccattggacgcggaatggcagctatgatgatagctgggcaatgcaccccccattttcttttcggtcttgccgaaaagaaaacgggccgtgcacggtccaaaagaaaaggccgcttggacgcgctccggtgcagtggccctccgcgctgacgggggtcggcgtaccggtgcctgctccgattttgcctagccttcgggcacgcttaggtcttctgcggttcccccaactgccgacccgtggcggatggtgcggaggtcgtcggggtgcaagatcgcatttgaccagcttctcttttcgcgcgttccgcgtcgctacgcgctggctggttctccgcggaagcgtgagcggcagcggaaagcgaagcaggggtatccctgaacctccccgggcctaaggattccccaagggcggtgcgtttccgtccctgacttctgcaagggagtgccaaccatcccccgccggcggcaggaggtctgcgctggcgcagaccgccccgccgaagcgctttttctcttccaccgggcgcggcgcattctctttttggcgcaaccaaaaagagaatggggggcgcatcccgccggacaagccccctgcgggagcagagatccccgaggccgccgcgacggcggcccatctcatgttacccccgcttgtcgcttcgccccaccagatagtcgatggtgacgccgaagtggtccgccagcttccaggcgttttccaggttggggaggttaacaccaccctcaaatttctggtagtgctgctcaacaatcccaatcgcctcagctacctgaacctgtgtctcttttttctccttgcgcaattctcgcagtctttctttcaaaagcattttgttcctcttgacaccgcgaattaactgtgttatcttttcatcatagcacagtgaaaatggtgttttttgaaaggtggtttctatgtcagactttatgatatggctttatctccactacatcaagccctacctggacactgtcccagcggacgactataacttccacatggatatgattcataacgagttgggttatcacgccttggaaagctatgaaaaaaacctggagttcaccgccatccacgctttcctgctgggcctgcgcaccggccggggcctgccccgggagtgattcaccgcccgatgcccagctcccccaggatggcttcctctctcgcccgcatctgggccttctggggcccctcgtccagatggtcgtaccccagcaggtgcagaacagagtgcaccaccagatagctcagctcccgccgtttggcgtggccgtactccctggcctgggccgccacatgctccatggagatcaccatgtcccccaggggcaccaggccggtgcccgggtctgcgtcctccggtgcgggcagctccccgggccgaaggtcgaactccggaaagctcagcacgtccgtagaggcgtccacctgccgcatctcccggttgatttcgtgaatgccgctgtcgttcgtcagcagcacgtccacctcacagggaacgtccaccccctccgccgccagggcggtgcggatcaccttgcggatcagggcgcagttgccctcactggcggcgccgggcacgtcggcggtgacggggatataatgccgcttcgccatcacttccgcccctttccgccgtttttcgcggtctcgtaccgctcataggcctccacaatccgctgaaccatcacatggcggaccacgtcggcgttggtcagctcgcagatgccgatgccctccacgtcccgcaggacccgcatggcctccttcaaaccggacgccttgccgtccggcaggtcgatctgggtcacgtcgccggtgatgacgatcttggacccgaagcccagccgggtcaggaacatcttcatctgctcccgggaggtgttctgtgcctcgtccaggatgatgaagctgtcgtccagcgtccggccccgcatataggccagaggggccacctcaatgttgccccgctccaaatacttctgataggtctccgcccccagcatgtcgaagagggcgtcgtacagcggccgcaggtagggatccacctttgattgcaggtccccgggcaggaagcccagccgctcgccggcctccaccgccggacgggtcaggatgatgcggttcacctgcttgtcccgaaacgcctgcacggcggcggccacggccagatacgtcttgccggtgcccgccgggcccacgccgatggtgacggtgttcttcaggacggacttgatatactccttctgaccgatggtcttgggcttgatgggccggcccttggcgctgatgcacagtacgtcgccggtgagctcggtgatctgggactccttgccgctgcgcaccaggccgatgacgtagcggacgttctgctccccgatggcctccccccgcgaagagagggtcagcagggcctggatggccttgcaggccagcatggtgtcctccggctcgccctccacccggagctccccgtcccggttcaccaccgtgacggagaactcctgctccagcaggcggatgttctcgtcaaaggagccaaaaatattcacggcctgctccagccgctcaatgctgattcgctgttccaaggtatcactcctgtatctcccgggcatcagccgcccgattcttctgtggggtctgtgtagatgggcacggcccggccgatctcctccacacactccgccgtcagtgtcaccagcagtccgtccccctcccggcgagaagtgcacagggtagagctgacggtgccgtaggggtccaccagagtgtggaggtagtccgtgaggatcgcctcaccccggctctccgcctgggcggcggagacctcggcggggaccgtctcgtaaaaacgaaaggtctccttcacaaaggtgaccggcagcggcagcccgaacagggaccactgggtcctttcggttattttatcatagtttcccgtcccgatgctactgtttaaaaagaattttacccgatttgtcccaaagaccagggagtagccctgtttctcctctccggtgtactgcttttccgccaccgtcagaggcattactgtggagagggtgtaccaggtccgggcctccactttccccatgccggtcaggacccgggcgcccacggtctccgtgtcctccacgccggagatcagcagctcgcccgcctccaccgacgtcccgggcagcacgcaccggaccccatccatcgcctggatgtccaggatcagcccgtcccggcgggccaccacgttggtgggctcccgctcgtccaccggctccggcgcctccacccgctcccgcacctctacataggcccggcagccggagacgttcactgtgatccacagcagctccggaatctccagcagcacatggttgcggatgtcctccgtgtccagggagatgccgaaggtcccgatccccaccccctgccgctgcagcgcccgcaggatctcctcgtctgtgacccgctggttcccctccaccgtgaagtcccagatgaagaaggagccgaagaacagcagtgcgctgcacagggtcagtcccgccaacagcgcgtgccgccgccggaaccggcccaggaagaagggtaccccctccttccgcaccacggtcagccggcagtccagctgtttcaccgcccggcgcagggcgtagtaatcccgccggttcagccggcaggtgaaggcagtctcggactcccactccatatcccagaaggccaggttccgggcgccgcacagattcagcacccgctccggaaagggggtctccacccggatccggacctggccctggagccggttgacgatctgattcagcatggtgtcacctcacccactccacggcggcaatgtccccgccgatccgcagctcctccgccgtcatggccatcagggccaggcgggcgccccggacccgcagcacgccgccggtggtgtttacgtcgatctgctcgtcgctgtacgccaggatgcctgtgtggtgctccagatacagctggcggctgcccatcatctccaggtggggcaggcccgccaccagatctgccggcaggtcgaacagctccgccaccgtgtccagcacgccgccgtttcggtcctttcgattccgctccatacgttcacctcttcccgactgtatgcacaaacgtcccgcaacatgccgggggcatagtgtcccccgctccggcatagggtgtggagaggtgatgcgggatgcggattcgatggcggatactggcctgcctgtgcctcggcggcctgctggtgtggtttctggcggacgccggggccgtgcgggacagtgtggcggaagctttggccctctgtgcccgttccgtggtcccctccctgttccccttcctggtggcctcctcagcgctgctggctctggggttcggggagctggccgccccctggctggcggggctgatggagccgctgttccgggtccccggtgctggcagtgctgcgctggtgctggggttggtggggggctaccccatcggcgccaagacggcagcagacctctaccgggaaaatctggtctcccgggaggaggcggagcggctgctggccttctgcaacaactccaatccggtgttcctcatcagtgtgctgggcgtgggggtgttcggcagtgtgcgggccggggtgtggctgtggctgatccatgtgctctccgcccttctgacgggactggtgtttcggggcagcggaaaatccgcttcccggcaggaactgacaaggcatcctcctttccaggctgtcagctttgcggaggccttcaccggggctgtccggtcctcgcttgccgggattctgtctgtgtgcgccttcgtggtgttcttctatgtgctggcgcagcctctcaccgccatgggcggccgcctgggggcggtcctggtggcggcgctggagctcttctccctgacgcccctgctgacagctgatgccttcggctttcttctggcggcggcagcagcgggctggggcggcctctcggtcctgtgtcagacgctggcggtgctggagggcagcggcctgcggctgcggaactgcttcctgggcaaggtggtgcagagtgccttctccctgctgctggccgctttgctggtgggctacgtgctgggataaaaacagcctccctgttgtcgaagccgataacagggaggcatattttgtcgtgaaattccgttttgtgatggaattaccgctggcccttgtcgtagggaatgccctccgccttgggggcacgggacttctgagatgtgaaggccagcaccaccagagagatgacatagggcagcatgttatacacggagctgggcaggttcagattgctcagcaggtcgaagccgctgtacacattgcccagggcccggaagaagccgaacagcagcgccgccagggcgatgcgggtgggcttccactggccgaagatcatcaccgccagggccaggaagccgaaaccggccacgccgttttcaaacttccactcgctgacgcccgcgatgatatacacaatgccgcccaggccgcccagcacgccggagatcagtacgccggcgtagcgcatccggtagacgttgatgcccacggaatccgctgcctggggatgctcgccgcaggcgcacagccgcaggccgaagcgggtcttgtacagcaccacataggcgattaccagggcgatcaccgccagcagcatgcaccagttgaactcaaagccgccgatgttcaccaggaatgccttgcggccgtccaggtactggatggtggaggacacgttgtccggatcggcggcggtgttcatggccttcacgaacacggtggccgcggcggtgcccagcaggttcatggccgtgcccaccagtgtctggtccgccttgaagttcacggccgccaccgccagcagcagggagtagatcatgcccagcaggatactggccagcaccgtcaacagcaccaccacaaaggcggaggtgcctgcaggcaggaacttcatcatcagcgcaccgcccagggcgcccatgaccatgatgccctccaggccgatgttgatgacgccggagtgttcagagaagcagccgcccagcgccaccagcagcaggacggaggcgaaaatcagcgtgtattgcagcagcagtaacattacgccttccctccttcctcagagccgggccggtcttcctttgcccgccgcttttcatcccgccggtccagccggctgttcataaagaccttgaagaacagtacgaagccgcacaggtagataatcagggcggagatcagatcagagatctgggcggagtacatggtcttgtccacatacgcgccgccgttggtgatgtgctgaatgaaatacgaggagaagatagcgccgatgggattcagtccgcccaggaaggcggcggcgatgccgttgaagcccatggccggcaccgcggactgtgtgacctgccactgctcgaatccggtgaggaacagcgtggccgcgcccatgccggcaaggccgccggcgatggccatggtgaggatgatgtttcgcttctccttcatgccgcagtacttggccgcaaacttgttgcagccggtggcccgcagctcatagcccagcttggtcttctccagcaggacccagatgcccacggccacgatcaccgtcagggggatggcgatggtcacatactggttgtcggagaacagggcgcccaggcccagagagggcaggatggcgtcgggattcgtgctgctcagggtgaaggtgtagggactggctgtctccttcacctgggacagcagggcgttcaccagatacaggctgatccagttgagcatgatgcaggagatgacctcattcacattgcggtacgccttcaggagcccggagatggcgcccagcaccgcaccggcagcaatagccgccaacaggcacacgtaccagggcagcccgaagcccaaggcgcagtacaggctggcgccggcgccgatgacgtactggccggcggcgccgatgttgaacaggcccaccttataggcgaacagcaccgacaggctgcacatcagcagcggcgcggtcttcaccagcgtgttgcccagataccgcagccgggccgcggcgctgggatagtacaggaagttctccacaatggtgcggatggcctctcccgcgccggcggggttgataatcagcagcacgatatagccgatcagcaggcccagcacgatgcacagcagggatgccagcagggactggaatcccttgttccgcaggagggatgatttttcttgtctcatggtttctcaagcccccttccgcttggcgccggccatgtacaggcccatctcttccgccgtggtggtcttggggtccagctcgcccacgatctcgccctcatagatcaccaggatacggtcggacagggacatgacctcgtccagctccaagctcaccagcagcaccgccttgccggcgtcccgctgggccacgatctgcttgtggatatactcgatggcgcccacgtccaggccgcgggtgggctgcacggcgatcagcagctccgggtccttgtcgatctcccgggcgatgatggccttctgctggttgccgccggacatgctgcgggccactgtgacaggcccctggccggagcggacgtcgtactgctcgatcaggcggttggcgtactcgcggatggccttgcgcttcaggaagcccgccttgctgacgaactgaggctcaaagtaccgctggagcaccatgttgtcctccagggtgtagtccagcaccaggccgtgcttgtggcggtcctccggaatgtggctcatgcccagcagagaccgctgccggatgggggcgcgggtgatgtcctggccgcagagcgtgatcttgccggactccaggggctccaggcccgtcaggccgtagatcagctccgtctggccgttgccgtcaataccggcaatgcagacaatctctcccgcccggaccgtaaaggagatattcttcacagcattgttgttatggagcttggaggccacagtcataccctccaccaccaggatgggatccttgggcttggagggctccttgtggactgcgaactccacgtcccggcccaccatcatgcgggacagctcttcacggctggtctcggcgatgttcaccgtgccgatgtatttgcccttccgcaggaccgtgcagcggtccgccacggacatgatctcattcagcttgtgggagatgaacaggatggatttgccctctgccgccaggttcttcatgatctgcatcagctcgtcgatctcctgcggcgtcagcacagcggtgggctcgtcgaagatcaggatctcattgtcccggtagagcatcttcaggatctccgtgcgctgctgcatgcccacggtgacatcctccaccagtgcgtccgggtccacctgcaggccgtacttctccgacagggccaggaccttctcccgggcctcctgcttctgcaggaagccgttcttgcagggttccacgcccaggatgatgttgtctaaaatggaaaagcattccaccagcttgaagtgctggtggaccatgccgatccccagtgcgtttgcatcgttcgggtccttgatctgcaccacctggccgtcttttttgatgacgccctcctccggctggtacaggccgaacagcacgctcatcagcgtggactttccggcgccgttttctcccaacagcgcgtggatctcgccccgcttcagttggagcgtgatgttgtcgtttgcgacaattcccggaaagcgcttggtgatattcagcatttcaatggcatatggctgttccaagcttaccgccctcctcctcttgtatagtgtatttattgtactatatcttccggaatatttcaaagaaaaaatgcaggaatatcaggtttgttttgtaaaatttgtccagaggcaaaaaaagaggacgggattgctcccgtcctcttcctgcaaagactctgatccttacttgatgttgccggcaaagttcaccgtgatggtggttgcgggcatggcggagatgtcgttggaaacggtgacatcgccgtcgtacatggccttcaccagggccttatagtcgtcctgggtgaagccgtcgccccactgggtggtctccatgggcagctggacatagttggcggtgggatcatcgccgttcaccaggcccagggtctccacctggccgccgtagttggcaaagttgcctgccacgacctcgcccagcatgtgcttgacggtctcggccagacccttcatggcggaggtcacgcacatgccctcgccataggtgtcgatgttggcggactggtccacgtccacgccgatcagcttgccgccgaccttggcagcagcctcagccgcggaggtgtagatgccgccgccgctggcgaagacgacctccacgcccagggtctgataccagttgtccatgtaggcggtgatatcgctgtcgccatagaactggttgccataggcatactccatcacgacctggtcggcgatgcccatctccacggcagcggcgtcagcgccctgcacgaagccatagccgaaccgctgcacggcgggaacggccatgccgcccagcacgcccaggtgggtgtagcccagcttcacggcggcgtagccggccatgtagccgcacagctcttcctgatacacagcgcagtacacgttggagggcacggtgtagtcctcgcccagatcgccctgtgccacgtccagcgcgatgaaggtcacgtcgggatacagctccgcggtctccttgatggtctcggcaaaggcgtagccgggcatcacgatgacgttgtagccgtcagccacagcggcgtccaccatggccacacgctcggcggtggagtcaccggcgggcttgtagtactcgaactgcaggccctcggcgtcacagaactcctggcaggcctcataggtggtctggttgaaggactggtcggtgatatcgccgtagtcagtaatcatagccacctgataagcggcggtctcggcgttgccgccatcctccgcatcggcgcccccgtcagcggcggtgtcgtccccgccgccgcaggcgaccagggacagggacatcaccaatgccaggagcaatgcaagaaacttcttcattggaatctaccttccttcgttttgttatccgcgcgaaaatctctccgcgcaggatgacctcaacgggtcaggcccattataacaactcttcctgaggattgcaaccgcatttccaaattgttttctttttcgccacattttgttgaaatttttatgaatttcggatatcttttttacggttttctaaaaagcagaaccaattctgcaaaatttttgctgtggtttgtcacagctctgtttccattgtcaccggtcatttcccggagaggttcggcctgtgccggaccgggaaaatatggaaaagatgctccgcgtcccggcccggcggctttgccggcgggcctcccgctttcacctttgccgaaagtcgccgctgcggcgggccgattaactatgaagggggactcaacgtcccccttcatgcttcccctgcgtggccgcggggtctgattcttcttttttgaactcgccttacttcttctccatctccacagcaacgcccagggcgatctccatcatctgggtgaaggtggtctggcggtcggcggcaggcagctcctcgccggtaatcaagctgtcggagatggtacagatggccagggcccgcttgcccgcctcggcggcgttgcagtacagggccgcgctctccatctctacggccagcacgcccatcttgccccagtccagagtgttgcccgccttgttgtagaacacgtcggagctgagcaggctgcccacatggggctcgatgccgagcttccgggctaccgtcacggcggtctccagcagggtgaagtccgcgatgggggcgaaggtgccgcccaggccgaactggtgggcgtagttggagtccgtgcaggagccctggccgaacaccacgtcccgcaccttcagctggggggagatggcaccggcgctgcccacccggatgatgttgtccacatcatagaagtggaacagctcatgggagtaaatgccgatggagggcatccccatgccggaggccatgacggacacaggcgtgccctgataggtgccggtgtagccctggacgccccggacgttgttcaccagcttcgcgtcctgcagaaaggtctccgcgatgaatttggcccgcagcggatcgccgggcatcagaacggtcttggcaaaggccccctgggccgcctcgttatggggagttcccatgctttcatttcctccttatttctcttccatggccttcacggccttgacgatgcggctggtgcccaggcgggaggcacccaggttgatgaagtcctccgcgtccttcaggtcggcgatgccgccggcggccttgatcttcacatcgggacccacgtgctttgcaaagagggccacgtcctcccgggtggcgccgccggtgccgaagcctgtggaggtcttgatatactccgcgccggaggcggtgacgatctcgcacatcttgatcttctcctcgtctgtgaggaagcagcactcgatgatgaccttcagcagcctgcccttgcaggcggccttcacggccttgatctcggcgagcaggtcatcccacttctgatccttcacccagcccaggttgatgaccatgtccacctcctcggcgccgttctccacggcgtccgtggccatgaagcacttggcggcggtggtgtcatacccgttggggaagccgatcaccgtgcagatgggcagctttcccgccacatactccgccgcctgcttgacatagctggcagggatgcagacgctggcgcagccgtacttcataccatcgtcgcagatggcccggatctccttccaggtggccgtttgggccagcagagtgtggtcgcacttgctcagaatctctttcacttccatttgaagcatctcctttatcattcatattttgtcgcccacgccggcgaaatatacccgttttccatgtatctcctggcggaagacccgcccttgggcctccagatggtccagatgggccagggcctctcccacggcaaagaacttctgcgccaggggaaaatccgcccagttccggcagcggatgctccaacgcatccggcctgcgatctgataggcggtgaggcccggcgccttctccacggtccgcagggtgtcctccagccggcgggcgtggtgggccttcagctccgccgtccgctgccgcaggtccccggtctccgcccggtgggcgggatacagctccgctgtgtccagagcggccgtcctgtccagactgctgagatagtcccccaaagagtcctccactccctgccagcggcagatgttgggcgtgatgtgaaacagcacatggtcgccgcagaacagccgccggcgggccgggtcatacaggcacaggtgccccggcgtgtggcccggcgtcagcacgcaccgcagcatacggccgccgtaatggagcgccgcgccgtcctgcagctccgtatagagcccttcccgccagggcggggccgccgtctgggccggattgtctccccacagggcctccatctccgcctgggtgaagccgtcccgcgcatattctccgtaaagccgcttccaacaggacggatccgaggcgtttttcacgccggggctgtcgatctccccgatatagatccggcagccggggcggatcagctccggcgccagccctgtgtggtcgctgtggaggtgggtgcagaaaatgtccagccggtcccggtccacgtgcgtctccgccagctggcgctccatggcctcgcggcaggactgctggcggaagcccgtgtcgatcagcaggctccgctctccggtcagcaaatagctgttcaagtttttcagcgggttccccaccaaggggatgtccagccgccagaggtcctccgccaatcgctccgccatgggccgcttcctttccaaaaggtagattcagtatagcagactttggcccgcctgtccagtgagacgggccttgctcccccgcctcctccggacggatgggcagctccggcgctttcgctgaaggggcccgcttccaaaccttgaagcagccagacgtatatgatatcatatagaaaagcaaccatttccgtataaaagggaggccatccacatgaagccattgatcttctggtctatattggcaatgctgttgatgataggctgtccgtggttggcagcaacatttgcaggcagcgcgggaatggccgtctgccttctgctgttctttggggtcaatcccatattttctgctgtatgcggcgtatttgcaggaaaggacatcaagcggctgtggccccttccaattgttgtcgcgggattatttctggcaggggcgtggctattctttgcgatgggtgaaacagcgtttttgttgtattgcgtctgctatctcatgattggcatgatcgcgatgctgatgcgttcttttctgaagggcagaagagcatgatcccaatatacagaatagtggaaccaaggccctcatgtgcggcagcggggccttttatataccgttctgttccgtcttttccgccaagagagtcttgggaacgtccaaatcggcccgggcagtaaagggaccgggccttgccaagcgctctgcccggtgctaaaatggagccattctcaagatttggaggctaccccatgaaaaaacgacttctttcgctcctctgtgtccttgtcctgacggtgagcgtgatccccgccgcctccgctctggagggggaggcggcccgggccgcggacaccctctccaccctgggactgatcgactctacatataatctggacgcccccgccacccgggcacaggcggccgtgctgctggtgcatctggccggggcagaacaggccgccgcggcagacaactggctggccggcttccgggatgttcccgcctccatcgcccaggaggtgaactacgccgcccggcagggctggatcaccggcgtcacggcgacagccttccggccggacgcggccctcaccgccaacgcctggagcgccttcctgctgcggatgctggggtattccgacaaggcgggcgactttaccattgccgacgccgcgggtttcgcccagcggatcggcctcttccccatcgcctataccggcaccctgacccagggggacctgtttgagatggcggcggacgctctgtccttctcctaccgggacggcagcgccacagtgatcgggcgcctggtgagccaggggaccgtctcccgggccgcggccaacgccctgggcctgctgacccccgccctcaccgcccggcaggtggcggaccgctgcgcggccgccgtgttccgtctggacacctatgagacggaggcgtaccgggacgaaggccttgtcaccggcgaggccagcggcttcttcatcacggaggacgggctggccatcaccaactaccactccatcgcggacgcggtctccgccaccgccacgctctccaccggggatgtatatgaggtggagcgggtcatctactacgatccggacatcgatatcgcggtgatccgcgtctcccacgccgccctaaagggacacgacacctctgcttttgccacgctggacatcgcggattccggcaccggagacctgcgggcgggcgacacggtctacgccatcggcaatcccctgggcctggggctggcagtcagctccggcatcgtcagcgccacgcagcgggatgtggagcggtacgccctgccctgcgtcatgagcaccgccgacatctccgagggcagcagcggcggcgccctgctgaacgtctacggtcaggcggtagccgttacctccggcgcctatgtctacggcaatagtatgtatctggcggtgcccatcgaccccatcctcaccgccgatctcactggtgagggcctgaccctgccggaagtcctcgaggcggaaaccgtcggctgaataccgaagcgcctgaaagaggcggcgccccatgggcgccgcctcttttttcgcattcaatgggtcaggatgaactgctccagctcctccggtgtccggaccacggccacagcgccgctctccgccagctcgccgggggcggcgtagccgaagaactccacgcccgcgcaggcgatgccgcacgccttggcgcccagcacgtcgaacttccggtcccccaccatcaggatctccggcttgtgggcctccgtcagctccaggcggcgcatagtctcccggatcacgtccgccttgctccagtcccccacgggcgggctgcccgtcacaacagccaaagacggcgtgaagccgaacttctcgcagatgggcacacacaggctctccggcttggaggaggccagagccagcacatagccccgggccttcagccgggcgcacaggtccgccatgccgggggcggccatgttctcaaacttgccgacaggctcgtaccgctcccggaaggcggcgatggcctccgcggcccgctccgccgaaaagccgcagaattccgcgaaggagtcctgcaggggcgggccgatgaatttgatgagggtgctctccggcggcaccggctcccccagcttgtcaaaggcataccgcaggctgttgaggatgccctccttggagtctgtcagcgtgccgtccaaatcaaagaaaatatagtgatacatacacttctccccttattcttcgccggagagattctatcatgtttcgccctcctccgcaagaggggggcggcgctttttccaatgtagcagcgtccaaaccagcacgccagccccggagacggcgccggcgatcagcaccccctgccgcagccggagccagagtgccacatccgcctccagccgcccccgcaggatggtccagctctccgggaaaccgctttggaccagctcttccccatatcgggcgatccagggcgccaacacccggtccagctggccgtccgccaggaaccacagccccgccagaagtaccgcccacgccagccacaccagccagagccgccgggtccgccgcaggaagccgccgctccggtggagcattggccgcagccgctccggtatccacagcaaagaggcatccgcccccgcccggcggcgcagggcccgctccagcacggcgcacagcagcgccagccccacggcgaagagcagcggcttccaggcttgcatggtgtcgtagtaccgcatctccgcaaagtccacctccagcctgcccagccgcaccagccgcagcagggcccaccactggacggcggaggcggccagcagcttgcggtacaggttttcccaaattttagcatccaacgatatatcaccgtaccgggccggatggacagccagcacatagccgatccataagaggcccaccgacagcggccaggccgccagactgacataggccacccggaatgccgccagcacacccagcgccaggctgccgatgaaacagaggtcgaaccgggtccgcagccgcagcagcaggaggcgccgccgtgccggtccctgggcctccgctggccggccccgcaaggtctctcccgccaggatatcatcggcggtgacgccgtacagctccgccaaggcaggcagcacggtgatatccggcagccccgcgccgttttcccacttgctcacggtcttgttggagacacccagctgatccgccgcctcctgctgggtcatgccccgggctttccgcagcgccgccagataggcgcctgtctttccggcatccatgggcctccctcctctctggcctcagcataccgcaaatcaggctgtttgaccatcccccgcccttgaattttgtctgcggagcgtagaatcgggccggggacggcaaaaaacggcagagcgggcggcctgctctgccgttacgctttcccgtccggaatatgccgcataatgtcccccacctcacacttcaggatcttgcagaacatctcaatggtgtgggggctgacgctctcattccgcttcaggcgggtgatctgggctggattgatgtgccagcgcctaatcagggcgtattgagagatgcctttttccttcattttgtcccgcaggctgtcataggagatcatcacacgcaagcctctctttctgcctgcatgttaaccgaaattgatgtatgaccagatcaaccaacatcagttcatgtatatgggagcagaaaagcaagcgcccctcagggccttgaaagatgttacagattctgattagtttcgtgcggcgcgaacggtcttacctctctttttataaaaatccccccggccggcggccggggggatttgccgtatggacttttcgaatcagccgaagtaccgcttcagcaggccctcgaaagccttgccgtgacgggcctcgtcgcgggccatctcatgcacggtgtcgtggatggcgtccaggttgtactgcttggccagcttggccagctcgaacttgcccagggtggcgccgttctcggcctcgacccgcatctccaggttcttcttggtggagtcggtcaccacatcgcccagcagctccgcaaacttggcagcgtgctcggcctcttccagagcggcccggcgccaatactcaccaatctcggcatagccctcacgatatgccacgcgggacatggccagatacatgccgacctcagtgcactcgccggtgaagttggcgttcagaccgtcgatgatctccttctggacctcggcgggaacagactcgccgaaggacttgcccacgccgaccacatgctcggcagcccagctcagctcacccttctgctcggtgaacttggaggcgggaacaccgcactgggggcacttctcggggggattctcgccctcataaacataaccgcagacagagcagacccacttcttcatagtaaatgtcctccttttatacttatcttttttgaaagccttttttcctcagtccccttgggacagtttgagtataacaggatattctaatattttgaagttgcttttgcaactaatagaaaacttttcctggattttaagtcggcaatttacgactccgttcaaagatcaggtccacccggctaatccctccatgactcgtgaagctcaccgggaaaaatcccacataccgccagccttctgcggcgtatgcgtcgataagctcccggtgttcccgggtgtctgacaggaagccgccgccggtatccaccggaatgtatttatattgatacatgtgcccgctcctttcatacaaattaacagcttgtggcatttctgcttacagaaacggcggggagtttgctccccgccgttttggtttttgcaaatgtgcgttatctttcctccgccgcctggagcgccttcgcctccgcgatggccttctcctgggccgcaggcgggcagtcgccccgcaagccgctttgcgccctgcggggaccccgcattggatgcaaatcgcccgaagtgaattcggccgatttcaagattttgcctccggcaaaatacttgtacgccggactcccggcggagagacgcggactgcctcttccttacttctcctccgccgcctggagcgccttcgcctccgcgatggccttctcctgggctgccggcgggcagtcctcgtagcggacgaagtggaaggcgaagctgccgcggctctgcgtcatagaccgcagatcgatggcgtagctgcccatctcagccatgggcacctccgcagagatcacctggttgccgtcgccggtgggatccatgcccatgacgcggccccggcgcttgttcagatcgccgatgacgtcgcccatgtagctgtcgggcacagtgaccttcagctcgcccaccggctccagcaggaccgggttggcctccggcagggcggccttgtaggccagctgcgccgcggtcttaaaggcgatttcggaggagtccaccggatggtaggagccgtcgtacagcacggccttcaggttcaccacgggatagcccgccaggggaccgtgggcgcaggcctcccgcaggcccttctccaccgcagggaagaagttcttgggcacgctgccgccgaagacctcctcggcgaagatcatgtcgtcctgctccgtctggggttcaaaccggatccacacgtcgccgaactggccgctgccgccggtctgcttcttgtggcggccctgcttctggacagtcttgcggatcttctcccgatagggcacccgcacgggcttcagatccgcctccacattgaagcggctcttcagcttgctgaccagcacatccacctgcatgtcgccggagccgttgagcaccatctggtgggtctcggcgttgttggtgacggagaaggtgggatcctcctcgttcatacgggccaggccctgggcgatcttgtcctcctggccccgggtcttgggcacgatggccacggaatagcagggctctgcgaagggcagttccttcagggcgacgaccttccgggcgtcgcacagggtatcgccggtcttgaccttctccatcttgccgatggcgccgatgtcgccgcagcccagctccttcacctcggtggccttcttgccccgcatggtgtacaggcggcccagtttttcagagacgccggtgcgggcgttgaccatgggcagatccggcgtcagggtgccggagagcaccttgacgaagctgtacttgccgtactggtcagagacggtcttgaacacgaaggccgtaggcacgccgccgggggagaccacaaagggctccgtctcgccgtcctggcgggtggccttgtgatagttgccctccatggggttgggcagcaggtccacgatgtcgtccagcagcatcaggctgcccatgcagttgacagcggagccgcacagcacggggaacaggctcaactcccgcacgccctggcgcaggccctgaatcatctcggcgtaggtgaagtcctcgccgccgaagaacttgtccatgaactcctcgctggtttcggccacggactccttcagggcgttgttgaactcctcgatgacggcgtccttgccctcggggatctcgatctccacccgcttttggtcctgcatctcataggcgcgcttgttcagcacgtcgatgatgccggtgaccttcttgccctcgtcccagatgggcaccaccagaggcgcgatcttgttgccgaaccgggcccgcagagcctcgaaggtggcgttgtagtcgctgttgtcctcgtcggtcttggagatatagataaagcggggcatattccgctcctcgcagtatttccacgccttctccaggcccacggacacgccgtccttggcggagcagacgatgatggcggcgtcggcggcccgtagagcctcgatcacctcgccggcgaagtcgaacgcgcccggcgtgtccagcacgttgatccggcaccccttgtactccagcggcgccacagcggtggagatggagatctgccgcttggtctcctccggatcatagtcgcagaccgtattcccgtccgcgccccggcccatccggtcgatggccccggtcatatacagcaggctctctgccagggcggtcttgccgtttccgctgtggcccagcagacagacgttgcggatgttttgtacagaatagctcatgtttgttccactccttatgttgtgctgttgccgcggccagtcccaccggccgccggggatgcctaatgtagaaattatacaacctttgccggtgcaatacaacaaaaattttggcacattccccgttttgggcaggagagcgaaaaaacagccggaaatttcgtcaagtcggcgaaaaacagtttccccccgccgggcggcgccatgcaggcacgcacggccgtctccagcgcggctgcaaagacggcagccgggccgtccggccaccggagcagctgtggcggcccctcatttctctccgccggctgcatctctcccgcctgttcaaatttcccctccatccaaagctgaaggggtgtagaagttcatgatgatccgtgatatgagtcccttctctcctcgtcaaacgcaccagggtgggcttttgtccccgcagtccgtttcatcagagcgcccattttttccaaaaggggttggaaatgccacagtttgaaaaattttctgctttcggggaaaaaacgcgccggacagaatcctgtccggcgcgtgctggaaggagcgggtctctcaggtgttgtcccgattgatgggttcccgcaccagcagccggcgaagcgccttgccgttgaaggggatcaggggatagagatacccgtggcccaccaggggttttgtggtggccagcaggactaggatgcccacgaaccccaggcagaatccccagacgtcgaaggccgctgtcagcagcagcagcgccacccgcagcagcttgaaggcgtaccccagctcatagctgggctgggcgaagcccgccacggagacgaatgccatatacaccagtacttccggccccagccatccggcctgcacggcaaaatcacccaggatcaaggcccccagcatggagaaggagttggacagcgtatccggcgtgttcagggacgccagcttcagcacgtcgatcaggaattccaccaccagcagctgggacagcagagacagcgccgccggctccggggaggagaggaaatccagccaggacggcaggcgccccggcgagctgaccatcaggtaccaggcaggggtaatcagcagggagatcaggaacaccgtcacccgcaggacccgcagatacgtgcccaccagcgggggaaaatagaagtcattggcctcctgggtaaagtcaaaaaaggtggtgggcaggatcatcaccgccgcagagttgtccaccatcaggatgatgctgccctccatgacgcaggcggcggcggtgtccggccgctcagtgtaccgcacctttgggaaggggttgtaccactgcttggggcggatggcctccgccacgctctcctgcgccatggtgagggagttggcctggatgttctggagcttgtggcgcagctcgtccagcagggcgtggtccacccggtcatccaggtagcacagcgccacgtcgctgtgggtccgctggccgaccttcagcccctccatggtcaggtggggatcccggatgcggcggcgcagcatggccatgttgggcaccaccgcctcaatgaatccgtcatgagagccccggaggaccttgccgtccggcggctctcccacgctgcggctgggatactccttggcgtcgatcagcgccgcgccggacagcccctccatcaccagcaggcttttgcccatcagcacggaggtgacgatgtcatcccggtcatagctgacgttcacctccataaaggtcacatagcggtccgcgaactgctgcatctccgtcaggccctgcaccgcctccggctggagcgacagccagaaggcccccatccgctccaggatggcgtccccgccgaagccgtcgatgacccagaaccgggcccgccggccgcccacatacaggtcccgacataccatgtcgcagctgcggcctgcccctagcacgtcgttgaaccattgcacattttcctcataattggatgaaatccgattcatgctccacctccgtgatccccgctagtatgtgccgcggcggcgcggtgtatgcccgacagcgaacacaaaacggaatatcatccgtcaaaaatccacatcattttcaaaaatccggcaggaaaacagcgcatccaacgccggatgcgctgtttgttccgttctgtcttacggcttgttctccgactccttggaggcggcctgccgctccctgcgcctcctcttccagagaaggcggcccgccacggtgccaaccgccgccagaagcagcagccacacccagccgtaggccagggccacggccagactctccagtgcgcccacaaacccccgccagccagaagcaaaggccgcgcccatgcggcttgcaaaactggtagccggctcctccacattggagagctggtacacctcctggagggagagatggacagtggcgtagtccaccagggcgtcatactgccgcagggtgccggtgagccgctcgatctccagctccgtgtcggagatggcggattcgatggtgataatgtcctccatattctccgcctgggccagcaggttctgcagccgctccagcttggtcctctgagtggccaggcggctctccgcgtcgtagtacgcctcgctgacgttctcgctggtctgctcctgataggtgacgtggcacagtgtccccacccggtccaggaaaggctggaactgatccgcggggatgcgcactttgtagtcgccggagcgatagccgctgccgtagtcatggaccgccgcctgctcaaaatagccccccaggacctccaccagcgtccgcaggtccgcgtcggcggtgtcgaaggcggtggtctccacctccatccgggcggtgtagatcatcttggcgttctccagacggtcggaggcaccgtcctccgccgtaccgccggagtcctcagccacttccgcctctgcccaggcaccgtaggagccgcccgcgtcgtccgcctcctccgtggcggcgctgttggaggcggtgtccggcgcagtcgtatcaccaccaccgccgcagccggacagcagacccagcagcgtcagcagcgtcagcagccacgcaaagcctcttttcattccaataccctccttttcacgccccgcttccaaaccggggcctctgcctattcagacggaaaggcgggccgtatgctgcaggaaaacaaaaaatttttccagcctctttttgcgcccgggaacttctctgccaaaggttgcctttttctcccaaagggagtacaatcaaggcagccttccgcggcgtgccgcggttttcggaaaacaattcggaggggaaaatctatgacatatcaggaagttctggaacaagcgcggggcgccatgggtccctactgcaaggcctgtcccgtgtgcaacggcctggcctgcaggaacaccgtccccggccccggcgccaagggcatcgggaccggcttcatccgtaactatcagaagtggcaggagctgtgcgtcaacatggacaccatctgcgagaacaagccggtggacacctccttcaccctgttcggccgcacggtggacctgccggtcttcgctgccccggtgggcgccatgacgctccactacggggacaagtacaacgatctggcctataacgacatcctggtggccgcctgtgctgaagcgggcatcgccgccttcaccggcgacggcacggaccccgcggtcatggagggcgctgcggcggccatcgccaagaacggcggctgcggcgtgcccactgtcaagccctggaacctggagaccatccggcagaagatggacctggtgaaggccgcagatccctttgccatcgccatggacatcgacgcggcgggcctgcccttcctgaagaacatgacgccccccgccggcagcaagactgtggaggagctgcgcgagatcgttgccatggcggagaagcccttcatcgtcaagggcatcatgaccgtggccggggccaagaaagctctggaggccggggccaagggcatcgtggtgtccaaccacggcggccgggtgctggatcagtgcccctctaccgcagaggtgctgcccgccatcgtggacgctgtgggcggccggatgaccattctggtggacggcggcatccgcaccggcatggacgtgttcaaggccctggccctgggcgcggacgcggtgctgatcggccggcccttcgtcaccatggtgtacggtgccggtgccgagggcgtcaagacctatgtggaaaagctgaaggccgagctggccgacaccatggctatgtgcggcgcccactccctggcggacatcagccgctccatgctgtacgggttctgagctctgctcccgcttcaaatcacagcgccgccccgcggatgcggggcggcgcttcgctgttctcttattccaggtccgccaggcaggcacgctgccagcggtccaccaccgccagctgctccggcgtgtggaaccagtgctctccggcctcctccacagtcaggcggcagccattccgggcggcaaaggcctccacggtctcccggtccgtcagatggtcccgggcgccgtacaggatggccgtgggcgtccgccaccggcgggcagggtgggtccggacgtatcgcagatattcccaggagagggtctggccgaacgttgtggggatgcgcccctcctgggccagccgctcctcactgacaccggcccagcccatcattttgcggatcagggcctccatgtccaccaccggagagaggaacagcgcccccgccaggggcgcgtccggatatgccagcaggccgaaccaggcccccaggctggagccgaagagccccacccggtcccatctgccccgcagctccgccagggcgcaccgcagctccggcaccacctgccaggggaccagagccgcggcctctgactcccggtccccgtggccgggcagatccacgctgacggtctgccacccggcgtccgccgccgcggcggcaaagaacgcagcctccgccttgcttccgccctggccgtggaggtagaggatcccctgccggctgggccgcccccagcggagggccggcatcccgcccagggaaaatggttccgcccgcatcttaaaacacgcactgggcggagaagcagacgccctccgggcccaggccctccatcagatactcgccgcccttgcggcagcccaccatccgcagctcctggcccagggtggcttccttgctgtaattgatgaagaactcccggggcaccttttcctgcaggtcggcgggcaggtagtcccagacgaagtcaccgtagttgccgctgtacacatggccgttaccgtccaggtcggaccagaccaccttccgggcgcccagatcctcaaccccctcccggggcagcaggatcttccggggctccggagcgtcgatggccttggggcaggtgcccagcttcttggctgtgaaggtgccgggccgcatgatgcgccgggtctgcgggtccaccagaatccagtcgctgcggatggacaccagaagcccctccctgtccgtgatctcatacacccgctgcatgtgggcggccttgacgccgtcctcccaggtggtgacgtccaccacctgcagcgccctggggcagcgatggatccgcagggcgatgcgggagagcaggaacacctcccgcatctcatagagcttctcataggtcaggccccgggcgtcgtagtccgccccggccacggcggcggcgatgctcaacagcgtgctcacccgggcccgctggtaccggtcgcagtccgcgaagatcagctgcttctggcgcagatagctgttctcctgaaggacttccctcaaatcgctcatacttgctcttctccttccggcgggccgtccgcccttcctgtaagacattccaaaaaagtataccacgattttccctttttcacaagcgccggtagttgacttttctgcggcggatgttatgatgaaggtatccaaatcgatcaaaggagggttttcccatgaaaaccgtgatttccacccccaacgctccgggcgccatcggcccttactcccagggctacgccttcggcgacctggtcatcacctccggccagattcccgtggaccccgctaccggcgctatccccgagggcatcgccgcacaggcggagcagagctgcaagaacgtgggcgccattctggaggccgccggcgtcactctagagagcgtggtgaagaccacctgtttcctggcggacatgggcgacttcgccgccttcaacgaggtgtacgccaagtatttcacctccaagcccgcccgcagctgcgtggccgtgcgagagctgcccaagggcgtgctctgcgagatcgaggccatcgccgtcaagtaaatctgatttccagcaaagagagccggtccccagaggggccggctcttctgtttgatgccagggcgcgggaagcgggccgccgggcctgccgcccgcagcgcgcacggtctcacgccttccgcaggaagatcacgcccagggtgccggggccgcagtgacagaagatggtgcaccccgccttggcctcgatgatctcctggaaccgcccgtcctgacgcaggacctcccgggcgatggaggccaggtggtcgtccgggcaggtgtccaccagaaaggcccggcgggtgtccaggtccgtgcggtcccgcagccggtcccggacgtactcctccaccaccttctcgatggagccccggtacttcttcgtcaccggcagcttgccgtccactacgtccaggcaggggtggagcttcagcaggctggcacccagggccgtggcggtggagcagcgaccgccctttttcatgtaatccagccggtccagcacaaagctggtctccacccggggaatcatctcctccagcatcgccaggatctccgtcacagacttcccggcctccgcggcctctgcggcggccagcaccagcatcccatggcccaccgtcaggttggcggagtccaccacatacacgccgtccacctcctccgccgccaggcgggcgttctggtggcagctggaaaagcccatgccgatgttcaggtggatgaccgcgtcatactcctccatcagacggcggaacagctcctcatagtccgccacattgacggcgttggtggtggtgatctcgccgccggcgtccacatgggcggcgatgtccccggtgcggatgtccaccccgtcctggtacagcttccccgccttgatgatccccagcggggtcacggtgatattgtatcgctccagcagctcccgcggcaggtcgcaggtggagtcggtggtgatcttaatcatacagacagctccttttggtcgcatccccggacggccgtccggggttgaggttgttggatggtcggcccccccacgggagcggtgcgctgacgctgcggctgctgcgccaccccccgcggggatctggtgctccgggcggctgtcccgcaggaggccgggcgtggtcccagccatggcaggcgccctcccgccgctttgcggccattgtaccatagtctctcccaaaaagctagtcctatggcgcaccgcggcgccgcccggaggcggcgccgcgctctgttcttccttacagcgtgatgaccggcgatcccgccgcgtcggcggcatcgtgggtcaccagcagtaccggccgatcccccgccgtctcccggatgcaggccagggccaggtcccggttctcccggtccaggccggtgaagggctcgtccagcgccagcgcgtcaaagggcgccagcagcgcccgtgccagggccagccgccgcttcatgccgccggagaactcccgcaccggctgcgcgcccgtgtccggcaggcccagccggtccagcagggcccgggccgcggcggggtcataaacccggcccagcacaaaccggagattgccctcagcggagaggtgctccagcagccggtcctcctggaacacggcggtgagccgctttcccgcaagcccctccaccgtgccgctgtccggccgctccagccccagcaggatgcgcagcagggtggtcttgccggtcccggagggcgccatgacggccgtaatgccgggtcccgcagtaaaggtcaagtcccgcagcaccgtccggcccccgaaggatttgcacaggtgcttcaccgcaatctccatcagctgcccgcctttctcactgcggcgtccaccaggcggaggaacagccgctcgaatatcaccgataccgtcacgatcaccgccgtccaggcgaagaggtctccggtctggaagtacaccttggcggtgtacagcgcctcgccgatagacccggcaggcaggccgatgacctccgccgccgcgccggacttccagcacaggcccagccccaatgacacggcggagcggaaatagggcagcaccgccggcaggtagatgccccgcagctgccgggagaccggcacccggaacacccgggccatctccagcagctgccggtccgtgtgcccgatgccctccagcacgttcagatacaccggcgggaacaccatcagggcggagatcagcaaagacaggttctccgacgagaagaagatcagcgccaggatgatgaaggacaccaccggcaccgctttcaccaccgccaccagggggctcaacaggtcccggacccactggaaacgggccgccagcggtgccagcaccgccgccagcgcgcaggccaggagaaagccccccaggatgcggagggaggagaaggccaccgcctgccagaaggccgccgtgcccgccagggccagcagccgccccagcgcctgcaccggagaggccagcagcagcatccgcccgccggtggtagccgccagggccagactggccccctcccacaccagcagccagaaggccgccgcccacagccggacagagcctgttcgccgcttcatctgcctccccctttctcctggaaaccaccgcgccccgggtgttcccggggcgcggaaaatttgtcagccgttacgcgccgtaatagaagtcgtcgttgggcataccgccgcccacggattctgcgtcctgctcccacagcacgctcagatagccggacagcatatccatcatctccgtgccggtgacgcacacgatattgcagtaaggcagggccttctccgccacagtagcgtccacgatgtcatagccgccgatgagctccgccgcctcggcggtgttggcgttcacccagtccacgctggcgctgtactgctccaggaagttgctgaccgccgccgggtgctctttcacgaagtctgcccgggccaccaccacgccggtgagcagggcggagccgttgtccagggcgtcccactcctctgtcaggtccagggccacccgcaggtccggcagctgggtctgggccacggtgacgaaaggctggggcagcatggcgatggtagccgcgccggatgccagggatgccacgcattcgctgtgctcgctcttccagtcgatggtgacgccggtgtccgggtcgatgccgttctccgtcagcagataccgcagggcgtactccggcgtggagcccttgccggaggccacgatggtccggcccgccagatccgccatggactggacggaattgccattctccacaatatacagcacgcccagggtattcaccgccagggtgacgatgccgccgtccgtccggttatacagcacggaggccaggttggccggcacgcaggcgatgtccagctccccctgcatcagcttgggggacacctcgtcggcggaggcggccagggtgaactcataggtgtttccgccgccagcggtcaccacattctccttatcctccaacgcttcctccacaggagcataatcgctcatcagcttcaccatgcccatggcggtgggtcccttcagggccgccacccggacgttgacggactcctccgcgggcgtctcgccctccttcccgccacaggcggccagggtcaggcacataaccagggccaggcaggccgccagactcttcttcatccactgtttcatcttctgtttcctcactttccttgttgcagcgcatcctccggcgcgtaaacggtcttggccgtgatccccgccagccggccgatcttgccggacagggcggagatggcgtccgccggtgcgtccaccgccacgctgatgatgttcacgccccgggcgtggtagggcacccccatccgcccgatgatatagggggcgtactggtgcagcagctcgttcagcgccgggacagaggccgtgtcccggacgatgatcgccagcacggccacacgggtctccacagaggattcctcctttttccaaaaagtaaacccctccgccgcgctggcagagggggattttgacatgcgccgtccgcccggcaccgccgggcgcttccccgtcttgcggccggggctggcccgtgccggtcagagcgacagaaaccaaattgtccggtccgccggtcagagcttcttcccagggacagggaaatgataccatggaacgcccccgccgtcaagggcggcgctcagaagtcgtgccgcctgccgcagccgacccccagctcctccaacacagagatgattttttcgatttccgcaaaacattccgggtccgtgagaccgctgtcgtccagaacattccggatttcccgcagggcctggaagcagcgctcctccgccagttcccgaatcattttccacgcagcatcgctgcccagcaccaattcgatttgattccgtgcaatcagctcccccacgactgacgcggtaaaccggagctgttccacccggtcccggttttccaacagttccctgtcgctgatagaattcattttgattccctcctcgcattataacaggacgaaataattataaatcaccaggcatgatatagtcaagaaaatatatcgtgttggtgtaaaacatgaacaagtcctattacaacgccgagtccaatctcattgccaaacgcctccgacagcttcggaaggagcgcgggttctcccaggaggaattggccgcccagctgcagctgctgggcgtggacattaaccagcctcttatcagcaaaattgagagaaaccgccggtttgtcaaggattatgagctggcctgcctgtgtcaggtccttcaggtgtccgagcgggatctgctggcagacttttacaatgccacagaatgataaaagaacccccatctgggggttcttttgctttaccgtccgtagacctccgtcagccgccggatgtccgccgccagcccggccgcggccgcgccgggggccatccgccagcgccagttgccctccgccacgccggggacgttgatccgcccctcgctgcccagggccaggtagtcctgcatctgggccacgaacagctccgccgtgctgcccatgccgcaccgcagcagcgcccgccggacattctcccggccggaggcgcccagataccgctccgcaaaggcccgctccgcttcccccgcgtggtcgtaccagcccagggcggtgtcgttgtcgtgggtgccggtgtagcagacgcaccggcggctgccgtagttgtggggtagatagtcgttgccggggtctgaaaaggcgaattccagcaccttcatgcccggcaggcccgccgcctcccggagctggtggacctccggcgtgagaagccccaggtcctcggcaatgtaggtgatgtgggggaaccagccggtcaggacccgcagcaggtccatgccggggccgggttcccagcggccctctctggcggtctccgccccggcggggacggaccagtaccgctcaaaggcccggaagtggtcgatgcggatggcgtcgaacaggcgggaggcgccctccacccttctgatccaccagccgaagccgtcccgcttctgggccgcccagtcgtacaggggattgccccacagctggccctcctccgagaagtagtccggcggcacgcccgccacccggctgggccgccccgtctcgtccagcaggaactccctccgctcgctccacacgtcggcgctgtccagggacacgtagatgggcagatccccgatgatccgcacccccaggccgttggcgtggtccttcagggccttccactgggagaagaaccagaactgcaccgcctggtgaaaagcgatatcctccgccagctcctgccgggcggccgccagcgccgccgggtcgcggttcaggaggtccttgtccggccagtcgaaccaggccgtctggccgaagcgggccttgagcgcccggtacagggcgtactcccccagccagggattggctgcggcaaagtcccgcacggactgggcctccgctccgcccagccgggagaaggcccgccgcagcagtgcctcccggctctcatagagggcggcgtagtcgatgggcgctccctccggcacccgggcggcggacaactccgcctccgtcagcaggccccggtcccgcaggtcctccaggtcgatgagcagcgggttcccggcgaaggtggactcgctggtgtagggggagttccccgctccggtgggccccaccggcagcacctgccaccacctctgcccggcgttgtggagaaattcggcaaaggcccgggcctcccggcccagggagccgatgccgtaaggccccggcagggagaacaccggcagcaggatgccagcggaacgctccatatcagcccctcctttttgtcagattccgttctattgtatgcagccgggcggcgggtgtcaagggcggctgtccccccgctccactgggaagggaatctcccggaaggccgtccgccccgggttgccctccgccagcaggcagcgccgccgggtcaggtcgcaggccgcggaccagacggtgtcccgccccgcagcccggtcatactggcagagaaagccctttcgccccgccagcagggcctggacgccggaaagagccagcgtctccccctcccgctccagcacccggcgcatcgtgtcgtaccgctccgccgcccgccaggagtccagccccggcggcagcgggaccgccagatccgagtgaaagagattcgcggcgcagacgaagggtcccgccgggccgggacgctccacccgcatcccctccgggctgcactccgccacagcaatgtccccggcggcatccgccagcgtcagcgtctggcaggaggccaggggcagcgcccgcaggcggtccagggcctccggcacggcggcgcaggtctccgccagcagccgcagaaccatgccggcgttcagacccggccggggcctgggcgtgtagacagaggtgagcccgatggccagcccccgggcgttgacggcgtcctccatctgcacgaacgaggtggtgttccctgtaaaggggatcgccctgtcggaaaatccgtatgtcacatgggtgtagtccggctccagcgccgtcagaaaatcactgttccggccgaagaacaccccgttcccgttggacaccgccaggcaggaacagccgcaggcgggcggcagggcgtaggtggtgaagaggaccgtctccaagtcctcctgccggcagttctgccccgccgccagcccctccagctcctccagggcggcggggaaatggcgcgcatacgccgggcggcaggcagccgcaaaggcccgccgctccgcctccaggggaaagggcacatggtccagcaggcgcaggccgcgctccgccagccgggcgccccactgaaagcccatctcccggtgggtgccccgcaaggtcaaatgattcatgtgtattcgctccttccagttctgtcaggagccgccggcagctctgcccttaccatagaacaataaaaaattgttgtcaagcagagattttttatttgttttttcaggagattcaggggaaattattttctttttcccatccgcaacccgtggttgacatctgggaaacccgccggtggttgcgctttttcccgctctctggtatggtgagggcaaaggagttgataccatgcgggagcagcagaccctgggccgccgcatccaggaggcccgaaaggccgccggcctctctcaggaatccctgggggagcggctgggcgtcagccgccaggcggtgagcaagtgggaggcggacgcggccgtgccggaactggagaacctgatcgccatgagccggatctttggcgtcaccatcggcgccctgctgggagtagagccggaagcggcggaggaccgttccgaaaaagatgccccggaagcccccggtgaaggcgtggagggcaccgccccggcgggggagctgaccgaccgggagctggcggcagtggaggccatcgtacaaaaatatctggaggcggtccggcgcccccggtggagccggcggcggaagttcctcgcgggcgcggcagtctgcgcggtcctggtgctggcggccgcaggtctgtgtcggcactattctaacctgcggggccaaatcgatgagatccagtaccaggtcggcgacatcatcaatatcctcggcgagcagcatgtctccctctccggccttatgcgggaacagcgcagcatcatcagcgactattccgtccaaattcaggactatgatctggagaaagcggtgtggtatctcaccgccagtgtgacgcccaaggagtatacggcggacaccgtggccaccttcaccgcccagaccaacaccggcaaaacggaatcggcccaggcccggaacgacggcggcgtctttacggtggagaactgggccgtgcccatgggtgagcctgtgccgcctggtgtcatggatgcggacgatgatgagagcggctccctggtccaggtatccgtgaccctcaccgacggggacaccagccagatagaatccctggaaacgctgtacgaggacccgtccgcctatcagctgtggataaacggcaactggggggaagagtgggagaacagttgtctcctgttccaggagctggacctgcagatcagcaacgaaaccgacattccgttggagctgacagatgcagagcttgcgctcttttccaacgacgatgccgtcccggtgtggtccgcgcccctcaccaccgccgtggacctgtggaaccagcagggctatgtgcagatgcacgtgcccatggggccggaggacccagtgccgctgcaccccggagacaccctggtagtggccgtccgcatcgccgacaaccacggccggaacgactggcgtccgttttattactggcagaacgacaacggcacactgttaggctatgtttccgcacctgacgactggcagcccggcgacctgatccccattgaaaattcgtaaaaaccgccccggagttttgatactccggggcgattttccgttctcttacttcatcagctcatacatgacggccttgatggtgtgcatccggttctccgcctcgtcaaagacgatggaggccggggactcgaacacctcgtcggtgacctccatggcctcccgtccgaacttctcgcccatctctttccccaccttggtcttgtggtcatggtaggcgggcaggcagtgcatgaacctgcactggggcccggcgttgtccatcagggcctttgtcacctgatagggcgccagggcggcaatgcgctcctgccagacctccatcggctcccccatggagacccaaacgtccgtgtacagcacgtcggcgttcttgacagcttccatggggtcttcaatgaactccagcaccgcgccggtctcggcggcgagacataagcaggtatcgatcagcttctggtccggcatgtacgcctttggggcgcaggccacaaagtgcatccccatcttggcgcagcccaccatcagactattgcccatattgaaccgggcgtcccccagatacaccagcttgatgcccttgagtctcccgaagtgctcctggatggtcaggaagtctgccaggatctgggtggggtggaactcattggtgaggccgttgaacaccggcaccccagcgtagtttgccagctcctccacaatttcctgtccgaagccccggtactcgatgccgtcgtacatccggcccagcacccgggcggtgtcggcgatggactccttcacaccgatttggctgccagtgggacccaggtaggtggaacccatgcctaagtcctggcaggccacctcaaaggcacaccgggtccgggtggaggttttttcgaagatcagagccacgttcttcccctccagataccggtggggaatgccggccttctttttggccttcagatctgctgcggtgtgcaggaactgctggatctccgccggggtaaagtccaggagctttaaaaaatgggtgtggttttccatgggtgtctcctctctgtcccgccatgggcgcttttatcatttagtccgggaaaattgtgtaaaattctccggttatagttagggttatagttagtgttatagttagtgttagtgttagagttatagcgggtgttcgtgtaagtgccggagtcacggcggggcgcagcaggtccccggccggagcgaaaaagacagattcaggagagcgtctttttcaggatctccagcccctggtccatctcctcttgggagatcacaagaggcggcagcagccgcatacccggtccggcggtcagcaccagcaggccgttttcgatcagcttgcttgcgatctccttattggtccagccgtccttcacctggatgccgatcatcagccccatgccccgggtggcgccgaagcagggcaggtccagcgcctcgatctggttacgcagatacgtgcccttggcccggacgtcctccagaaacgcgtccgtcagcgtctcctgcaccaccagaccggcggcagcgcacaccggattggcgccgaaggtggtggcatgagtgccggggcccagcacgtcccggcatttctcattggccagaatgccgctcatgggcagtcccccggcaatgcccttggcgaaggacgccacgtccggcaaaatgccgtactgctggaaggcgaagaggctgcccgtccgccctacgccggtctggacctcgtccaccagcagcagccagtccttctccgcgcacagtctggcaacggccttcacatagtcacggtccaggggcagcacgccgccctcgccctggaccagctccatcatgacggcacacacgtcgtcccccgccgcggcctccagggaggcaaggtcgttggcgtcggcataccggaacccctcggtgaaggggaagaaatagttgtggaacacgtcctggccggtggccgtcagggtggtgatggtgcggccgtggaaggagttgttcagagtgacgatggcggcacggcccctgccgtacttgtcgaagctgtactttctcgccagcttaatcatgccctcgttggcctcgccgccgccgttggcgaagaatacgctgctcatgccggtccgcttgcagaggatctccgccagccgggccggtggctcggtgtagaacaggttggaggtgtggccgatcttccccgcctgcttggcgatggcgtccacccagggctgacagccatagcccagatcgctgacgccgatgccgctggtgaagtcgatgtaggcgttgccctcggggtcgtagagcgtggcgccctgtccatggtcgatggccaccgggaagcggccgtaagtgttcatgatgtactgcccggtcagggccttgatctcttggctggtcatgggatcagtcctcctttttcaacatggtgccgatgccctcatcactgaggagctcaatgagaatggaatggggaatgcgtccgtccaggatgtggacccgctccacgccgccggcgatggcgtccacacagcactccatcttggggatcatgcccccggagatgatgccctgggccaccaggcccggcacgtcgtaggtgtggaccacgtggatcagcgtctcctcgtccctgggattgcgcagcaggccccgcacgtccgtcagcaggatcagcttctccgcccccatggcggctgccagcttggaggcggcggtatccgcgttgatgttgtaggcggtatccgcgtccacgccctgggccacggtggacaccacggggatatagccgctgagcagggcgttttccaccggctccggattcacacccgtgatctttcccaccaggccgtacttctcgtccagctgctccgcctggaacagctgcccatccatgccgcacaggccgatggcctggccccccagccggttcagctgggccaccagattcttgttgaccttgccgcagaggacggactggaccacgtccatggtctcggcgtcggtatagcgcaggccgtccacaaaccggctttcgtggccgagcttcttcagcatctcgctgatctccggcccgccgccgtggaccaccaccacccgaatgccaaccagggacagcaggatgatgtcgcacatgacagcccggcggagttcgtcggacaccatggcgttgccgccgtacttgaccacgatggtcttgccggtgaatttctggatatagggcagggcttccacaagcgtccgcgcctgctgtgcgtgggaggacatcgtaacatcaactcttttcttgaaaatcggcgggattccgccggagggggaggaggtgtcccatgggacgcgggaatggcagctatgatgactggacagatgcacccgctacggggtgcggataggccgccggacagcggcccatctccgctccccgcaagggcactatcgggcatcccggtttacgtccggtaatccccgttgatcttcacatactcataggtgaggtcgcacccccagcaggtgcaactgctatctccctcgcccatggtgatggcaatggtgacatcgtgctccgtcaggaccctcttggccagatcttcatcaaaatccagcccccggcccttggcgcacacctggacgctgcccgcctgactctggaaggccacatccaccttgtccggattgaagtcctccccggaatagcccatggcgcacagcacccggccccagttggcgtccgcaccgaagatggccgccttggtgagggcggagccgatcacggatttggcgacggtctcagcactctgctcgctcccggctccggtgacggtgcaggtgatgaggtgggtagcgccctccccgtcggaggccatctttttcgccagctccacacacagggcgcgcagggcctccacaaaggcgtcgtaatccggccccttctccgtgatgacagggttccccgccaagccgttggccaggacgcagcacgtgtcgttggtggaggtgtctccgtccacgctgatgcggttgaagctgacctgaacggtctccagcagggcggacttgatcatctccgaggagatggcgcagtcggtggtcaggaagcacagcatggtgcccatgttggggtggatcatgccggaacccttggcgatgccgcccatccggacggtcttgccgccgataacggtctccactgccagctccttcttgacggtgtccgtggtcatgatggcgtgggcggccgcgtcgctgcccgccgccgtgtgggccgccgccgcgcacagctccggcatcccctgctcgatgaccgccacgttcagcgtctgaccgatgacgccggtggcggctaccaccacatcctccggccggcagcccagggccttgcctgccgccgcgcagacccgctccgcgttttcctctcccatgggggcgcaggcgttggcgttgccgctgttgataacggcagcccgggcctttccgtccgccagatggcgcttgtccacatggatgtgggcggccttcacggcgtttttcgtatacacggcggcgcaggcgcagtcctcgtcggacacgatcagcgccacgtcctttttccaggccgcgtgggtcttgacccccacgtggatgcccccggcccggaagccctgggcggcgcacacgccgccggtgatgaagttcagcatcgtatcatcctctcttcaacagataagggacatctctcccccgccaaaatcagggcgcgcctatcccttatctcttttcttcacttttgcctcacagcagtccagcggtctcctcaaatcccagcataatgttcatgttctgcaccgccgcgccggaggcccctttccccaggttgtcgaacagggcggtgatggtgaatcgctcgtcatttcccgccgccaccagggtcaggccgttgtccccggctctggcgttgccgtacagcttggatcctgcgtccgcgctcccctccggggccacatggaccagcttttccccggcgtagtggtccgccagcgcctgccacacctgatggagggtggcctcccctgtcagctgactcctgtgcaggggcactgtggcagccatgcccttgtagtagtcatccacgatgggcgtgaacaccgggggctttttcaggccgcagagcttctgcatctccggcaggtgcttgtgggcctgggtcaggccgtagaggccggggctgtaaaggctctctgccttctccgccgcctcgtactgggcgatcattttcttcccgccgccggaatagccggtgagggagaagcagcacaggtccgcgtccgcggacagcagccccgcctgaaccagcggcgcgacaatggagatgaaccccgtggcgtggcagccggggttggccacatgtcgggcccccgcgatggcctcccgctggccgggccgcagctccgggaagccgtagacccagcccggcgccgtccggtgggcggtggatgcgtcgatcatccgggcgccggagccctccgccagggccacggcctccacagccgccgcgtccggcaggcacaaaaacacgatgtccgcttccgccatcagccgtttccgttcgtccgggtccttccgcttcgcctcgtcgatcagcagcaggtcgatgtcgtcccgcgccgccagccggtcatagatttgcaggccggtggtgccgtcctttccgtcgatgtagacctttggtttcatatcatcaccccagtgaagataagggataagagatattaccggatctgcctatcttttatccttttatctgttctctttgatcttctgaatgaactgttcgatctccccgatctgccttgcggtctccgccaccgccgggccgccgtagctgctccgcagggccatacagttctccaggttcagcgcgtcatacacgtccgcctcgaagagctcggagacagccttcagctcctccagcgtcagctcctccaatgtcttgccccgggccgtgcactgggccaccagatggccggtgacggtgtaggcgtcccggaagggcatcccctttttcgtcaggtagtcggcgcagtcggtggcgttgatgaagccgtggccggcggccttccgcatgttgtccgtccggacggtcatggtgtccagcatggcggcgaacaccggcaggcacatctccaccgtgtccacggcgtcgaacaccggctccttgtcctcctgcatgtccttgttgtatgccagaggcaggcccttcatgacggtcagcaggctcatcaggtcgccgtagacccggcccgtcttgccccggaccagctccgccacgtccgggttcttcttctggggcatgatggaggagccagtggcataggcgtcgtccagctcgatgaacttgaactcccagctgcaccagaggatgacctcctcggcgaagcggctcaggtgcatcatcaaaatggacaggctgctcaaaagctccagcgcgtagtcccggtcgctgacgccgtccagggagttgcccatgggtgcggcgaagcccagggcctttgccgtctcccaccggtcgatgggataggtggtgcccgccagggcgccggatcccaggggacactcgtccagccgggccccgcagtcctccagccgggtcacgtcccggcggaacatggcggcataggccatcagatgctgggcaaaggagatgggctgcgcccgctggagatgggtgtagccgggcatcacggcggtctggtgcttcttcgcctgacggcagaggaccgtctccagctccagcagctgccccacgatgacggggatctgctcccggacatacatccggaagtccagggccacctggtcattgcggctgcgggcagtgtggagccgcttccccgcgtcgccgatccgggcggtgagcagggcctccacgttcatgtggatgtcctcgttgtcggcggtgaatgccgccttccccgcctcgatgtctgccagaatgtcctccagaccgctggtgatggcggcggcgtcctctttggagatgatgccgcagtccgccagcatggcggcgtgggccatggagccggtaatgtcctccctgtacagccgctggtcaaagctgatggaggcgttgagttcattcaccagcaggtcggtgtctttttgaaagcgtccgccccagagtttcataagctgttgttcctttcatggcagacgcagggcgaagaagcctctccgccccgcccctgtggtcttgtaatggtcttgcctctccccgccgggcatattgaaaacattttcggcagggcgtgtacctgccgaaaatactttgccccagccgccctgggcagcgttcaccagtctgaggactggtggtggggcggctcggaggggagcccgctcccctccgaaatctctcagagcttcccctgctcccgcagtgccagcactgtgtcgggcaggccccacaggttgatgaagccggtggcgttggtctggtcatagctgctctcgttgaaggtcaccagttcctcggagtacagagactcgggcgaggtgatagcggccgttatcatgttgcccttatacagcttcagcttcacgctgccagtgacgtgctcctgggtcttgtcagcgaaggcgctgagggcctcccgcaggggggtgaaccacttgccgttgtacaccaggtccgcgaagtccaccgccagcttgctcttcatgtgggcggtatccttgtcgatggtaatcatctccaggcactggtgggccttgtagaggatggtgccgccgggggtctcgtacacgccccggtccttcatgcccaccagccggttctccacgatgtccagcaggccgatgccgttctcgccgcccaacttgttcagcttgcggatcacgtcgctggccttcatcttctccccgtccacggccacgggcacgcccttttcaaagtcgatggtcacgtaggtgggcttgtcgggggcagtgatggggctgacgctcatctccaggaagccgggcttctcatactggggctcgttggccgggtcctccaggtccaggccctcgtggctcaggtgccacaggttcttgtccttggagtagttggtctcccggctgatcttcaggggtacgttgtgggcctcggcgtagtcgatctcctcgtcacggcccttgatgtcccactcccgccagggggcgatgatgggcatatccggggcgaaccgcttgatggccagctcaaaccgcacctggtcgttgcccttgccggtgcagccgtgggcgatggcgtcggcgccctccgccttggcgatctccaccagcttcttggcaatgatgggtcttgcaaaggccgtgcccagcagatactgctcatagctggcgcccatcttcagggaggggatgatgacctcgtccaccatctcgtcggtgaggtctgcgatgtacagcttgctggcgccggtcttgatggccttctcctccagcccctccagctcgtcgttctggcctacgtcaccggatacggcgatgatctcggggttgttgtagtgttccttcagccaggggatgatgatggatgtatccagtccgccggaataggccagcacgatcttcttgatgtttttctgatccataatgaattccctccgtggagttttgattgatgatgtttgaattatacatctttcacgcatatttattcaagcatcattttgcacaacatttccagcttcttccgtgcatttttgcataaaatttcgatagacatcttagaaaaccgtatatttatttcgatattcaaaaaaatatgaatatatacactcgctcacacaatctccgcacccagcgcataggctggactgcggggcggtcgccccgccgggcggacctgcgcgttttgatagaaaggctggtcctatgaaacgctgcttctgttatcttctgaccctggtgctggggtccctggctgtgggcggcctggtgttcgccctgctgcgcacggacgtgctgaccctgacggccgccacgcccacggctctgttctttttcgcggccaccgctgccgccggtcttggcggcctgctggcctatctgctgggcggcctgctggcagaccgcacgccggccctggcggacgcctggctctgctgcggggaggcctccgctgtgggcgccctgggggcgctgctgacggcgctgattaccgccctctccaccgcctccggcgtggggctccacatcggcgcggcgctgtgctgcgccttcctggccctgatggcaggcggcatcctctgctttttgcggcggtatgtcaccacccgcttcacctgtagctgcggccagagctgctgacagaaaagccccggcgtgctttgcacgccggggctgcttttatgagtgccgtccgatcttcacttgatccgcaggctctccgccacatggagcagattctcctgatccacagtgccgtggaggcggaagttcaggccgccgtccgtccaggccagggtggccacatccgctgcctgggggccggagatggtgccagacgagataatcacgccgcccaccgtctcaggctcccacgcatccgtctccgcctcgtgaggcttctccgcctcccagaacctggcggtcacaccgccgaagtgcacggtctctccatctccctccggcatcagcaagggggtggcagagcaggtcagggtgatattgccgccctggccgacccaggtagtctccgccgcgccgccggaggcgttggtttcaaaccagctgtagccgccgggcagccagtcagcctcacaagcgggcgcagtctttgatgtgggctccacggaggatgcggcctccaccagcgtatccgggtccacgtccgacccggtgaaccagaacagcacccccgcttcgtcctcccacaccagcaggcagctgtcgccgtattcgctgctgtaggtgtagagcgccgcgtcatggccgttcacggtgacggtgcggcaggggatctccccgctgccggggctccagccatagctcccgccgtcgggataggcacaggagaaggagatgcgcccgccgctgccgttccggtagctcagattccctctgccgcccattccggcccggacggactccagcccccagccctccggcagctttgtcagcgcgtagccaggggcttcggtgtagtcgatcccagggtcctcgctggcgtatgtgacgccgtcctcatcggtctccctgtgccagtagagccctgaagcgacggctgcggaggccggcgcggtctgctcccccagcagcaccgtgcgggtggcggagtcgtagcccaccttcacccccagcagctcgctgatggtccggatgggcaggtagttggtcttgccgccagcctcatccacatagaggatggagccggggacccgctggccgttgggggcggtgatgtcgctgccggcggcgatctttgtctcgccgttcagagccaccccagcgaagttgaactgcacctgcccggaggccgccagagcggtggcggtcagggccgtcagcgccaacgccgcggccgcgccggccaggaatgataggactcgtcttttcatggaactccttcctttctgtctccgtgtgtttccgggggacaggcccccggccgttctattagttgaacgtgccgtgggcaggacgtatccccgggcttttctatctttgtcaaaaatcacaaagatctcgtctctttctgtggagtctgactgtttcacttcccaccgccggcagtgccggtgatcgactgcgctctcttcgtgggaggtgagagctgcggctccgtctcctccgtacggacagccatgtcccgcaggtcaaagcggtccagggccccctccaggaagaaggtcgtgttggtgtccgggtccgtccagatcagagtgccggtctcctccatgtccggggagccgccggtgatgatggtgacgccgcctacggtgacggaggagccctccgcctgaatctccttcccattcacagtaatggtggggccctcgctctcctccggctcctcctccgccgtccaataccagccggtgacgccccgcaggtcgatctcctccggctccccctccggggtctcgaaggggcagatggggtcagtgacatactgccaggtcagtgttgtcccgtccctgacccacacctgctggacggctccagcgccttcatcccggtacatgggttcatagccctccggcacccagcccatctcccaggccacaccgggtccctcgtaaggcaccacgccttccgccatggacagcagggtctcggtgtcgccaaaatccgtggcccgcagcataaagaggtatcccgcctcgttctgccaggtcagcaggattgtcccctccgactggaagaggtctgcctggtacccctgcacagtgacggtggtgtggttttcccccgcgtccgaggctccgtccacattggtagctacctctcccgcctccggcgtgtagacggcaaaccacagccatgcgccggtccccggctcatagtacctccaatagcccgagctctccttgggactcacgtccgtcagcacaaagccctccgggatctccgacagccgccagccgccgggcggatcctctgccacggtccgcttcgggttgataaaggtcaccagatcctcctgcacctgatggaaccaccccagcaccgccgcccggacggcggggctcaccgccatcaggccccccagggtcaccaggcatgccaatagcacgcaggccgctgtccgggccgcccgcttccacaccggccgggccatccgcttcgcccagccgaagggatccgccagcagccgcgtccggtttctcaaataccggtgggaccagtccggttcctccgccgcgtccagcacgtcccggaaccgctccaggttggcctccatcagggcatggcgcagcatccgctcatccatggacgtacccctccttctccagcgccgccgccagcatggtccgcccccgcaggacgcgggtggccacggtggactccttcagccccagccgccgggcgatctcccggttgctctcctcctccacgcacttcagctccagcacccgccggtagctctccggcagcgcccggatcaggctcaccagatagcggtagtccgtctcccccgtctccggagcgggcggatcccagtcctccggcagagcttcctcccgccgctccttccgcagcatgtccaccgccacgttcttcacagcggtcactagatatccctccgtctcgctccaggccaggccgctcacccggtcccaccgccggatgagctgcagccaagtctgctgcaccgcgtcctccgccgcggtccggtcccccagaacacggaccgccacggcgtatagcttcttctcataggtcccatggagcttcaaaaacctttcccggtcctcctccgtctccagcatagccagcagcatggaaagcaacgcgctcgcctcctcttctctcttgggggcgcatcccccccgtccggtaaacgtcccggaaacgcagagtatcccaccgggagcgaatcttttcgtccccggcgggatactcttctcttataccattttctccggccgtaccgtctcgtcgaattccggccccgtcagataccccagcgccagcaccgcctctttcagggtagtgccgtcgtgaagggccttcttggcgcacgccgccgctgcctcgtagccgatcctcggcgtcaggcaggtcaccagcatcagggagttgtgcaggttggccgtcatccgctccacattaggggtgatgccctccacgcagtggacccggaaggaatcgcacacatcccccagcagccgggcggagagcagaaagttataggcgctcaccggcagaaacacattcagctggaagtttccctggctggcggcaaagccgatggccgcgtcgttccccatcacctgcacggccgccatggtgacggcctcgcactgggttgggttcaccttgccgggcatgatggagctgccgggctcattctccgggatgttcagctctcccatgccgcaccggggaccgctggcctcgaaccggatgtcgttggcgatcttcatgaggttggcggccagggccttcagcgccccgtgggcgaacaccagggcatccttgctggtcagtgcgtggaatttgttggcatccggggtgaagtccaccccggtcatggcccgaagccgcccgcacaccatctcgtcgtaccccttgggggcgttgaggccggtgcccacggcggtgccgccgatggccagtttggtcagctccggcagggcggtgcgcagcatccggcaggtggcctccaccagctcccgccagccggagacctcctgggcgaatttcaggggcgtggcgtcctgcaaatgggtccggccaatgcggatcaggtcgggataggcctcctccagcctccggaaggcccctgccagccgctccgccgctggcagcacctgctccgtgacgctcagggccgccgcgatgtggagagcggaggggaacgtgtcgttgctggactgggaggcattcacgtggtcattggggtgaagccgcatcccccggtccgcagccaggtgggcaatgacctcgttgacgttcatgttggtctgggtgccgctgccggtctgccacaccaccagggggaactcgtcattccacctccccgcccggatctcggcgcacacggcggcgatggccccggcctgctccgccgtcagcttgccgcagtccgcgttagccagggcgcaggcctccttcaaataggcaaaggcggtgatgatctcctgcggctggcgctggccgccgatcttgaagttttccaggctccgctgggtctgggcgccccagtgatgctccgccgggacagcaatctcgcccatggtgtcgtgttcgatgcgggtgttcatggcgtattcctccgtatatccgccgtggcggtgtgtaatggatgattcattataccgcccgccgggacgggccgcaagagcgggctgttcccgccgcagaaaaaagcggccgcccgcaggcagccgctttccaaaagataccgtcagtccgccagatacaggtccagcgcctgggccagcgcggagcgggagacataggtgacaccggcctccttcacgcaggtgccgtagacctcctccgtggtgccgtcgctgttcaccgcggcgatggcgccgccgggcatggcggtcatcagcgtctccgtggtcaggggggcgggcttcaccatgtcatcgccataggagaccacggcgccctgcttcgcgtcccagcggacgctcatacccagggcctccgccaccgcccggatgggcagcagggtgtcgccgtcagcggtggtcttggccttctgagtcgtggactggccgttgacggacacgacgccgtcctccgccacgctgatatagccccgatagccgtaggcgaacaccagcaccttctccggcgtgcccttggaatcggaccacaccaggatgcgggcgccgggacgcagatcggccagggtgacaatgttcttcgtcaggtagggcgtcagctttgcggaggcgggcacggtgatcgtgtcattgctgcccgccacatgcagcaccgcggactcctccgtaacggtggagctggtgatctcatagtactggggcacggcgtagtcggcggggatgttgcccacgatcaggctggccgtggactggggcggcaggctcagcgccatggcggggccaacccaggcatagacggcgtccccgtcctccagcgtctccaggttcagggtgttgccggtgacggcgtccagatagggggcatcccccacgtggaccaccaccgcgtcgcccaggccgtcctccttcccgctgtccagcaggaaggtgtcctcatccatccaggtgacagtgccccaataggccgcggggcccaggcgggcgggcgcttcttcgtcagcggtctccgcggccgcggcggggatcgccagcatggcggcgcagaggatcagggacaggcattgcagaatccgttttttcattctcgttcatcctttccaatgctttcgggggagcatctgctccgtttgcctgtactgacgcagggcagcgggaaaaagttcccgtccaaggcagaatttttaacaaatatttttgaggcgccgcggagggcgctgtacccgagcctgcggggcccggcatcccggagcggctggtttcccccgcggggcagtccacctcctgcccgcgctggtccggcaggaaatcgctggggcagggactccacggaaaccggttgggccgccgaacggcggccacgagggattctgctcccacaggggccgcttccacgggggatgcgcccctcattgtcgtcatcgcaaagtccgctcagctccgtttccgcctgcggcgaaaactgcgcccgctcccctgcgcctcctctccccaccgcgcggggcgcggcggggcccctttcggtcttgccccaaaagagaacgcgccgcgcccggtgtaagagaaaaagacgctttggccgcaactttgcacgtgcgtgcaaagttgctgtacgggggtcggcgtgagagggtgcctgcgtgttttcggcagacggccgacgggcgcggcggagtgacgcaaagatttgggtggctgattcccgcggcgcgggtgcgtcttgggtcagggtgcaaggagggatttgaccagctcctcttttcctgtctcgcgctgcggcgctcccaggatttccgtcaccagtgttccactggttcctctttccgcgcgttccgcttcgctacgcgctggccgggtggaggacggcaaaggcggctgagcttcgctcagccgcctttgtgttcgtatttttttaggaggtcctcgatggcttcgtccaagagacgcgttttggtgatgcgcgtttttttggagagctcgttgaatggctctaccagttcgttggccagggaggaaacaaatcttttccgatttaccagctggtgttcgcccaaaacccttcaccctactttctactcactacgtagttactatatatgcactatatcatttggcgttttgcttgacaagtggtgcttaggtggtatactacaagtgcataggaggtggctatatatgaatcacaccaaggcgatgttgacggatattttactgcatctccgcaagagggcggagcggggggatccggtttggcgggagctggcagcacgggaggaagcgacgtactgccgggtccggcagctctgcggcggggaccgggagcttttgcaggaggtaggggacctgtcggacgcctgctgcgccctggcggaatacgccggagagtatcagtttttcctgggcctccaaatgggcctggagttgggtgcgttggacctgctgggcgcggaagaggaggaaaccctctcccatgcccgggcgctttcctgctcgtgacctcaacagatatccgatcaccgtcctgccagcgcggggaaatgggcggatgagagcatctgcccctacggttatggaaggtcaggcgcttccgcgaccgctagggtagcgcgtagcgaagcggaacgcgcggaaggaggaaccagtggaacactggtgacggaaatcctgggagcgccgcagcgcgagacaggaaaagaggagctggtcaaatccctccttgcaccccgacccaagacatacccgcgccgcgggaatcagccccccaaatctttgcgtcaccccgccgcgcccgtcagccgtctgccgaaaacacgcaggcaccctctcacgccgacccccgtacagcaactttgcacgaacgtgcaaagttgcggccaaaagcgctttttctcttacaccgggcgcggcgcgttctcttttggggcaagaccgaaaggggcccccgccgcgccccgcgcggtggggagaggaggcgcaagggagcgggcgcagttttcgccgcaggcggaaacggagctgagcggactttgcgacgacgacaatggggggcgcatccccgctggacaagcccccctgcgggagcagaatcccccgaggccgccgaacggcggcccaaccgttttccggagagtctccgcctccgggccgccgggatcatcgcccccctgcggatgcggcgcggtctttcccaacagcccccgcctcctgcccgggcggcaaacgaacaggccccggccccctcccgggggccagggcccatgcaatggccggtttacttcttgccgtgcagcgccttcatgcgcttctcgtggtccagaatggccttgcgcatccgcaggctcttgggggtgacctccagcagctcgtcgtccgccaggaactccagacactgctccaggctcatctgcttggggggcaccagccgcagcgcctcgtcggagccgctggcccgcatgttggtcaactgctttttcttgcagatgttgacggtgatgtcctcgctccgggggctgacgccgatcaccataccgccgtacaccggcacgccgggcccgatgaacagggtgccccgctcctgggcgttgaacaggccgtaggtgacggactcgccggtctcaaaggagatcatggagccggtgccccggcgggagatgtcgcccttgtagggggcgtaggagtcgaacacgctggccatgatgccctcgcccttggtgtccgtcaggaaatcgctgcggtagccgaagaggccccgggcgggaatcaggaactcgatcttcatccgctcgcccacgggagtcatctccaccagatccgccttgcgggcacccagcttctcgatgaccgcgcccacacagtcgccgggcacgtccaccaccagccgctcgatgggttcgcacttgacgccgtcgatctcctggtacagcacgcgggcgggggaaacctggaactcatacccctcccggcgcatggtctcaatgaggatggagagggacatctcgccccggcccgccacgttgaaggcagtctccttgtccgtgtcggtcacacgcagggacacgtccttcaacgtctcccggtacagccggtcccgcagctggcgggaggtgacgaacttgccctccttgccggcaaagggggagtcgttgacggagaaggtcatctccagggtgggggcgctgatcttcacgaagggcaacgcctccacgcagtccgggacgcagatggtgtcgccgatggtgatgtcgggaatgccgctcatggcgatgatgttgccggcggtggactcggtcaccggattccgggcaaggccctcgaactcgtagatggcggtggctctcgccttacggagcacagcctccgggtcgtggtagttgcacacgacgatgtcctggttctgcttcaaggtgccccgctcgatgcggccgatggcgatccggcccacgaagtcgttgtagtcgatggagctgaccagcatctggaagggctggtccacatctgcctccggggcggggatatactccagaatggtctcaaacaggggcttgaggtccgtgcccggcacgtcgggggagtaggaggcggtgccgttgcggccggagcagaacagcatgggggaatccaactgttccggggtggcatccaggtccatcagcagctccagcacctcatccaccacctcgtggatccgctggtcgggccggtcgatcttgttgaccaccacaatgacccggtggcccagctccagggccttggagagcacgaagcgggtctggggcatggggccctcggcggcgtccaccagcaggatgacgccgttgaccatcttcaggatgcgctccacctcgccgccgaagtcggcgtggcccggggtatccacgatgttgatcttggtgtccttgtaccggatggcggtgttcttggccaggatggtgatgccccgctcccgctccaggtcgccggagtccatgacccggtccaccacctcctgattctcccggtagacgccgccctgcttcagcatctcgtccaccagcgtggttttgccgtggtcgacgtgggcgatgatggcgacatttctcaaatgttcgttctgcataattctcttctccttcttctctggcaaggccgcgccgggcggcgcgtacaagtgttttgcctgcggcaaaaccttggcggaggcggaattcactgcacagccgttggcggctttcccgccttacggatgtggcgtaccccttgcgggtgcttccgccgggcatttctatcaaacgatccccgcagggtgtcagccctgtggggcagtcttgccgtggtcgatgtgggcgttgatggcgatgttcctcaaatgttcgttctgcacatcttccatctccttttctctatgaaggggccacgtggggtacgccgggcggcggatcaacacacgcggcctccctgccggccgtccgattccggccgccggtcgagatttgcacacagttttgcattatatgccgttctctcgatttttgcaagctgctttcaggggctttttcaaaaaaacaggacgattccgcagttttcataggaaagcggcagttccggaggcgcagaactgccttttggggtattttcccaggccgttccaaaagtaatacctctccaaaaactttcggcccaaccggccgtggatttggcggttcggcacattgactgggacggcggcctctacctataatagaagatgctgcggcggaagcggtgccagcaccgcacgttcccccgcaagtaccgcgacccgctggggccgcccaatggaggcattctgccatgtaccgtatcagaacattcaacaagatctctcccgtcggcctgaaccgcctggattcggcgctgtacgccgtctccgattcggagacggacgaggacgccatcctggtccgctccgccaagctgctggactatgattttccgaaaaaccttctggccatctcccgggccggggccggcgtcaacaatatccccctggaccgctgctccgaggcgggcatcgtggtattcaacacccccggcgccaacgccaacgccgtaaaggagctggtgctgtgcgccatgctgatgggctcccgggacgtggacgggggcatccagtgggtccggcagcaggtggcctccggcgtggacgtgaccaccgtagtggagaagggcaaggccgccttcatcggcccggagctgtacaagaagacgctgggcgtcatcggcctgggggccatcgggtcattggtcgccaacatcgcattgtccctgggcatggatgtgtacggctacgaccccttcctgtctgtggatgccgccctgcggctggaccgccacatccatgtggtgaaggacatcaacgagctctacaagcgggcggactatatcaccatccacatccactacaccaaggacacggagcgcatgatcgacgccaaggccatcggcgccatgaaacggggcgtccggttcatcaacctggcccggggcgagatcgtggacgacgatgccatgctggcggcgctggacaccggctgggtagcggcctatgtcacagacttccccaataaccgcctggtgggtgcgccccacgtgctggccatgcctcacctgggagcctccacaccggagagtgagcagaactgcgcggtcatggcggtggaccagctgcgggactacctcgaaaacggcaacatccgcaacagcgtaaacctgcccgccgtcagccaggagcgcagcggcgtgtgccggctgtgcctgatccacaaaaacgtgcctgccatgctggccagcatcaccaccctgctgtcccgggacggcatcaatgtggagaacctgagcaacaagtcccggggggactacgcctacaccatcgtggacctgagcgccccggcggaccagtgcgtcatcgacgaggtgacggcgctggagaatgtgatccgggtacgggtcatccagtgagcgccgaagggctgccgcctgcgcggcagccctttcccattgacagcagggcggaaaacaggtacaatggtttctgcctatttgatatgcccctgtagctcagtcgtatagagcgaccgcctcctaagcggtaggccaccagttagagtctggtcaggggtgccaagtcagccgctgtaagccagttttcggcttacagcggccttcttatccgttccaccgcattccagcggctgccaggtgcctttcatagcgcggtctctgcaaaaactccggctgatgtgcgatccgcaaactgcttgggcatcctctcaggccgcctccaggcgcttttataccctcgtcctcctgccgttctgctggatggcggccctgcggcacgccgcttcccggcacaaaaaaagaggcgcccccggctaatggccggggacgccttttcacatccagcggagacggtgctctgccggaagatcaattcagcacttctcgaacacggtggcaacgcccatgccgccgccgatgcacagggtagccaggcccttcttggcctcgggccgcttctgcatctcgtgcagcagggtcacgatgatccgggcaccggacgcgccgacggggtggcccagggagatggcgccgccgttgacgttgaccttgctcatgtcaaagcccagctcacgggccacggcgatggactgggcggcgaacgcctcgttggcctccaccaggtcgatatcgtcgatggtcacgccggccttggtcatggcctgacgggaggcgggcacggggccgacgcccatgatcttgggatccacgccgccctggccccagccgatcagcttggccatgggcttcaggccgtacttctccacagcctcaccggaggccagcaccagtgcggcggcgccgtcgttgatgccggaggcgttggcggcagtcacgcgctgctgacccttgtcgtcggtctcctggatgccggtgggctcaaaggtgtggaccacctggggattgggggactcgggccccacggggaaggcgcccttcagcttggagatgccctcggcggtcacgccggcacgggggaactcgtccaccttgaactccacgatgtccttcttgaccttcacgggcacggggacgatctcagcctcgaacttgccagccttctgggcggcctcggtcttctgctgggaggaggcggcgaactcgtccatctccttgcgggtgatgccccagatgtccgcgatgttctcagcggtggtgcccatgtgatagttgttgtaggcgtcccacaggccgtccttgatcatggtgtcgatcatctgggtgtgacccatccgggcgccgtagcggccggtgggaacggcgtagggagcggcgctcatgttctcagtgccgccgcagacaaccacgtcggcgtcgccggccaggatggagcgggcgccctcgatcatggacttcatgccggagccgcagaccatgcccacggtgtaagcggggacggaataggggatgccggccttgatggaggcctggcgggccacgttctggccctgggcggcggtcaggatgcagccaaacatgacctcatccacctgctcgggcttcacgccggcacggttcagagcctctttgatgacgatggcacccagatcgacggcaggggtgttcttcagcgcgccgccaaaggaaccaatcgcggttctgcagcaattcacaacatagagctctttcatgatcttcctccgtttttataaaaatatgggattggcagctccgacggctcttcgtcaggcgctgccgcagacgccaatcacaagttgagggtggcggcgagagtttgtcaaaagaaaaacatgattgccaaatttttgacaaatgctcatacaccaaccgcttgctgatttgattatactgggtttttcctgccccgtcaatgcaaatttctgtgaaattcgaaaatttgttaaaacattatcaaaacctctgcgaatttcgtcattttgccaaaattggcacaaacacccatcaggcaacctctccgccggaggcatccagctccgcccgggcggcgatgagctcgtcgtaaaaccggctcacatccaggtccgcataggtgcgggtggtggagatgtccgcgctgtccgccgcagcctggagcagggcgtcgaagtagtccggggccacggcctccaggtccacgggcttgcgcagaatcaggtagaagccgtcatccgcctccaccacgccgctgaactggccctcctccagggcctgggccgcctcctcgcaggcggcgggcagcgtgccgtcccccacagtgaaggtgtatccggacggatgctggtcccggtccgtctcatcgctgtaagtggcggccaggacggcaaagtcatgggcagggtccgcgctgccgttcagcttggaaaaggcctcctccgccctggcccggcaggcggccacggcctccgcgtccgccgggtccgcggcggcggtggagagccagatgtggtccacggtgaggtagccctgctcctgggcaaaggtctccaggtcatgctccgcgggggccagctcgctgccctccgtgcagtagaggtcgtacaggtgctcgtagagatagtagtccccggagatggcctccgcttccgcccggtccagccccatgcgggccagcacggccagataggcctcctccccgccgtactgggccgcccgggccgcccactcccggtccatggcagtccggtcctcgtcggtgagggtgcagccgtaatcctccgcccaggtctccactgtggcgtacagggcggcgttctgcagcgcctggtccttggcgtaatcctccaggctctggccggagacagtgtccccccactggatcccctccccgctgtcgtagtagtcggcgatgtagtcgcaggcgtaggccagccagtagaggtatcgctgggcggacacgtcccgcccgtccacggacagcagcacagtgtccggacggatgccggacgcctcgcagagaagtcccccctctgtgtctccgcccccgcaggcggtgagagagagggcggcccccagggccaggcaaaaagcgatgcatcgtttcatcacggttctcctttgtcattcctcgcagattccgtggaaacgccccgcacaggacaggcgggggacgtcccaccgccaccatcctatgcggggcatggcaaaaacatgatgaaacttacggggtcccgcccgcggcctcctccgcggccagcttcaggtcctccaccaggtcccgggcggcctccagcacatcctccccgggcttgagcttcagggtgagggcagggatctcccccgccgccagcgtcagccgctggcggtacttggcgtggccgcacaccgccaccagggcctgtgggtggaacactcccagctgcagccgcaggaggctgcccttctgggagatatcggacacgccggccttggccgcggcagaacgcagcagggccacgtccagcagggccagaacggacttgggcgcctcgccgtagcggtccagcatctcgtccagcagatccgaggcgtcctcgtccgtgcggatggcggcgatgcggcggtacaggtccatccgctgttccgccgaggggacgtaccggtccgggatatgggcgttcaccgtcaggtcggcggcacactccgtctcgatccgcttctcctcgccacgctcctccaggacggcctcctccagcagcttcaggtacaggtcgtagcctacgctcatgagatacccagactgctccggccccagcaggttccccgcgccccggatctccaggtcccgcatggcgatcttgaagccagagccgaactccacatactcccggatggccgccaaccgcttggcggcggtctcctgcagcaccttgccccggcggtaggtgagataggcgtaggcccgccgggcgctgcggccgatgcggccccggatctggtggagctgggccagccccatcttgtccgcgtcctcgatgatgagcgtgttcacgttggggatgtcgatgccggtctcgatgatggtggtgcagaccaggatgtccgcctccccgtccaccatggcctgcatgacggaggacagctcctgctccgtcatcttcccgtggccggtgacgatacggacctccggccccagcatcttctggagccgggcggcggtggcgtcgatgctctccacccggttgtggaggtagtatacctggccgccccggcccagctcccggcggacggcatcctcaatgatggcccagtcgtgctccagcacataggtctgcaccggctgccggtccgccgggggctcctccagggtggacatgtcccgcaggcccgaaagtgccatgttcagcgtccgggggatcggagtggcggagagggtcagcacgtccacctggcggctcatctccttcagccgctccttgtgggtgacgccgaaccgctgttcctcgtcgatcaccagcaggcccaggtctttgaacgccatgctcttctgcagcagcttgtgcgtgccgatcagcaggtccacgccgccgtttttggcggcctccaggatccgcttctgctccctggcgggggtgaagcgggacagcacctcgatcttcaccggaaagtcccggaaccggctgacagcggtggcgtaatgctgctgggccaggacggtggtaggcaccaggatggcggcctgtttcccgtccaggatgcacttcatcacggcccggagtgccacctccgtcttgccgtagcccacgtcgccgcatagcagccggtccataggccgtggcttctccatgtccgccttgatctccgcgatgcaccgcagctggtcgtcggtttcggtgtagtcaaaggactcctcaaattcccgctgccagggggagtccggggagaaggcgaagcccggccgcttctgccgctcggcatacagcgcgatgaggcccctggccagatccttggcggccttcttggccttggttttctgccgggtccactcggcgccccccagcttattgagcttggtgcgctcggtgtcctcgcctccgccgatgtacttgctcaccagatccagctgggtcacggggacgtacaggcagtccccgccggcgtagtcgatcttgatgtagtccttctccacgccgtccaccggcatccgctggatgcccacgaaccggcccacgccgtggtgctcatggaccaccaggtctccgggggacaggtcggtgtaggactggagcttctgccggttggagtccttcttcacccgctggcgcttgcgcatggccggggccgtcagctggccctctgtcagcaccgccagcttcagcgccggccactcgctgccagcggacagggcccccagggagaggcgcacctcccccgccgcaggcatggcggcgccgcttagatccagggtggccgggatgcccttctcctccagcagccggtggagattcttcgcccgggtctccccaccgcagagcaccagcaccgcgctgccggaggagcggtagtgctccagatccgtgacggcggtctccaggctgccgccgtaggagctgagctgtttggcattcatggtcaggaggccccggggccgcagggggtgccgggaggtgggcagagagtcctccaggatcacggggaagtcctccagcgcggcgtacagttcctcggcggtgagggtcagatgggcgtactcccccgccagcaccccggcggacagcagcgcctccacgtcctgcttctgctggaggaccgtgttcttcacccgctcgtccacccggccgctctcactgaggaacaccaccgcgtccggaggcaggtagtggaccccggcggtgacagtcggatagatggctgccagataccggtccgccgcccccggggccgcgccgctgcgcagccgctccgcgtcctcccgcaacgtctggacgatggcctccgtcttctgctttttcgccagcttctccgccagggcggtcagctggtccgcaagaccgggcaggcctccgggggcgcagtggggcagcacctccgccgccggcaggatccgggcggaggacacgttccgggtccgccgctgggtgccggggtcgaaggcgcccatggagtcgatctcatcgtcaaaaaactcgcaccgcaccggctggtccatcaggggagagaacacgtccagaatgccgccccgcagggcgaactggcccacgccctccacctgctcacaacgggtatacccggcggagagcagttgctccgccagcgcgcccagctctgcctgcccccccacctccagggtgatggccagggaccgcagggtctccggcggcagggtccgggccatgaggccgtccgcggtggccaccaccaccggcgcgtccccctgggccagggcgtacagcgccgccagacggctccgctcccagtcccgagaacccacggccccggggcggaactgccactcccggcccagcagggtcacggggcggcggcccgtcagggtctccagatcagcggagaggacctggacctcccgctcgtccccgcagaggaacaccgccggacggccgcaggctgccgccaccgccgcgcccacgcaggcccgctgcaccggctggaggccgctgaccgccgcgggacagccgccctcctccacccggcggatcagctccgccgcctcggggatagtctgcaattgtctcagaaactgttccataggatgtggtccttgtcaacatgaaaaattgggaagactctctgggcgccgggctgcttccgggcgcatggcccggtgggcgttctccgcccggcgcctgtttggaggcaggggctgtaaagcggatggacatgattctcccacccaggtcatatccaccggcacgatccgggaaaatggatccgtccttagtgtattcccctttaccgggcgccatgcccggcggcaaaaagaggcgcggcgagccgccccattggacggccctcattcaattgaagtcattcatggccttctgacagccatgttcaatgatacattccgccgcgtcgatggcccggcggaagctctccaccaacaccttccgctccgcctgggagggcacgccgatgacccagtcgatcatgtcgcccccttcgcccggcgcgccggtgccgatcttgatccgggggaagtcctgggtccccaggtgggcaatgatgttcttgatgccgttgtgccccccggcggagccggtgggccgcacccgcagcttccccaccggcaatgacacatcgtcatagatcaccagcacgtggtcggcagggatcttgtagaactgcaccgcctcccgcaccgcctcgccggagaggttcatatacgtctggggcttcatcaccaggcacttggccccggcgaaggggatgatgttataggcggatttgaacttgaccttgttcagcttcacccccgcctgctccgccagcaggtccacggtgagaaagcccatgttgtggcgggtgtgctcatacttggccccgggatttcccaggcccaccaccagccagtccacggcggcggatttggcgcctaacagcatgaaaaaaactcctttgcaacgtcagccaaggcgggaaagttcccttccccgccttgaccagtccattattgatacgcagaaatgccggagctccgccgcttctcagcggaacagcttggagatggagatctcctggtagatacgctcgatggcctctgcaaacatgggggccacctgcaggtatttgatcttgctgctctttttgggatcaatggcggggatggtgtccagcagggccagctcggtgatgacgctgtcgttgatccggtcaatggccgggccggagagcacgccgtgggaggcgcaggcctggacgctcttggcgccgcccacctcgatcagggccttggcggcgttgcacaggctgccgccggtgtccaccatgtcgtcgaagaggatgcagtccttgtcccgcacgtcgccgatgacgttcatgacctcgcagctgttggccttctgccggcgcttgtccacgatggccagattcatgtgcagcttctgggcaaaggcccgggcccgggacacagagcccacgtcgggagagaccaccatcatgttctcgcactcggagccgtacttcttggcgtagtagtccacaaagatggggttgcccgccagattgtccacaggaatgtcgaagaagccctggatctgggaggcgtgcaggtccatggtcagcacccggtccgcgcccgcggcggtgagcatgttggccaccagcttggcggtgatggggtcacgggccttggccttgcggtcctgccgggcatagccgtagtaggggatgaccgcggtgatgcggccggcggaggcgcgcttcagcgcgtcgatcatgatgagcagctccatgagattgttgttcaccggggtgcaggtggactggaccacgaacacgtcgctgccgcggaccgtctcgtacagggagacgaagatctccccgtcggagaaggtaccgacctccgcctcgcccagtttggttcccatcaacttgcagatctcctccgccagcttcggattcgcgttgccggaaaacaccttgatgtccttgccgtgagaaatcattgtttgaacgccctctttctatgttctgaatgttcttggtttctgtcagtaggatcgatcagccgaaggagcatcagtgctcctgcccgtacagcttccgccgccgtttggcccacccctccttgttctcctgcttggccctggccacggccagcgcgtccgcgggcacgtccttggtgatggtggcacccgccgcgatataggaacccgcgcccacagtcaccggcgccaccagattggtgttgcagccgatgaaggcgccgtcctcaatggtgcagcggtacttcttcacgccgtcatagttggtggtgacggtgccgcagccgaagttgaccttgcggcccacgtcgctgtcccccacataggtcaggtgggagattttggtgccgtcaccgatggcggagttcttcacctccacaaagtcgcccaccttgatgtcgtccccgatggcgcagccggggcgcacgtaggcaaagggccccacgtgggtgcggctgccgatggtgctctcgttcacctgggaggcattgatctctgtctcatcgccgatgacgcaatcccgcaccacggcattgggaccgatggtgcagccgcagccgacggcggtctccccccgcaggatggtgccgggcaggagcatggtcccccggccgatggtgacccgggggtcgatatacaccgcgttcgggtccagcacccggacgccggcgcggatgtgccgccggacgatccgctcccggagcaggggctccagctcggccacggtctccagactgaaaaccggcacccagccggggatcagctccgccgcggagacggcattggtcatcttctcctgccagaccgcctggagctcgtagccggcggcgccgtagacaaagccggggcccgcctcctccatgggaagggcggcccggacaaacacggccaccgggtccggcgtgttcaaaaagtccagcagctcgctgtgctgctcagagatggtcacgtctgcgtcctccgggaagcaggcgcggacctcctgggcaaagcgggggctggagacagcaaaaaaccgctgcacgccgtcggccaacagcttgtcactcatccattttaggatcgggcaaaataacacggcttccagcatcagcggtttggagtgcgccgggagggaggagtcctcttccagaaaaaacacggcgcgctgcggaaaatccatgggttttctcctccttgttcgttcgtattttttattataacaaatatcttgggaaaatccagtatttccggcgaatttataaaagaaatttcctccagatttttcttgtacagggacgtttttttgtgggagacaacagatccgctcctgcggcgccccctccttctgtcatttccggcattttgcagaaatccagccggatttgtcgtgattttttctaaaaatccggttttcttcacacattacagttgaatttgccggggcgacgcggtacaatgtgttttgactgcatgaaaagagggggacagctgtctatgcttcatatcgtactggtggagccggagatcccacagaactgcggcaatgtcgcccgcacctgcgccgccaccggcagccagctgcacctgatccgccccctgggcttcgacatctcggagaaggccgtccgccgcgctggcctggactactggaacctggtggaggtttttgattacgagaatctggaggactttttccgccgccgccccgaggcggagcgggacctgtggctcaccaccaccaaggcgccccggtcctatcaggaggcccggttcaccgccgacagctggctgttcttcggcaaggagaccgccggactgcctctggctctccgggagcggtaccgggaccgctgcgtccgcctgcccatggtcagcgaggcccgcagcctgaacctgagcaacaccgtggccgtctgcgtctacgaggcgctgcggcagaacgggtttccgggcctgctgggaaccggcgagatggcctggggctgagccccgccgggcggcgccgattccgctggggaggcccggctgcttttacagggcgcggagcggccttgcattgcaagggggcggccgggggtgaatttccatccttcggtccatactagtccctgaacgcgctgacaccgccgccgaacgcctctgcggcttcggctgcgttggaatgaatcatgaggaatccaatggaacgagatcagataggaggacatctcagatgaatacccataaaaagacggtccgggatgtggaggtgcggggcaaaaaggtcctgctccgctgtgacttcaacgtgccccaggacaaagagaccggcgccatcaccagcgacaagcgcatcgtggcggcgctgcccaccatccagtatctgctggagaatggggcggcggtcatcgcctgctcccacctgggcaagcccaagaacggccccgactccaagctgagcctagccccggtggcgaagcgcctcagcgagctgctgggccgggaagtgattttcgcccatgacgtggtgggccccgacgcccaggccaaggcggccgccctgcagccgggacagatcctgctgctggagaacacccgctttgagcccggcgagaccaagaatgacccggagctggccaggaagctggccgacatggcggatctgtatgtgtccgacgccttcggtgccgtgcaccgggcccacgcctccaccgccggcgtggcggcgtacctgcccgccgtctccggcttcctgatccagaaggagctggagttcctgggcggtgccatcgccgaccccaagcggcctctggtggccatcctgggcggcagcaaggtctcctccaagatcggcgtcatcaacaacctgctgaacatcgccgataccatcatcatcggcggcggcatggcctatacgttctccgccgcccagggcggcaaggtgggcgacagcctgctggaggccgactgggagagctacgccaatgagatggtggagaaggcaaaggagaagggcgtaaagctgctgctgccggtggacaccgtctgcgcggacgccttcgcccccgacgccaagagtcaggtggtgaaggccggggagatccccgacggctggcagggcctggatatcggtccggagacgatgaagctgtactgcggcgccgtggcggacgcgggcaccgtcatctggaacggccccatgggcgtctttgagttcccggccttcgccaagggtactgaggctgtggccgaggccctgagccgtacggacgccatcaccatcatcggcggcggcgacagcgcggcggctgtggagcagctgggctacgccgacaagatgacccacatctccaccggcggcggggcctccctggaattcctggagggtaaggaactgcccggcgtggcctgcctccttgatcagtgagctgctgtgccgccgatccaccgttgcggcattgcgtttcccggttcctcccggagccgtcaatcgcgccgctggaatttttggagggcaaagagctgccccgcgtggcctgcctcccggatgcttaaagagggggactgtgtcccccctttacattcctcctcaccaatctgcggactggtgacaccgcccagggcggctgaggcaaagtattttcgccacgcgcgccctgaggcgaaaatggatttgaatgttgcggccgcttgcggcggccgcgccgaatccgtccccaaacgcgcttcatttgacttgacaaacgggctggaattctgtataaaaaaaagggcctttcggggaaaatgccctggaaatggccaaaacctgcgcatcagatcgcggagaacgcgattgcggatagatgaagacataaaggagaagagatcaccatgaatcgcagatatcgcaaaacggttatcgccggaaactggaaaatgaacatgaccgccactgagacgaagaaattcgccgaggaactgaagaagatcatgccccgggccaagtggtgcgacaccctgatctgtgtccctgcctgcaacattcagaccgccgccaaggcgttcaaggacctgcggatctccgtgggcgccgagaacgtgtactttgaggagaagggcgcctacaccggcgagatctccgccgacatgctgaaggatctgggcgtgaagtacgtcatcgtgggccacagcgagcggcggcagtatttctgcgagaccgataccaccgtcaacaagaaggtccacgccgtgctgaacgccggcatgaaccccatcatctgcgtgggcgagagcctggagcagcgggagaccggcatcaccgacgagtggattgcccttcaggtgaagagcgccctgtacggcgtgcccgccgacaagctgcgccgctgcatcatcgcctatgagcccatctgggccatcggcaccggcaagaccgcaactgccgagcaggccggcgaggtctgcaccaacatccgtgccaccatccgcagcctgtacggcgcccgggtggcccgcagcgtcaccatccagtacggcggctccatgaaccccaagaacgcggcggagctgctggcccagccggacatcgacggcggcctgatcggcggtgccgccctgaagcccgaccagttcgtggacatcatcaacgcagccaaccaggagtgagctccggcagagcggttttgtgagaaagcgagcgagacgagatttcaatgaacaaaacaccaacaaccctcatcatcatggacggcttcggcctgcggcaggagacggagggcaacgccatccgcgccgccgccacgccccggctggaccagtttttccgggagtatgcccacaccacgctccgggcctccggcctggacgtgggcctgccggacgggcagatgggcaacagcgaggtgggccacaccaacatcggcgccggccgggtggtgttccaggacctgccccggatcaccaaggccattgccgacgggagctttgatgaaaatcccgcctaccggcacgccatggacgcctgcctggagaagggcacgtccctgcacctgatgggcctgctgtccgacggcggcgtccactcccacctggagcacctgttcgccctgctgcggctggcgaagcgaaggggcctggagcatgtgtatctccacgcctttctggatgggcgggacgtatcccccacctccggcgcagactttgtggcgcagaccgtggcacagtgccgggagatcggcgtgggcaagatcgccacggtcatgggccggtactatgccatggaccgggacaagcgctgggaccgggtggaggcggcttacgacgccatggtgtacggcgagggcgccgtgcagaatccagacccggtggccgcggtacgggagtcctatgaccggggcgtcaccgacgaattcgtggaacccgtggtctgtgatgccgagggcaccatctccgacaatgacagcgtgatcttcttcaacttccggcccgaccgggcccgggagatcacccggaccctggtggacccggagttcgacggcttcacccgccagtttttccccgtgaccttcgtgtgcaacacagagtacgacgcctccatgcccaatgtggaggtggccttcccccgggtgacggtgcgcaatggcctgggggagtatctcagccagatgggcatgacccagctgcggatcgcggagacggagaagtacgcccatgtgaccttcttcttcaacggcgggtccgagactgtctttcccggtgaggaccgggtactggtgccctcccccaaggtggccacctacgacaagcagccggagatgagcgcggcggaggtgacggacaagtgcgtggagcgcattgagtccggcgcctatgacgtgatcattctgaactttgccaactgcgacatggtgggccacaccggcgtctatgacgcggcggtgaaggccgtggagaccgtagacagctgcgtgggccgggtggtggacgccacactgaagatgggcggcatcgccatgatcaccgccgaccacggcaacgccgagcagatggcggagccggatggcagccctatgaccgcccataccaccaatcccgtacctttcattctctgcggcgcggggaccgagctgcgccccaacggccgcttggcggacattgcccccaccatgctggacgtgatgggcctggcctgtccagaggagatggacggcaagacgctgatcgtgaagtgaccaatttctgagagaaaagagaccgctttccagcggtctctttttgtataattcctggaaatcctgcccatacttccctcagacccaagatcgagggaggtatgatacatggcaaataaagtcaaatccctgctgggcgggccaggcttttacgcggtcctggccctgtgcgtcctggcggtgggcgtgggcggctactttctgctgtttggggaaccggcccagacggaagcgcccaccggcccggacacggcagcctccgcaccggtggaggacctgccggagcacgaaccggtggtggagaccgtgcctccggaggaaccggaggaggagacggagcccgtcatcatgccggaggtgaccatcccggtggatgacacgcccgtggtggcagaggagccccatgtggtggtcctgcccatccagggagaggtgctgacggcattctccgtggaccagctgctgtacaatgagacgctggacgactggcggacccacgacggggtggatatcgccgcggcggaaggcgatgccgtcctggccgcctgcgccgggacggtctcctccatcaccgacgatcccctgatgggcaccaccgtggtgatccagcacagcggcggctatgagaccacctatgccaatctccaggcggagcccgccgtggagacgggcgacacggtgtccgccgggcagaccatcggcgcagtgggaaccaccgccgcggcggaggccgcccagggcgcccacctgcacttctccgttgcaaaggatggggaagctgtggacccggacgcatttctcaacagctgacgcagcagcggcggaacggcaaaggccgttccgccgctgcttttctctggagtcaggccgcccggctgccgatccgctcggcaacggcccgcatggtccggcgcaggaagatagcgctcagtaccagggacaccagttcggagatggggaaggccagccacaccagcgtcaggacgccggtgtgggacaacagccatgccaccggcagcagcaccaccagctggcggcacacagaggtaatcagactgtacagcgggttgccgatagcctgacacacggaaccggcaatgatgtcgaagcccgccagcacgaaggacacggagatgatccgcagagccacggagccgatggagagcatctcctccgaggcgttgaagaacatcagcagctgctgggggaagagctggaaaatcaggcatcccacagccatgatggccatggcggtgcagatggtcagcttgatggtccgcttcacccggggcaggctggcggcgccgtagttatagctgacgatgggcaccatgccgttgttcaggccgaacaccggcatgaagacgaagctctgaagcttgaagtatgcgccgaacacggcggtggccgtcttggtgaaggagaagaggatcttgttcatgccgaacaccatggcggagccgatggactgcatgacgatggaggggaagcccacccggtagatctccgccgccaccttgccgtgccagcggatctcccggggcaggatgtggatgtccggattgcatttgaggttcagcaccagggcagcggcggcagccacaatctgccctgccaccgtggcaatggcggcgccggccacctccatccggggcaggccgaaccagccgaagatcaggatggggtccagcacgatgttgatgagggcgccggtaagctgggtgcacatggccaggaacgtgcggccggtggactgcagcaaccgctcaaagcagaactggctgaaaataccgatggagcagcccaggcagatggaggcgtaatccacgccgtagtcgataatcacctgttctcccccggcctgcagctcaaagaaggtccgggagaagaagatgccgatcagggcgaatagcgcgaaattgcacagggccagaaagatgcccgtgttggcagcccggtccgccatggcctgattcttctctcccagggaccgggagaggagcgcgttgatgcccacagcggtgcctgcgccgaaggcgatcatcaggttctgcagggggaaggccagggacacggcattcagggcatcctcgctgatctgtgccacgaacacgctgtccaccacattgtagcaggcctggaccagcatggagatcatcatggggaccgccatgttggtcagcagccgtccgatgggcagcacgcccatcttgttctcctggggcgccgcgccctgggggaatttttctgccatggaaattccaacatcctttctcattcagagagacgtgacacggagaccaccccgcgccacgtctcatattttgatttctctattaggttgcggctccggaaagccgggcatccggaaggatgcgtggacgatttattttttcagctcaccggtggccagctgagtgagatacgcgttgatgaagccgtccagatcgccgtccatgacgttgtcgatgttgccggtctcatagccggtgcgggtgtccttcaccatctggtagggcatgaacacgtaggagcggatctggctgccccactcgatcttcatctgcacgcccttgatatcggagatcttctccgcgtgctgctgctgcttcagctccaccagcttggcccgcagcatcttcatgcagttgtccttgttctgaaactggctgcgctcctgctggctggccaccacgatgcccgtgggcttgtgaatgaggcgcacggcggatgaggtcttgttcacgtgctggccgccggcgccgctggcccggtagacctgcatctcaatgtcctcctcccggatctccacctcgtcgtcatcctcgatctcgggcatgacctccaccgcggcaaagctggtctgccggcgggcgttggcatcaaagggagacacccggaccagccggtggacgccgttctcactcttcaaaaggccgtaggcgttgtccccctggatggcgatggacgcggatttgatgcccgcctcgtcgccgtcctcatagtccaggatctgataggtgaagtcgtggcgctccgtccagcgggtgtacatccgatagagcatctgggcccagtcctgggcctcggtgccgccggcgccggcatggaaggtcaggatggcgctgtggccgtcgtactccccagagaggagcgtggccatccgggactcctcgatcttctcctccagggtctggaaaccggacttcagctcttccagcagctcctcatcctccgcctcctggcccatctcgcacagggccgtcagatcctgccactcggtcaccagcttgtcctggcgggcgatcttgttctgcagctgcttgaggcgctgctgcaccttctgggatcgctccaggtcgttccagaagccgtcctgggcagtctcgtcctccagctttcgggcctccgcgcgggcgctgtccatgtccagcgcggcggagagcttctccagctcgggccccaggtcccggagcctctgcttatattcgtcgtattcgatcaaagccatgtgctctctccacttcctcaaatttcattagccatagtattatatcggaggaacgtttgtttgtaaagaaaaacccgtaaaaaaacggaaaatcccgggccgtctgtgtatttcaggggacaatttcgttttccaggatgcggccggaccggaatcttttttcccgaatggcgaaaagttcataatttgttcatgattgccgggcactttcccggtatgttacatgtagagagatagaagctggaagcaagccttttggaatatgatggaggaaagaggactatgaaaacattttggaagaaaaagctcccggcgtgtctgctggcgctggcgctgctggccggaaccgttcccatggcgtctgcggcctcggcggatctgacgtacgatgtggacgaggacagcggcgtctggctggatgcggatgactttcaggaaatctatgaggacgacaacggcggataccttgaatacgtggaattcaccgattatgatgactttgacgattacggctatttcaccttcgaggactttgaccgttacgggttcgacgacgtggattccaaggcgctggagaactacgaattctactatgaccgtgctgatgcggacgattacgacatcgacctggacacgctgcggtttgagacctatgacaacatcgacagcgacacactggattttgatgtcaggctgtacggcgacgaagggtcattctatgcaacggtccgcattgatgtggagggtggctcccgctccggctccggcgacgtggagctgacctacaaggtggaccccggcgacgatgtgacggtggacgccgaggacttctgggatctctttgacgaggaagacggccgctatgacgagctggagtatgtggagttcaccagctacgatgatttcgatgacttcggatatttcggcgcagacggatacgacagcgatgactatatcctggactatgagctcaatgacagcgatctggacgatgccatgttctattacgacgagaacgacgtctggtacgactatgactttgaactggacacgctgacgttctacgccgaccggaacgccgacgcggacaccctggcctttgacttcaccatgcacggcgtggacggtgacaaggtatatggcactctgtacatcgaggtcggcaagggcagcggcaccagcagcaagggcgacctgacctatcaggtggacccggacgacgatgtgacgctggacgcggaggatttctacgatttcttctacgacgagtcggattacgacgaactggaatacgtggagttcaccgactatgacgactttgacgattacggctgtttctacgccgacggatacgattccgatgactacacccgggattacgagctgaacgacagtgacctggacgacgccgtgttttactatgatgaggacgatatctgggacgactatgacttcgagctggacacgctgacctttgcggcggaccggaatgccgatgaagacaccctgacctttgacgtcaccatgcgcggcgtgaaaggcgacaagatctccgctaccctcaccattgagatcggcaagggcagcagcaccggcaccaaggtgaagggcgacatcatttacgaggtggatcccgacgacagcgtgacctttgaccgggacgacttctgggatttcctggatgacgagaccggggacgatctggagtatgtacggttcaccgacgccgacggactggacgactggggcgagctgtacagctacgactacgatgatgaccggacgtactttgacgagagcgacctggacgacggttatttctactatgacagcaaggacctgttctacgacgaggacttcaccctggatgacctgacctttgtggcggacagggacgccgacggcaaggtggtggagctggacttcactgcctacggtgaggacggcgacaaggcctacggcaccgtggccatcgccatcggcgatgtggggggaaccggcgtggccgcagagggcggcgatatccgctattatacggattacagcggccgagtgcagatcaacgccaacgacatcgcccggttctttgaggagagctaccccggctataccctgcagtatgtcacctttaaagatgcgcccacttacggcagcctgtactacaactactacggtaccagcagctacggcagctccagcagcctgcgcatcaccgacgacaactgcgacgacatagatttctacttcagtccctccagcagccagcacgccctcagcgagctgacatacatacccagcggcgtcaactactgcgcccagatccccttcaccgcttacggctccggcagccgttctgtgtccggcaccatcctcatcagcgtgaacctcagcgaggtgcccgacgtttacggccccacgcccagaaacacggccgtcaccttccccgccgcctccatctacacggcggtggcccagtccagcggcctgggtctggccagcatccagctgctggaactgcccgccaccaacgagggtatcatctacgtgggcagcggcacctccaagcgggcggacaccgagaccctgtacggctactccagcggcagcgagcggatcagccagctgcggttcgtgccggccagcggcttcaccggatctgtggaaatcccctatgtggcctgcaacagcagcggcgatcccattgccagcggcaagctttgcctgggcattgtcagcgctatggaggacttctctgatatcacctcctccacctggtgctacaaatatgtactggagctcagcgacgccgacgtgatcgacggatacagcgacggcaccttcaagcccgacaaccaggtgacctacggcgcggcgctgaagctcatcatgctggccgctggctatgacgagcagaagccggtgaactccaacgtgttcagcggctatctggcccgggcgcaggcggacgggctggtgtccggcagcgtgaacctgaacgcccccatcacccggctggcggtcagccagatcgcggccaaggccatgggcctcagcatcagcaacctgtccagcgtccgtcccttcaccgacaccacggacccctatgtccaggcgctgaatgccgcaggcatcgtggagggctacttcagcaacggcaccagcaccttcaagccctacaacactctgacccggggccagatctccgccatcgtctggcggatggagcaagcccagtaaacctggaaaacaacagcggaccgctgaagcggtccgctgttctctgttatacaaaagcaccgcagaaaactaaatgcatctttccccgctcctttggggcaaccggaaacgatgcgccaaacctttcaccacagcatttgcccttatctacgatgcgcccaatgcgtataaaggtttatgggggagcgcggtcacttcagcagggcgctgtacacatcctgagggatggtgaactccaccatgcccatgtagcctgcagccactgcgtactcgtcgaacaccagaaccagatcgccgtcggcgttccagtaaaagctctgctccgggtcaatagcggtgaattcgtccgtcagatagctcagggatgcgtccgcggccatctgctcctccatctgccgcaggacttccgcggacaggacagagacgtagtccgcatcaggccggaacagatcgctgagggtgacggcttcacccgtagctttgttgatgtggtagaatcgggtgaaattgtagccgctggcctcggtcctcgtggcatcgatccgcagagtgaaccaagtatcgctgtccgtcaccacagaggaggtcacatccaggccctggtagctctcgcccgcagcctcgcagtccgtctggaactgggcgatcagctgatcggtataggcctgcacctggtcgttgatctcgtctgcagcgccgctgccgcccagctccgggacgtggacgtcggcagtgctgtgaccatcgtcatactggtaatcccggaaggtgatgacccgcaccacggcgcccagcaccgggatttcttccatggcggcagccgccgcgggagatacattgggaatggccacgaatacggccagggccgcggctacgccgaccagccagcgataggaacgtttttgcttgttttctttcatgttcgtctcctttaaagcggcgcaggtgtcccgcacctttccggcatacgtctccggcagggggaagggttcctgcttcgcccgctctttcagtcgcttgtcgaatggctccaccttgcgcacctcattcctcgtgtaatagttgttttagccgggaccgccctcgggagagacgggtcttcaccgccgcctcgctgatgcccagaacggcgctgatctcccggatggagaggtcctcataataaaacagggtcacgaccgcccgcaggtcgctgttcagcgccatgaccgcctgccacagagacaggcgctccacctgatctgccgccggagccggcaggaagtcctggatatccgccaggtccaccgtggtcctccgcttccggcagaactcatagcacttgttgaccagaattttcaggatccagggtcggaaccgcgccgggtcccgcaggctgccgcggccggcataggcggcgcagatggcctcttgcacggcgtcctccgcatcttcgtcctggtgaaggatagccttggcagtgcggaacatggtctcctggtttcggattacctggtcgcagaatatttctttgtccaacaaaaaatttgtcatggcgggactgagcgctcctttgggttcgtttgaccggtcacttattaggatgcggtttccgccgaaaaggtgacagccggaagaaagaaaagcaaaaaaccgtccgcctctttccggcggacggtttcaggctcagacagacagggactcggccagctccaggccggggttgtgcttggtgagaaagcccacggaccactccccgccgaatgccaccagcaggcggcccttgaagtcctccagcagggcggcgccggtgcacagcaccagatcctccggcttgcaggggcaggcggtgatgacccgcaggtgctcgtagggcagtccctccatgtagagctctacgccgtactcgctcctcatccggtactggaacacgtcgaactgcagggtgcccacgacgcccacgatgacctcctccaggccggcgccgggcagcttgaaaatctggatggcgccctcctgggcgatctgctccgtgcccttgatgaactgcttgcgcttcatggtgtccttgggagacacccgcatgaagtgctccggctcgaaggtggggatgccggagaacttgaatttctttccaggcaccgtcaccgtgtcgccgatggagaagatgccggggtcaaacacgccgatgatgtccccggcgtaggcctcgtcgatgatctcccgctctgcggccatcatctgctggggctgtgagaggcgcagctttttgttgccctggacatgaaaatactccgtgtcccgctcaaacttgccggagcagatgcgcatgaaggccagccggtcccggtgggccttgttcatattggcctggatcttgaacacaaaggcggagaagtcctcgctgaacacatccacctccccctggtcgctgacacggggcaggggcggcgtggtcatgcggaggaactcctccaggaacggctccacgccgaaggtggtgagggcggagccgaagaacacgggggacagggtgccgttccgcacagcctccatgtcaaactcccgtccggcccccagcagctccacctcctcccggagggcggcggccttttgtgcgccgatcatgtcctccagcgccgggtcgtccagggccacctcggcggagccgaccttcttgccccgctcctccgcctggaagaacaggatgcgctgcttctcccggtcgtagacgccctggaactccttgccggagccgatgggccagttgacggcataggtgtcgatgcccagctcccgctccacctcctcgcacagttccagggggtctttggtctcccggtccatcttgttgatgaaggtgaagatggggatgtggcggatggcgcagaccctaaacagcttccgggtctggggctccacacccttggcgccgtcaatgaccatgacggcggagtccgcggccatcagggtccggtaggtgtcctcggagaaatcctggtggccaggggtgtccaggatgttgatgcagaagccgctgtgctggaactgcagcacggaggacgtgacggagatgccccgctgcttctcgatctccatccagtcagaggtggcggcgcgggcccgctttcccttgacctcgcccgcctgggcgatggccccgccgtacagcaggaacttctctgtcagcgtggtcttgccggcgtccggatgggagatgatggcgaaggtcctccgccgggaaatttcagtgcgtagttcagacatggaatatcctccagaaaaatatcagagtatgggccatcttcgacccacggcgcacagctgcatgcggaatccggggcggtcagaccgcgaaaaacggacgggaggagtctcccgccgtgtgtattctcgaacaatgtaccatattttgtgccgctttgcaagatttcccgcagctatcccgcaaaaaatccgatgattctgtaccacagggaaaaccagcggggaccggctgatgccggtccccgcagattgcctgttccttggcgggagatcacttgatttccacgcccatggcgtcctcgtagtatttggccagtgcgcactggtcctcgtcgatcatgccgcgggcgtccatccagtccatctgctccttgacgatctccgtcatgggcagctccacccccaggtgggcggccacgtccatggcgttgttgatgtccttcaggtggacggcgatccgggcactggcggagaagtctcggctcaggagcttggggacctttccgtccatcactgcgctctgggcaaagccgcccttgatggcgtcaaaaagggtctgaggatccagcccggcctttttcgcaaaggcgaatgcctctcccatggcgcacagatggatgcccaccatcatgttgttggccaccttggcggtgctgccgcagccggagggccccatgtaggtggcggtcttacccatcatcagcaggtagggccggacctcgtcaaagacctctttctcgccgccgcacatgatgaccagggtgccgccgttggcgccggtctcgccgccgctgaccggggagtccagcagatagaagcccttctccaccgccgcggcgtggagctcctgaatcacatagggagaggtggagcccatgtccacaatggtggtgccgggccgggcagtctccatgatctccgtgatggtggccttcacgatggcgttggtgggcaggcacatgaagatgatgtcgcaggttttgtacagcgttttagcgtcgtccaggaccttaccgccccgggcggcaaaccgctcccgcaaagcgggcacggggtcgtagccatagatgtcgcagccgctcttgtcgatcagattgcctgtcatgccgtagcccatcacgccaaggcccagatatccaagtgttttcatgcccattgacctcctgttctaaattccggaaaggactgccctgttatttcctgcggggcgggatgtggaccgcgcggcccagtgcgtccagcgcacactcccgcatggtctcggtgacggtggggtgggaatggatggtggctgccagctcatccagcgtcagctcgctgccgatggcaagcgccccttcgcagatcagatccgtggcgcggggcccaatgatgtgcatacccagcacctcgccgtattccctcccggcgatgatcttcaccaggccctcgcccccgttcaggatcagagccttgccgttggcgctcatggggaacttgcccaccatgtagtcgatcccctgcgccttggcctgctcctctgtgagacccacagaggcagcctccggctcgatgtacacgcaggtgggattggtggattcgtcgtagtgggcctccatgccgcagatattctccgcagccacctcgcccatggcgctggcggtgtgggccagctgggcatagcccttgacacagtcgccgatggcgtacacgccgggcacgctggtctccatcttgtcgttgacgatgatccggccccg

SEQ ID NO: 4961 - DNA, 8051 bp, Unknown
  gut microbiota DNA sequence
tgcggtataaggaacgctttccataaagcagcggcccgcaaactgcgggccgctgctttttatcagggcagagagacctgggcaatcaggtcccgcacaacagcactgcctagcagcagaccggctgtggcgggaacccagggattgctggcgggcacactgcggcggccggggggcggcgcctccggctgggcgggagagacgggcttctccgggctgaacaccaccttcagatggtgaatgcctctggtccggagttccttgcgcatcacccgggccagggggcagccataggtcttggagatgtccgttacctggaggagggtgggatccagcttgttgcctgtgcccagggccgcgatcagggggatgttcagcttcagggcagtctctgccagatccagcttgcaggacaccagatcgatggcgtccacgatgtaatcgtaccggcagccctccgggaagaagcagtcccgatgagcggcgtcatagagaccgtggacaggatggagctctgcatccggattgatgtcccgcagacgggcggccaccgcctccgccttgggctgacccagggtggagtggagggcctccagctggcggttcaggttggtgagggcaatggtgtcgctgtccaccagggtcagctcgccgactccggaccgggccaagcattcggcggcgtagctgcccacgccgcccagccccagcagcagcacgtgggcccgagcaagccgggcctgggcctccgggccccacagcatctcgttgcggagaaagggatgttccataacggacctccttgttgcaaacaggtggaaaacgtccggctttgaaatttcaaagccggacgtcttgtgttgtgaatgggaatcaacccacaaagctcatgccgaaggaggactgctccgcagtatagccctcggtcttctcctcgtagaacgtatccacggcgtcattgaccagatctgcggacacctggatctcccagtagggctggtcatagcccacgaagtacatgacgtggtagccggtgctctcgttgtgaatgatgccggtgtcgccggtctggcgggcgggatcgaagcaccagtcgttgaactccgtcaccatctggccctgatagacctgctcatacaggccgccggtggtgttggacccgggatcctgggagtactcattggccagcgcggcaaaggagtcctcggtggcgtcgccggccttccactcgtccaggatgtcctgggccttctgcgcggcctcggcgtccttggcggccacatcgtcctcatagccctcgtcatcctcggagagctcggaggcctccggctggatcaggatgtggcgcacgttcaccgtgttgtattcgttgcgggagcggccgttaaagaccaccacatagtagttgctgctgtcgctgtcctccagcacggcggagtcgccggcctgccgggcatcgtcatacagccattcacccagaacagaggagctgtacgagaagctgtcagaagaggcataggtggcggtggactcatactctgcggctgcatcctccagagaggtgcccgccttgtaggcggcgtagatggcatctgcggtggtcttggcagcggccatggcctccgccttcatctcgtcggtgacctcgatggagttgccctcttcatctgtatcagctgcggcgccgttgacgcggacatacgcacagtccaccagatcgtaggcggtccggtcctcctgataggcggcctccagctcgtcggtggagtaggtcagactgtcctgataggactggagataggcggtggccagcaggctgcgccgggtctgctcctcatagatgctgcgggtcatggtgctgccgtagatgagacccagatactgcttttccgtatagccgtacgtgctggcagcggaggcaagggactccatggtgtcgtccaggtcggcctgcatctcgtcgttccaggtgaagccctcggcctctgcagcggcattcatggcctggacgccggccaactgctccagggccttgtccgcgaagtagtcgtaccaagtctcgccctcggtggcgtcggtgacgaacatgacggcgctggaggagatggtctggtccttcaaggacgtgccggtgtccagcccgatcatgctcagaatgctgtaattgccgttgacaaagttctgatagtagttctcaaaatagaagttgacctcagcggcggtgtacttctcaccgttgacggtggccgccgtagccgtcttgggaatgatgttggacttccagatgacggcggcaatggcgattaccaggaataccactccgatggtgccatacagaaggttggtgctgtgctccttctggcgttgcttggcctcccgggcggtcttgggatcgttccagccggagccggacaggtcctggcgggtctttttttctcttgatgcgctcatgtgtgtttcagtcctctcaagtattcaggtgcaaggtttgcaagaaaccggaaattacgcactttgatattatactggatatggccggattctgcaagagaaatttgcggaatccccgccgcgatccggcaggatcggcaaaaacaggggattttttggctgatccgcaaaaaaaagcggagcggccagaccgccccttcagaaaacgtgccccgcgagagccgtgtaggcccgttataacctgcaccttcacggccaggtgggttgcctccaacgcgctttaccacttccaacttccagccgcagacagcagccgggaggcctgcgaaccacgcgctgatccggcatcccgtataacgaaatgtgggttaaaaaaagacctatcacaaaccccgcagggcacatattcaccgtatcacatcccggcccgggatgcaagaggaaaccagcggacccggagagaaatttttgtatggagtgtcaggactctccgtcctcgtcgaacagggactccatgaacaggtcatagaccgcgtccagttcctcgtcggaatccagcgtggacagcagatcctccccgtcctcgtggaggaccttcaggatcaccagtccattgtccggatcctcatcctctccctctgtctccgcagggaagaaagcctggtactgctggccgttgtattccagcgcgtccacaaactccagcacgatctcgcggccgtcctcgtctgtgactgtgatgaaagtggggccgtactcatccgccatggggcgtcctccttctgtctgtattctaggggtattgtaactgactttccagaagattgcaagggggtgaacttttggaaatgtgggaaactggggcgctggggatggatttatcctgcccaaaagcagaaaaaccatgcggataagaaactttttttcggtaaaatacgacattttcgatattgacatgggatggtacaatagaacatattatggaggactctgagcctctgcggccgcagacaggcggcgcggcagactgcttttgcagaaaattcaaattcaaaagaaggaggtgctctgcattggaacgcagaagacgggagggatcccatgagatgatcccccgccgggaacccagacagcagaaaagcaccaaacgaacgggacacaaggtcgtcttcatcctggggacggtcctgctggtgggcatctgcacagtggcgatgcttgccgggctttttatgatgtacgtccggaccacactggcccctacgctggaggtcaacgccgacgactacaccatgaatctcagctccatcatctattaccaggacagggacaccggagattgggtggaataccagaccgtctacggcacggaaaaccgcatctgggtggactatgaacagatcccggacgcgctgtggcaggcggccgtagccattgaggaccaccgattctttgagcacaacggcgtggactggacccgaaccgcctccgccacgctgaacttcttcaccggcagccgggccaccttcggcggctccaccctgacgcagcaggtgctgaagaacatgaccggcgacgacggcaacaccatcaaccgcaaggtgcgggagattttccgggccctggagttcgagaagaactacaccaagcaggagatcctggagatgtacctgaacaccatctatctgggacagggctgctacggcgtccagaccgcgtcggagttctacttcggcaaggatgtgtcggagctggatccggcggaatgcgcctgcctcatcgccatcaccaacaacccctccctgtatggtcccatgtccaccatcaccatcacccgggaggacggcagcaccgtcacgccccgggagctgaacaaggagcgccaggagatgatcctgacccggatggccggcggcaatgacgatgtgggcgtcaccgggctcacctatctgacagaggaggaggccgaggccgccaaggcggaggagctgcatttcacggacggcaccacttccgctcaggacattgtcacggaggctaccggcggcgccaatgtcaactcctggttcgtggaccaggtgctgcgggatgtctccgcggatctggcggacctgtacggcatcaccgaaaaagaggccctgaaccggatctacaacagcggctacaacatctacaccacgctggacccgaagattcaggagattgcggagtctgtctacgaggaccgggggagtctgaacaacctcacctccgccagcggacagctgatccactccggcattaccattatcgagccctccaccggcaacatcgtggccatggtgggcgatatgggacccaagtccggaaacctgctgtggaactatgcaacggatatccagcagccgggttcctccatcaagccgctgacggcttatgccccggcgctggatgcgggggcagtctccccggcaaccacctttgacaactacccggtccgcctgctgaatgggaatccatggcccaagaactcgcccaacacctacacgggctggacatccgtgcgcaacggtgtcaaggcatccatcaacaccatcgcggtgcagacactggaaaaggttggggtcacggcggcctaccaattcgccaccgaaaatctggggctgagtctggcaccggaggatatgaacgtcagcccgctggggctgggcggcctgacttacggcctcagcacggtggagatggcggcggcctacgctgctttcgccaacagcggtgtgtacaatgagcccaagacctacgtaaaggttctggccaacgacaactccaccgtggtgctggaaaaggagacggagcagcgggtggccatgaaggagaccaccgcctatctgatgacggacatgctgcgccgggcggtgaatgagtccggcggcaccggcggcggcgctcgattcagcgggatgcacattgcaggaaaaaccggcaccaccaacgacaactatgaccgttatttcacaggctacacgccgtattactgcgcggcggtctgggtgggctacaagaacaacgagcggatcagctactccgtgaacccggcggcctccctgtggcggcaggtgatggagaaggtccatgcggatctgccggacaagtccttcaaccgtcccagcagcggcctgacaacggtcagtgtctgcgcggacagcggtatgctggcgacggatgcctgccgcgccgattccagaggggaccggacggtatcctatgaggtggctgtgggcacggagcccacgacggagtgcacgctccacaagatggtggacatctgcaccgagggtaactgcttggccggtgagttctgcccggcggagtccatcgtgcagaagggctatctggactatgtgcgggaggattacggcgagagcatcactgcctccgacgacgcctatctcatcagcaccctggaaaaggcagtggcccccacggagaccagccccggcggatgtcccgtccacacgtcggctgcagttacggaccccgatgacccgaatggggggctggatcccagcgatcccaactggcagccgcctgatcccaacgaccctgatgtgcccatagatccggatacgccgacagaggacccctccggcggcgattccggcggcggagaccagcctacggagccggatcccaacgatcccagcggcggctttggagacgccggcggcgattggtggagcggtttctggggagacaacacaggaacatgagaaagcggcccggcgattgccgggccgcttcactgtgtccagtgggaagttacaggttcttctcgtaggactcgatcatcttcttgaccatctggccgccgacggagccggcctcacgagaggacaggtcaccgttgtagccttccttcaggttgacgcccacctcggcggcagcctccatcttgaacttatccatagccgcacgggcctcgggaacgttgatcttattgctattcttgctagacataattgaatctccttttcatcatacatttgttgcgtgtgggttactgggtatcgcgagcatagtttgactccgggacgggagaatatgcggtttttctggcggaaaaatttgttggcagggacgtcttggagaaaaatgtcatagatttgttacccatcggaaaggcggattatgatataatctcaaaaaaacaaagggaggcactggcgatggagggcatctgcgggcgaatgtgcgacgcatgtacctggaaagagcagctggactgtcccggctgtcaggatgggccggggcgccggttttccggcggctgtcccattgcggactgctgccgggagaaggggcatacggcatgtgtgacctgcaccttttctaccggctgtgccctgcggcgaagagatatgccccagaaccggctgtgggccgtggaggcagagcgggagcgccgggcgcggctggaccggaatgcccctgtgctggccaagtggctgtggctgctgttctggctggtgactcccagtgttttcagcaacattctgaccatggatactgtggcgggagcgtttccaactgccggagtcgttggaaatgtgctggcatttctgatttccctggcctatggtgtccttttgtggcagctgcgggaggcggcaggccggtaccgcacggcggccctgtgctatttggctggcggcatcatcagcggtgtgctgctgcttccggcaattccggaggggaactggctgtggtggctgctctccctgccggtcatggtgctggagctctgtgccgcatatcaggagttttatgcccatgcagaggttttggaggagcttgacccggagctggcggggaagtggcggctgctttggaaatggtggatcggcctgctgctggggttgtttggatgcatcttcctggcattgatttcggcaattctgggtcttctggcgatactggcggacgccatcggcctgttggtggtggggatcgtgaagctggtctatctctaccggacagcaaagcggttccgggaatatcagccggcggcactgcagaaggaggttctatgagattattgttcagacagcggctgttctcctggtttgacagctatgacatctacgacgaggcggggaacaccgtctacactgtggagggaaagctggcctggggacactgcctccacattttgaatgcggcgggagaccacatcggcactgtgcgggagcaggtgctgacctttctgcccaaatttgaattgtacgtccaggatcagtatgtgggctgcatccaaaaggaattcacatttttcacgccgaaatttgacatcgactgcaacggctggcgtgtggagggcgacttcctggagtgggattaccgggtgacggaggcctgcggggcgcaggtggcgtccatccacaaggagctgctccactggacggacacttacgtgatcgacgtggcggacccgggcagcgcgctgtgcgtactgatgctggtgctagccatcgacgcggagaagtgctcccggaactgagcgccgcccaagaatgaatgtaaagcacgccgccctttcgggcggcgtgctttacagactgcgg

SEQ ID NO: 4962 - DNA, 831 bp, Unknown
  gut microbiota DNA sequence
agatcacttcaccgcatcggccaacgatgcctttgctgtgatccgtattactgccagggacaacacagaggaatgctgccacgaagtgctggactacctgtgtgagattctggagcaggaggactttccccgcagctatgcggtggagttcaaagggccggaaaagagctatcttcccatcacaggactgcccaaaaagggagtaaaccagctctttgcctgtgccgtgcagtaccctggcctccaccccctgatggaacggtacgcccggcttgccatgcggcaatatgagcagtacaccaatctcagcgatgagcagtgcgcgctccccggaagttttgccgtgttcgccctgggaatgctggggcaagaatggtggcaactggtatgggattatctcgatctctgcgatgatgagcactcccacttacaggaaaaattcctccgggagtatgtgaaacagttcagatttaccgctgataccgtccctgtatttgtccgtggggtgctgtccatgcagaacatgaagtattccaaggactatgccgcgtggatggcaaacgcagaaagcctggacgctctgctggaggcaaaaatccatctgtccgagatcgttccaagcggtttttcctccgacgaggatgacgatgatgacgaggacgaggaacccgacgaggaaacagaagccagcccggaggaagtactgcaatacgcatgggaaacggtctgctatgtgatctggggcaaagccagcgccaagggtggtcagaaagtggtggaagcagctccggaggagctgagagaacaatatcagaaaatttttcaatagac

SEQ ID NO: 4963 - DNA, 504 bp, Unknown
  gut microbiota DNA sequence
ccggtcgttggcaaggccggcagcctccaggttcaggctggcggtgttggccttccggccgatggccaccagcaccttctccgcctcaaagctgacagtcccgccggccttgttcttgcagaccaccttggcgcccacgggagaggcctccacggcctgcaccgggcactccaggttgaactccatgcccatcttcttcatgtgcttcacgccgatggcagtcaggtcgccgtccagcatgggcagcatgtggtccagtgcctccaccacggtgatcttggtgccgaaggccgcgtaggcgcaggccagctccaggccgatgacgccgccgccgatgaccaccatgctcttgggcagcttctccaggctcagcgcaccggtggagtcgatgcagttgggattctccttcaggccggggatgggcggctgggagttgacggagccggtggccacgatgatggcgtcggcggtcatctcctccacggagccgtcggacttcttcac

SEQ ID NO: 4964 - DNA, 182 bp, Unknown
  gut microbiota DNA sequence
gacagtgtatgaaaatatggcgttcccactgaagctgcgcaagcgccctaagagcgagattgacaaagctgtacgtgaggcggcggagatcctagacattacgcagtacctggaccgcaagccaaaagctttatccggtgggcagcggcagcgtgtggcgattggccgcgctatcgtacggg

SEQ ID NO: 4965 - DNA, 541 bp, Unknown
  gut microbiota DNA sequence
ctgtgaaagcaatttcctgaaaggagtgtgggcgcatgagccgaattgttgatgaaccctactttacatacagtgcatacaacgccctgacctctggcattcaggtgaaatgccccaagtgccatggcgcaggtgtggtgacagcggatgatgacaacgcctatttccggtgcctgagctgcggccaccggatgacgcaggatcggacgatctaccgttatgatgtccatagccagtgcaaaaactgcggcaggtactaccgagtggatattgaagatacggcaaagcagcattttcccgtcctccatgtgacctgcccctattgcggaacaaccatgtcgggagaagttcataaaacagcggaggcgttttcatatattggcgaaatcagagatggacgagaaccttatttcgggttggaactatggtttttgacttcatttcagggaaaacctgtatgggcactcaaccgagaacatcttgcctatctgatcggctatctcagcgccggactgcgggaaaagccgccgggaagagcgaa

SEQ ID NO: 4966 - DNA, 3938 bp, Unknown
  gut microbiota DNA sequence
cgagtgcctctttgcacgtggtacgcccgactggattcgaaccagcggccttcagagtcggagtctgacgcgctatccaactgcgccacgggcgcatacctaaactatgttctattataacacgggattttcaaaattggtagtcaaatagtagtcaacggaaacagaattttttctctctgcccgttaaaaccaaagactcccaacgctttgcgccatctctcaactgaacgagcctgaaatgtcggagtctgacgcgctatccaactgcgctacaggcgcatacatcaacatcttcttcaaacagcttatttagtataccaacatttttccgctttgtaaagcttttcttgaaaaaatttttcttaaaaagattgttaaaaaaattgacaagtccctgattttggtctaaacttaattgagaatgatttaacaaatagcaaggagtgacttatatgcgaaaggaaaacatctccgacgccgtgatacggcgtctgcccagatattaccgccagctcacagacctctgcaaccgcggcgtcgtgcgcatctcctcacactccctggggcaggagatgaacatcaccgcctctcagatccgccaggatttcagctgtttcggtgagttcggccagcagggctacggctacaatgtagaagaactgcgggccgagatcggtcatatcctgggcgtggacaacaaccaccacctcatcatgatcggcgttggcaatctgggccacgcactgctgcagaacttcccattctcccagagtgggtttacggtggacgcagcctttgatgtctcccccgccgtgatcgggactgtggtgaataatgtgccggtatacgccatgtccgagctagatcacttcctacaggaccacccggtggacgtggtggtgctgaccattccccagtccgtggcccaggacaccgccagccacctcatcaatctgggcgtcaagggcttttggaactttaccaacattgagctcagcagtcagctcccggatgtgcagtttgagaacattcacttcgcagacagcctcctgaccctcagttaccgcatcgccaaccgctgacgctccagcgtggaagggaatcatctatgacaaggaagaccaagactgccctcatcaccgtctgcctcttacttaccgtcaccgttgtgtacgccttggccgcggccggcggggcctccgatccgctggcctccctctcctatctcaccggcactttcaccgatgcggtagaccagcgggtggaggaaaaactggacgcctctgaccaagcgctgctgaacggagacgcggctccttccgacggcggggccgccacgtggatggagacccgtctgaaggcaggcgacgccctgaccggctccaccggcacgggcgtcctgttgctggcgggcggtatgcaggtcacgttcaactccggcgctgtggtggatgtcaccacagggaccatcgttaccagtggcagtgcccttacagccagccaccggtatctggtggctgaggaaaccaccgccgtgtttaccgtcacctccaagacggcggttgtggattatcagggcccctacgccttcagctactccaccaacacggactacaacgccattgctgtcgcgctcaagaccatgcacctgtttcaaggcagcttcaccggctacggagatggatatgacctggaggtcgcccctacccgcctgcaagccctcatcatgttcatccgcgtcctgggcgaggagaatgatgcgctggcctacaccggctccactcccttcacggacatcacctccgggacccagagcgagaaatacgtgggctacgcatacagcaagggctacaccaacggatactccgccaccaccttccggcccagccagacggtgacagccagccaatacatggagttcatcctccgggcactgggatacagctccgcggacaacaaggacctctccggcacactgaccaatgccttgaccaatggcgtcatcacggagggcgagctggccgccctgcagggcggcacgttcctccgtgcggatctcgcatacgtctcctactacgcgctggatgccgcggtgtccggcagcaggcagacactgggagacacgctgatggacaagggcgtcttcaccgtgcgggagaaacaggcggccgacgcactcgtcaccagcggccggaaataaaaccggaacccctttgccggtccggcatactatggattgagaccggttcggtcggtctacgatttcataggaggttccggtatgtgcaataacggctttggcggcggcaactgctgctggatcatcattctgctgatcatcatttggtgctgctgcggcaacggcagctggggcggcaacggctgcggctgtggctgcaacaacaactgcggctgcaatcccaatccctgctgctgagatttcataagataaccagcgccccgggccaaatggcccggggcgttttccacttcgctgttttttataggcgcttacaggatccccaggtgctccagaagaatctttccacccagaaggatcaggatcacaccgccggcgatctccgcccagcactggaggcgggcgccgaaaaaggtcccgatcaccacacccgccagggagatcacaaaagtcgtgcagccgatgaccgtcacagcaggcaggatgtccacgttcaaaaatgcaaacgtgaccccaacagccaatgcgtcgatgctggtagccaccgccatcagcagcagctgcttataatccagcgtcacactcaccgcacaggccgtctcctccgcctcccctttcaaagactcccacaccatcttaccgccgatgaatgccagcagaaaaaaagccagccagtggtccagatgttggatgtacccggcaaattgggcgcccagcagccagccggcatagggcatcagcgcctgaaatccgccaaaaaacagcgcaatcacagccgcatagcgcagattcagttttggcatacagagtccctggcacaccgctacagcaaaggcgtccatcgagagccccacgccgatcaacagcaattccaaaaatcccatattgccgctcccttataataccaccggcaccggctggtggatagttaaactgtccggcgtcaccaggcagtcataggcgtacacttggacaccccaggcagctgcctcccgaagggccgcaccgaaggccggatgggtggcgtcgttgggagagaagcgatccacgccgtgcatctggatcacaaaaaacagggtagcgcccattccctcccggacagcccgctgtaactcgtgaatatgcttcacgccccgttctgtcggcgcgtccggaaatcggacaacaccgttttcctccagggtaacacccttgacttccaccaggtgcagcccggcttctgttgtcagcgcaaagtccagacgggactctccataatgatattccggttgaatggactttagatctggcaggaaatgtccttgggcggcccactcctgaaaaacacgatttggggcctgcgcatccatattgatcagcaaggcccctttctccacggcgataaggtcatacgctgtctttctcgcagaatttgcggccttttccagatagaccgctgctcccggcaccagcaactcccggcagcgtccggtgttttttacatggcagatctgcagcccgtcttctgtctccacatgagcgataaaacggttgggccgccgtagaaatcttcctttgaccacttgatgatattgcaaaacgatgcctcccatgcgacgaaaaaaggccacatcaaacgatgtggcctctcagtgttggcgctacctatcttcccgggccgtcgccagccaagtattgtcagcaggaacgagcttaactgccgtgttcggaatgggaacgggtggaccctcgccct

SEQ ID NO: 4967 - DNA, 5693 bp, Unknown
  gut microbiota DNA sequence
acgccatcaaggtggctgttatcggcaagcccaacgccggcaagtcctccctggtgaacaagatcctgggggaggagcgggtcatcgtctccaacgtggccggcaccacccgagacgccatcgactcctactttgaaaacgatcagggcaggttcgtcttcattgacaccgccggcatccgccgcaagtccaaggtggaggaggacatcgagaagtactccgttctccgggccaccctggccattgagcgcagcgacgtgtgcctgatcctgatcgacgccaccgaaggcgtcaccgagcaggacaccaaggtggcgggcttggcccacgaagccgggaaggccagcatcatcgtggtcaacaagtgggatctgatcgaaaaggacggcaagaccatggacaagatgcgggaagaggtccgcaacggcctggccttcatgacctatgcccccatcctgttcatctcagccaagaccggccagcgggtggaccggctgttcgagctgatcgactatgtctccaaccaggccagcacccggatcaccaccggtatgctgaacagcgtcctggcggatgcccagacacgggttcagcccccctccgacaagggccgccggttgaagatctactacatgacccaggtgggcatccggccaccccactttgtggtgttctgcaacgacagccgcctgttccacttctcctaccagcggtatctggagaactgcctgcggaacacctttggcctggagggcacgcctatcaccctctccatccgccagcggggcgagaaggaggggtgagaatgggcgcagtggtatggtttctcatttcccggatggaactgtggctggtggctgcgatcgcctacttctgcggctgtttcaatggggcggtcattatttctaaatacatcctgcgagacgatgttcgcaggcatggcagcggcaatgcaggattaaccaatttttaccgtacctttggtggaccgctgacttttgtggtaatcttatgtgatgtcctcaaagccgtaatagcggttctgatcgcggctcacatcggcggcgggtttgatcccaggatgatgccggatatgccgctgagtacggagatgacggtctattatgtggtcttgttcaaatactgggctgccctgttctgtctgctgggtcacatgtttccctgcatgttccacttcaagggcggcaagggcatcctctccggcggcaccatcgtctggatgatcgactggcggatcggcctggtggtctgggtgggatttctgctcttattcctgctgacgaagtatgtatctctgggatctgtctgggctggggccagcttcccttttgccacttggtatttctatccggatccggtcatcgtgctcctggcgtttctcctgggagccttgattttgtggaagcaccggagcaacatcgtccgccttatccatggcaacgagaataaattcagcgtacaccgcaaaaaaaattaggaatgcggcatggtgcggtccggcagagccggacaaaatggaattgtttcgccataggcggaacagctcgatttctaactccggattcctaatttgagggggaggaatacagatgaaaacagttgtattgggctccggcggctggggcacggccctcagccagatcctgtgcgacaacggacacgagacctatctctggtcccacagccccgccaaggcggcggagatggcccggacccgggagaacccgcttttgcagggcgtccatctgccggaatccctccacatcaccggggatttggactgcttgaagggcgccgacctggtggtcagcgcaccgccctccttcgccgtgcgggagacagcaaaaaaaatggccccgtatctcacggagaagactgtggtggtgtccgtttccaaggggattgagcgggacacaaatctgcgtctcagccaagtgatccaggaggagacggagaatatctgtaaagtagcagttctttctggcccttcccatgcagaggaggtggggatccgcctgcctaccggctgcgtggccgcctgcttggatgtggatgcggcgcgttttgtgcaggacgccttcatgaacgactacttccgggtgtacaccagcggcgacgtcgtgggcgtggagctggcggcggcgctgaagaacgtcattgccctcagctgcggtgtgtgcgacggtctgggctatcaggacaataccaaagccctgctgatgacccgggctatggcggagattacccgcttgggggagaagctggggggctcccggcagaccttcggcggcttggccggtatgggggatctgatcgtgacctgcacctccatgcactcccggaatcgccgggcgggcatcctcattggccaaggcaaaacgccccgggaggccatggaggaagtaggcgccgtggtggagggatacttcgccgcggagagcattcaccagctcagtgagcgggtaggcgtggaaatgcccatcagccgctgtgcctacgaagtcctctatcagggcaagcagatccggggcgtggtagcggagctgatgacccgggccaagaaggatgaactgctggagacggcgtggctgtgaggggggcacccggccatgcgcgttcctgcgcagagagaaagggtaagagaccggagggatccggtctcttattgtttctgatcgcgactctcagttttgaagatgaaatgatcccggtgaggcatcttggagggcactcaccgggatttttcagattcaaacaggaaagcgtactctcagacaatatccagcagctcccgcaggtcccggatctcatagtcgatccgcaggtcctctggccgggcctttccagcaggattgtaccagcagcagggaagtccggcattgttggcgccctggatgtctgtggagagggagtctccgatcacgagaccgttctccggcgtcaggccgggtatgcgggagcggacataggcataataagccgggtccggcttggaggctccggcgtcctcggaaataaaggcgtccgtgatgagagctgcgaacacactgccctgcaggcggctgcgctggacggaggccacagcgttggtgacaatgtacagcttgtgcccccggcggaccagttcccggcagaccgcctccgcgtgaggcaggggatagaccccggcacccagggcagtgaggtaatcccggttgcacttgtctgggtcccgcggcagcttcaacgcctgaaaaaagcgcacaaaacgctccaacgtcacatagtccttggagacctctccccggtcaaaggctgcccacagctcctggttgatccggtggtagagggcgcgggtatccagcgtatccggaacgccgttgctccggcacatggcagaaaaggcacgggccgcggcttttggaaagtcgaacagggtgtcatccgcgtcaaagagcagatagggaaatttcatggtgagaactcctttcgggagagtttgaccacatgtatcgtatcacatccaaacaggaaaggcaatcaccgccgcccccgccgtgcataccatggcttgagggggaatgccggatgaacaagacctttggcgtgatcggcggagatcggcggcaggcagagcttgcacggctgctggcggaggaagggcgcacggtctggaccagcggagtggccggatgcccggatctgcctgcgcaggcagcggccgcggacgtggtgatccttccgctgccgctctgccgggaggacgggatactaaacagtgagacggaggatctgcccaccagtgcgctgttccgccgtttcagtcccggccagctgttgctggcagggcaggttcgtcccgcccagcagatagaggctgagaactgcgggctgacgctggtggactacttccagcgggaagagctgaccgttgccaacgcggcggccacggcggagtcggccctccagatcgctatggagcatctggaccggacgctcctggggatggagtgtttggtgctgggcttcgggcggatcggaaagctgctggcctatcggcttcatgggctgggcgcccatgttacagtcactgccagaaaaccgtcggacctggcttggatccgtgcctatggctggcaggcgctggagaccggacgcctcgatggtgcgctgtgtgacttcggcgccgtgttcaacacggtcccctcgcccgtcctgggccacctgctgctggcgcagctgccgaagggctgcctgtgtgtggagctggcctccgtccagggcatcgacctagctgctgcagaggagctgggactgccccacgtatgggcccgctccctgccggggcggatggtgcctgccgcagcggcggtggctatccgggacgcagtcgactacattttaaaagaacgaggtgaccctgtgtgagaaaagaacgggtcggatttgcgatgtgcggctccttctgcacccatgaaaaggtgctggcggagctggagaagctggtgcagctgtatgagacagtcatccctatcgcgtcggagatctccgccttcacggatacccgcttcgggacctctgatgacctgatggagcggttggaggatttgacagggcatgaggtgctttgtgacatcccgtctgtggagcccatcggtcccaaggggctgctggatgttctggtgatcgccccggctacggggaataccatagccaagctggcggcgggcatcacggatacggcggttacgatggcggccaaggcccatctgcggaacgggaggccggtggtgattgccatggccagcaacgacggcctggcggctggcgcccggaatatcggggaactgctggtgcggaagaactactatttcgttcccttcgggcaggacaacgcccgggcgaaacccagttccctggtggcggacttctccaaaatcccggagacggtggaagccgctctgcgaggcgaacagatacagccgctgctgctgcgatgagggaagagacgcgggaatcaaacccgcgtctctttttcgcagctttatttaaactggataaaatcgacaaaagaagcgtgttaaatcaatattaacaataagtataacttatgatagaaggagtctcatcagtttgagtacttattaagcacgaaaaagaaggtgaatccggaaaacaagagaaaaaaatgaacaaaagcagaagaagagggttgacttttctggcaagctctggtattctaactaagctgtcgggcgtgagagtgaaacaccaaaacgcagagcttcaagaaaaaacttgaaaaaatgtgttgacaaagtaagaactttgtggtaaagtaaatctcaccgccgggaacggcgtgcaccttgtaaattaaacaatgtaacgaaaaggaagcaccagaaggcgagctcatttagatgagtttgccaaaggacaaagccgtctcactgggttgagtcaattaccggtgggatggagaaatgaagctatgacaaatagctctatgaaggtttgaacggactacggttcgtttagataccattttatagagagtttgatcctggctcaggacgaacgctggcggcgtgcttaacacatgcaagtcgaacggagcacccttgactgaggtttcggccaaatgataggaatgcttagtggcggactggtgagtaacgcgtgaggaacct

SEQ ID NO: 4968 - DNA, 263 bp, Unknown
  gut microbiota DNA sequence
gccgtcaaagagttcggagggaaagacctccacgccgccatccagagcgaaccggttgaaggcggggcctttgaggaatcccacgcagctggggcagcaggtggcagtcaggataccatccagccccaggaaccggagccgctcatcccggccatccagcaccaaaatatccaccatccgcccgccgcagtgggggcatgtgtcctcccgtgcccggccaatgcggacgggagatttctcgccagtggttcccttgaccatag

SEQ ID NO: 4969 - DNA, 23932 bp, Unknown
  gut microbiota DNA sequence
gcttggcgaaaagactttttcgacaagctgagtctgtattgcctttcgacaatacagactgtaccaaagaaatctttccacattctttctgaaatctaacagttctgaaagatttgggatgtccgggccggaacgcgccgccttctacgtcctctcctccgccctcggcaggaacagggagaaggtgctcccctccccggggcggctgctgaccttcaggtatccgccctgaccggcggcgatctggcgggccagatacaagccgattcccacgccctccgcctcgctggcggagagggagcggtagaaccgctggaagatcctggcctgctcggactccgggatgccggggccggtgtccgtcacgtccacgcggcagaacagctcataccccacggcccggagggtgacggcgccgcccgccggggtgtatttcaccgcgttgtccaccagattatacagggcctccgccgtccacttggggtcgaaccgggcggtcaggtccgtgggctctaccgtcagggtgatcgctttggcctccgctccgggagcggcctgggccgaggcggcatccaacagctgttggatgccatgacgcttgggcgtcatggcaaggacgccgctctccagccgggaggttttgaccagcgcgtcgatgaggaaccgcagcttctccgcctgatgctccagagcggagacatactcccggctctccggcggcaggtcctgctcctccagcagctgggcatacagcaggaggttggcgatgggagtcttggtctggtgggagatgtccccgatcagggtcttaatggcgtccttctcctccgccagatttttggccgatacggcggatgcggagagatagtgggccatccgggtctccagggcggagaggcggctctcgtcatagagggactcccggaactcgccccggatggcgtcatccagcatcttgcccagagtgtccagcatccggcgggtccgcaggcgggtccagacggcgaatcctgccgctgccagcagggccggaaccgccagggccagcagggtgtattccactgtcatgtcagttcaccgcccatgtgtagcccaggccgtacacggtcttgatatagcggggcttggacggcatgtcttccagcttgtcccgcagccgcttcactgtgacggagagggcgttttcgtccacatactccgccccgtccgtccagatccggtccaccagggcggcccgggtaagggtttggccccggtgctccaccagcagccgcagcagcttctgttccgtcttgctgagctccaccggaacgccgttccgggagaactccatccggccgaaatcgaaggtgaagccgtccagctgcacccgttccgcccggggggcggcggtccggcgcagctgagtattcaccctggcccgcagcaccgccagagagaagggcttggtgatatagtcatccgcccccagctccagacctgccacgatgtctgtctccaggtcattggcagtcaacaggattacgggaacctcactctcccgccggagggcacggaggaggtccagtccattgccgtcaggcaggttgatgtccaggatcagcagatcgaagctccggcgggagagcagatccccggcatccgccagggaccggcagagctgggggcggagctccggcgcctggagggccaggcggataccctcgcccagagtcgggtcatcctccacgatcagcaggtctttcatcggggaacctccttgggatcaaactgcgcccagtataccacgggcggccgccgccgtccagagcgggcagaagaaacgcacggcggacaggccgccgtgcgtgggtcgcgggatcgcgggtcacagggtcagggagggggcggcataggtccgggccgccagctcctggtccagcatatagagccccttggggtccgagccgaacagctccatcttcttgatgagatcggtggcgttggtctcctcctcaccctgctccttcacgaaccagtccaaaaactgcatggtgcggaaatccctggcctcgtacgcggcttcatagatggcgtggatcagggaggtgacatactgctcgtgggcgagaccggccttcagggggtccatgttggctttcagctccgcatccggtttggcgacggcctccagcgttacgggcacgtcgttgttctggagatactggagcatcagcatggcgtggtcccgctcctcctgggcctggaccttgtaccagttggcaaaaccggcaaggccctgctccacatagaaattggagaactggagatacagatacgcagagtagaattccttgttcacctgatcgttcaacagctgggatactttttcgttcagcattgtatgcgcttcctttctgcagcggacgaaatgtccttgtttgttctatctaaccattatatcacggactgcagaaaatgcaacggcagccgggaaaaaagcggtggacgggcgggaggcgctgtgctacaatgggcgtgctgcaaagtccctttttgggaaaactttaacgggaaccaaacggcaggggccgcctttttacagaccggcgggcccatccgtgttatcatggtcctgctgtccacgggcggcttctgataaaacggaaagagggatcgctgtgttcatgcgcagaaaaaaccacatggcgccggcgcggatcatcctgatcggctttgcgctgctgattttggcgggagcactactgctgaccctgcccatctccacccgggacgggcagggcgccgcctttttcgacgcgctgttcaccgccacctccgccacctgcgtgacaggactggtggtccaggacacggcgctgtactggtccggcttcggccaggcggtgatcctcatgctgattcagattggcggcatgggtgtggtgaccgcggcggcggccatctccatgctggccgggcggcggatcgggctgaaggagcggtgggtgatgcaggagtccatctccgcaccccaggtggggggcatcgttcgccggacccgcttcattctggcggtgacgctggtcctggaggggacggggacgttgctgctggctctgcggttctgcccggagatggggctgttccggggactctggtacgcggtgtttcatgcggtgtcctccttctgcaacgccgggttcgacctgatgggggcggcgggcacgcccttcgtctccctgaccggctatgcgggggacccactggtgaatttcaccgtgatggggctgattgtcctgggcggcatcggattcctcacctggggagacgtgcgggagcacaagtggcacctgcgggcctactgccttcagagcaagctggtgctggcggtgactgcggcactgatcctgctgccggcgctgttcttcctgctctatgagctccggctgccccagtggcagacgctgaccctgggggagaaggtccagggggcgctgtttcaggcggtcaccccccggaccgcagggtacaacaccctggacctctcccagctgagcgagccctcccggctgctgattacgctgctgatgctggtgggtggctcccccggctccacagccggcggattcaaggtcaccactctggcggtatttgtgctggcggcccgggcggtgttccgccggcgggcggatctccagtgcttcggccgccgcctccccacggagacactgcgcagcgccgcggcggtccttatgatgtatctggggctgtttctgctgggcggtatggccatctgctgcgtggaggacatctccctggaggcggcgctgtttgaaaccgcctccgccctcgggaccgtggggctgacgctgggggtgaccccgggattgggcggcgtctcccggttgattctgatctttttgatgtactttggccgcgtgggcggcctgacgctgatctacgccgtcctgccggacagcggcgccgccccggcgcagctgccccaggagcgggtcactgtgggctgagcggtacgcttgagaaaggacgtgtgaggatgaaatcggtactgctgatcggattgggccgcttcgggcggcacatggccgccaagcttcaggagctgcaccacgaggtgctggcggtggacaaaaacgaggagcgggtcaacgaggcgctggacctggtgacccacgcgcagatcggggacagcaccagcgaggcgttcatcgcctccctgggggtgcggaactttgacctgtgcgtggtggccattggagacgacttccagagctctctggagaccacggccctgctgaaggagcagggcgcacgcttcgtcctgtccagggcggcacgggatgtccacgccaaatttctgctgcgcaacggcgcggatgacgtggtttatccggagcgggagaccgccagctgggcggcggtgcggtacagctccgaccatatctttgactacatccagctgacgccggaccacgccatttacgagacggcggtgccgccggcctgggtgggcaagaccatcggccagctgggggtgcgccagcggcacaatatcaacatcctggccgccaagcggggagaggagctcatccccattccgggcggcgactactgcttccgggagggggagacgatgctggttctgggcgcggaccgggatgtacagaagttcctgcacttttgacgcagctgggcggagccgtctgttggcggctctgcctttttcacgccgggacggaaaaggccggtttgcattccctgtcgggtctggtataatggatgtatcacgcaagaaaagagcggaggcgaaggcatggcggagatcctggtggtggatgacgaagcggcgattgcggatctggtggaggtctgcctgaaaaatgagggctacacagtgtacaagtgcggcagcggggaggcggcgctgacctgcgtggcgcggcagcatttggacctggccattctggacgtgatgctcccggacctggacggctttaccctgtgccagaagatccgggaggaacacctctttcccatcctcatgctcaccgcccgggtggaggacatggacaagatcatgggcctgaccctgggggcggatgactacattaccaagccctttaatccgctggagctggtggcccgggtgaagacccagctgcggcgctatacccggtacaacaccggcgaggcggcggaacccagggagaccgcggagcatgacttccgggggctgcagatctccaggaccacgcataagtgcgttctcttcggcgaggagctggcgctgacgccgctggagtttgccattctctggtatctctgcgagcaccggggacaggtggtgcccagtgaggagctgtttgaggcggtgtggggcgagaagtacatggacagcaacaacacggtcatgagccacatcgcccgcctgcgggagaagatgcacgagccaagccggaagccgaagttcatcaagacggtctggggggtggggtataccattgaataagagaagagaacggcccccgctgtcggaccggggccgccgccgggccctgcggacctggggattctatctgctggcactgacggcctgggtgacggtggtgctggcggcggtcttcctggggtatctggtatgcagcgcctttacgtggtatgcgtgggatccgctctaccagttcctcaactgggtacgggattacatcgtctttgtgtgtatgctggtcatcctgctgggctgggtggctatcagctattccttcattgcccgccccatgcggctggtggacacgctggccgcggcggcagagcagctggcccagccgggagaggagcccattgagctgccggagcccatggaggatctggaggggcagctgaacgccgtccgggaacgggccctgcgggacgcccgggctgcccgggaggcagagcagcggaaaaacgatctggtggtctatctggcccatgatttgaagacgccgctcaccagcgtcatcggctaccttacgctgctgcgggacgagccgcagctctccccggagctgcggagccggtataccggcatcgccctggagaaggcggagcggctggaggacctcatcaatgagttctttgacatcacccgcttcagcctgacccatctggagctggagaagcagcctacggacctgacccggatgctggagcaggtggccagtgagtttgccccccagttcgcggaaaaggacctgcggtgtgaactggagctgccgccccgtctggcatacgactgcgacccggacaagctggcccgggtgttcgataacctgctgcgcaacgccttccattacagcttcccggggtccacagtccggatcaccggacagcaggaggcggataccgtggtcctgacgtttaccaacgaggggcggaccattccggcggagaagctggagcgcatcttcgaccagttcttccggctggacagctcccgcgccacccgcacgggcggcgcgggccttggcttggccatagccaaggaaatcattgccctccacggcgggacgatccgggctgccagcgcggacaaccggatcacctttaccgtccgcctgcccctgcagggggccgccgcaagaaattcgtaagatttccgcaggaaaatcacaggaggtttgcaggaacgtccacagatctgcgggaagcgaatctgatacgatctttccatcaggaaaggcgctgggcgccggaaaggacatgagatggaaagattgcggatattggtgctgttcggcggatgctcttcagagcatgaggtgtctctgcagtccgcccacggcgtgctgacgcacatggacccggagcggtactgccccatcccggtagggatcacccgggagggggcgtggtatgtttacacagggccgctggatgccattcccggtggaagatggcagcgggaggcggcgtgcgtgccctgcactctgcggctggaccgggggaaccaggccctggtgctgttggacggctccggccgggaagtggcttttgacttggccttcccggttctccacggcaggaacggtgaggacggcacggttcagggggcgctggaattggccggtgtgcccctggtaggctgcgggacgctgtccagcgccctgtgtatggacaaggaccgagcccacaagctggcggctctggcgggggtacgggtgccccggagccgtctcttcccggaggactgtgcctttgaggagctccggacggcagccgaaacactgggctggccgctgtttgtcaagccggtgcgggcgggttcttccttcggcgtgagccgggtggaggagccggcacagctggctccggcggtggaggcggccttccgccacgacggcgagattttgctggaggaggccattcccggctttgaggtgggctgtgcggtgctggggaaccgggagctcaccgtcggggcggtggatgaggtggagctgtcccggggcttcttcaactatacggagaaatacaccctccagacatcggccatccactgccccgcccggatcgccccgcaaaaggcagcggagatccgggagacggcgaaggtcctctaccgggcactgggctgccggggatttgccagggtggacctgttcctcaccccctggggggagattgtgttcaacgaggtgaacacgatcccgggcttcacgccccacagccgctatcctgccatgatgcgtgccgccggcatccccttccgggagctggtgagccgcctgatccagctgggggccgagctatgagggcggcgcggtacagccggcggcagatgcgctccgggccgctggtgctggtgaaccgtcagcatcccctggcggaggagccgcggcagctgctgacagcagcggacgagcggtatcccaatatcctgctggagcggcaggccgcccggctgctggccgcctgcatccaggcagcaggcggggcgcgggagatcgtgccggtctccggctggcgcagtcaggcggagcagcaggccatttgggaggacaccctgcaaagacggggagaggcgttcacccggcagtatgtggcggtccccgggtgcagcgagcaccagacggggcttgccatcgacctgggccgggcagcgcgggagatcgacttcatccggcccgattttccggaggaaggcgcctgcgggcggttccggcgactggcgccccggtatggcttcatccagcggtaccaccgggaaaaggagtccctgaccggtatcgcctgtgagccgtggcactatcggtatgtggggacgcctcatgccctgctgatggagcgggagggcctgtgcctggaggagtatctggactgggtgcagacagcgcccaggacgtgccgcctggaacatgggcggagcgcacgggtgttttacatgccctgcgccggcgatgagacggagctccgcttgccggagggctgctgccaggtctccggcgacaaccggaacggatttgtcgtgacagtttgggaggtgtaggtatggcagacggacgccggggcgcggcgttggatctcttccgtctggcggcggtgatgctggtggtggcgaaccacacctccccgctggtgtctgtttccccattgtgggacttctggttcacccgggtgctggcccgggtggcggtgccgtttttcctgatggtcagcggctattttctggcaaaggaccagtggcgcaggaccggcgtctttctgaaaaagacctgtctgctctacggggcggcggtgctgctgtatctgccgctgaactggtacaacggcggctatgggccagcggagtgggtcaaaaagctcctgctggatgggaccttctatcacctgtggtattttccaggcgtgattctgggtgttctagtggccagggggctgctccggctgggctcccggacggcgttgaccgcggccgggctcctttacctggtgggcctgggcggagacagctattatggactgacctgccagctcccggcgctggaggcgctgtacggggagattttccaaatctttgcctatacgcggaacggactgtttttcacgccgctatttttgctgctgggagccgccggtgtgcggtggagcgtgaggacctccgctgcaggcctgtgcgccgccttcgcggccatgaccgcagaggggctttggctccatgggcttcaggtccagcggcacgacagcatgtacatgctgctgccgctggtgatggtttgcctgttttcccttctgctggggctgaatcgcggagaaaggcggagctgccgcaagctctcttcactgatctatgtcctgcacccctggtgcatcgtgctggtccggggcggcgcggaggtgctgggcctggaaggtccgctggtggagaacagcatggggcatttcctggccgtgctggcctccagcgcggcggcgtcctgggcgctgtggctggcctggagcagacggccgctgaaacgctccaataaaggataaaaggacaatatattgtcgaacttcgacagtatattgtcctttttgggcctctcaggcgccttcgcgctccgcgtgaagacggcggagctgctgttcagctgtcatcataccctgctcgtaccggtcgattttctgattcagcaggtccagagaggcctgcatctccgccatccgggacaccagctggtcccgctgttctaccagcagggccttgcgggcgtccagggtggcgtctccctgctggaacaggtccacatattcgatcagggcttcgatctgcaccccggcggcccgcatgcacttcatcagctggatccagccgcaggactcctccccgtagtcccgcaggccgcccctggtgcgggggacaggcgggatcaggccgatgcgctcgtagtagcgaagggtgtccgctgaaatatcatacttcctgctcacttcggcgatggtcatggccgttctcctctcagcgggcggcctgggccgcgtcgttcacacaccgcagggcgttcaggctgcggggatagccgatgtagggcaggcactgggagatgacctggatcaggaaggcattgtcgtttccaatcctcagattggcaccggcgtggctggtgagctggggttcgcagccgcccagggcggccaggaagcagaaggtgatcatttcccgctgcttatagtccagccccccgcgggtgtagtagtcgccgaagcagttgtccgccagccagcggttgatgtggcggctttcctccgggccgctgttctgaaagccccgcatcccctcaccgaagatatccacctgggcctggttgcccgcggccagccgggtctctgccgtggtggtggagccgggctccagcggcagggcgacgccctgctccgtcagcacctgattcgtcacggagaaaaagggacgcacccggccgatccccagataggccacggattgatagagaatctcctttacctggacaggggtgatgccggcccgcagggcggcgggcagcagcacgcggtattcctccacaccctggcagcccagtagggcagcgagaatggccatcatcctggcggcgtcatccaggtccccctggttcaccacctcgtccagggcgaaattggcgaagagctccataaactccggatccgtttcccacagcggggaaggagggccgggaaagaaacgggacaaatagtctttggcagatgcggaaagcgccatactgaaaagcctcctttgcgcctgcggggcgctgtcttttgatgagaacactttagcacttggagtctactccaagtcaagtgctttttcaaatactccgcaggggaatcaatcctcaatatgatacagagaggatatgaccagccagagctgggagaaggggcgcatcaggttccagatgccggcaccctggaaaccgtattccgcgatcagggacagacgggcggaaagactgcgggcgtcttcaaaccagacttcgtgaattgtgccgtctgctgcggtgtagtgaaagaagggggcctgggccgtctcatcgtactggatggccacgtcatgttcaatggccagctcgatggcccgctgattggagatggagggcgcccgggtgacgccctggacaaagggcaggggccaatcgtagccgtagttggaaaggcccaagaagatcttctccggcgggatctccgtcacggcgtagtccagcacggtccggacgttgggcaggggggataccgccatgggcggtcctgcggtgtagccccactcataggtcatcagaagcacgccgtccacagcggcacccacagcggcatagtcgtgcccctcgtacagaagtcccgcctgccgggcggaggtcttgggggctagagcggcccagagaaagaagccctgggagttcaggagccgccgcaggcgggcgagaaaggcggcgtaggccgccgccagctggccggggagaaattcaaagtccacatccagcccggcgtagccacggcggcggagtgtctgctggacctgatccactaggcggtcctggacggcgctgtctgtcaggaccagggtggcccgctgggtgtcgaactgaccggtttctgtcatggtggacagatgcatcaccgggcggacgccccgctgacgggcagcggagaggagagcgtcatcctccagctggagcaaatcgccgtcggcggtgatcccgtaggtgaaaggggtcagataggtgagatagggaagctccgcattcagaagggacatatcaatgtaggggtaggcataaccgttgaaggcggcggcgcccaggggctcgtcaaagtaggagatcaccaggacctgtccgggctggagggctgctccgccgcccagaggccagttgttctgccagaggcggcggactgtggtgccgtatgcctccgcgatggaagccagggtctccccggcccggacagcgtggacctggcggggaaagcggaccaccagagtttgtcccaccgccagggcgccgctggggggcacggcgttgtccgcggccaggcgggcgggatcgacgccgtaggattccgcgatggagccgaccgtctcgccggcttggaccacatggatcgtcatgttggacatcacctcctttggagactatgcaggccggggtggggatatgcggtgcccactggagggagttggaaaatatgacggaagaggcggctgcttgacagagcacatttggaagaattgtgacgctttgtcagaacgccgaaatttgattcagagatttgtggatattttccggcgtgccaggagggtcaaaaccgctgaaatagttgacagagacgtggagaatcgttaaaataatgttaaagcttgtgcgttttttaacgaaaaacgggtagacgatgacgtccaacaagcgtgtgccatccgccgttgagggaggaaacacaccacttgctgagacgtctctttttgtatacagcgcaaagagggaggcaaagcgatgttcctgctgtttttcctgctgtggctgttgctgtccggcgggatcagtgtccatacctgcctgtggggcgttgcagtctcggcgctgatctcctggttctgcaagcgggtgctgggctatcagtggcgggtgttctgcggcagtccttccagaatctgggccatggcgcggtattttgctcacctgctggcggagatgctgaaggccggactggtaatcatgcggatcatctacacccgccccaagggcatcgaacccaagctggtgtggttccacaccccgctgaagacagaccgccgcagggcaatgctggcagactcgatcacgctcaccgcggggacaatcaccgtgcgggccgaggacggccggatgctggtgcacacactggacacgccgctggcagaggggattgaggacagttccttccagcagcggctggagaggatggaggcggcccaatggaacaagtgaggacctgggtgctgaccgcgggcgccgtggtgctggcgctgctgatcctggcgacgctggtgcgggcggtgctgggcccccggtttacggaccgcatcgtggccgtgaatgtcatcagtacgctggtgatcgcggagctggtgctgctctccgtctggctgcgggaggactttctggtggatgtggccctggtgttcgcgctgctgagctttctggcggtggtggtggtctcccgtctggtggcggcccggcggcggaaacgcccggagcgggagaagacgggaggaaacgcccatgatcgataatctggtgaccgcagccgggctggcatgtttcctgttcggcctgttcgtgtttttctccgctgtgctggggctgttccggttcgattatgtgctcaaccggatgcacgccgccgcagtgggggactccctgggtatcttctgcgttctgatcgggctgatgctgctgcacggctggtccctgtccgccgcaaagacgctgctgatctttgtgtttttatggctgaccagtccggtgtgcagccatctggtcgcggagatggaggtatccacagtcccggatttggaaaaggaatgcgaggtggaggtacgatgatcgttctggaatacatcctgctggtcggggtgatcgtgtgtgctattgcagcgccgctgtgcaagcggctgctggcatcggtaatcgtgtatatggcgctgtccctgatgatggcggtgctgtggagcctgctccagagcccggatctggccattacggaggcggctgtgggcgccggtgtgaccagcatcctctttttcctgacgctgaagaagatccacgcgctgaaggggacacgggatgagtaaaaaagaggagcagccggaccggctgaaacagtttatctcctgggtggacggagatcgggagcccaaggaccggacactgttcgtcatggagcagcgcccccaccgggaattccgcccgtcagaggaggagttcgagcggcgggaaaaggaccggctgcggaagtttttcaactggtatcccatcgccgcggcggtgatctgcgtggcgctgggaattatcctgttcaccacagtgatgaacatgcccggattcggccaggaagacaaccccatcaacaacgaggtggcggagcgatatctggagcacagcgaagaggagacgggctctgagaacgtggtgacggccatgattatcggctaccgcggcttcgatactttgggggagagctgcgtgctgtttctggcggtgtcggcggtgatgatcctgctgttgcgggaccggaagaacaccagcgagcatgagctccagcagatggagcgggaggagaccgccgtgcagggccgctctgacctgatcctcaagcaggtggcctgggtgctgcttccttttattttcctttttgccatctatgtgctgctgaacggcgagacgtcgccgggcggcgggttttccggcgggactatcctgggggcgggactgatcctgttttccgctgcctttggccccggacacacgcgggtgctgatgaaccagaggcggtacagcgcggtgcggaccttcggtctgctgctgtatgctgtgctgtacggcgtttacatcttcatcggggccaacggcctgcccaattacctcaccgggatgatcctgctgatcgacctggcggtggggctggtggtggcctgcaccgtatatggattctacgccctgttttccaggggagagatctgagaggaggcggagaagagaatgctggaggagatcatccagaaccgctacgcggtcactgctgtcatcctgtttggcatcggcttcacgaatctgatgctgcagcagaatctgctgcgcaaggtgatcggattcaacatcatggactcggccgtcttcctgctgctggcctcgctggggtatattgacgggggcgtcgcgcccatcgtgggggaccggggcttcgacccgctgtacatcaatccgattcccagcggcctggtgctgaccggcattgtggtatctgtgtccatcacggcgttttccctggcgttgatccagcggatctaccgccgctatggcaccattgagatgcgggaactgctggagcgggccaagaaggaggacgactgatgcggccgtttgtggagaactttcccttcttttcgatttttctggctatcctggcggccatcgtgaccgcggccatccgcagcgggcggatcagctactggatcaccatcggagtgtgcgctgcatccgcgctgctgaacggctgggtactggaatacacctatgcagagggagtgagcttcacctacgccatggggcgatttctggcgccgtacggcaacgccatcaactgcgggccgcttcaggcactgctggccgccgtgttctccctggtgatggcccttgctctggcgggcgggcggcgggacctgtttcaggacatcctgccggagaagcagaagttttactttgtcatggtgaacatgctggaggcgtccctgttggcactgacctacaccaacgacatgttcaccgggtatgtgttcatcgagaccagcaccatcgcggcctgcgcgctggtgatggccaaggacaacggccccaatctgatcgccaccatccggtacctgttcatgagcctggtggggtccgggctgttcctgatcgggctgaccattttgaacagcatcaccggctatctgctgatgccctctctggcggaggcagtggcggagctgcggctctcggagagctacacgctcccgctgacggtggctgtagggctgctggtggcgggactgggcgtcaagagcgccatgttccccttccacctgtggctgccggatgcccacggcggcgccaccacagcgtcctccgccatcttgtccggcttggtgctgaaggggtacatcgtgctgctgctggtgatgatcctgcgggttttctccatggagctgatggtggagctgggagtcaccgacgtgatcctggcctttgggctgctgggaatgattctgggctctctggctgctatgcgggagaaccatatcaagcggatgctggcgtattcctccgtggcgcaggtggggtatatcttcatgggtgtgggcctggggagcatcgaggggctgatcgcctcctgtttccatatcctggtccatgcctgctgcaagccgctgctgtttctctgcgccggcagactctccgccgtcagcggccaccacaagagcctgaagaacctgcggggcagcgcctaccgggacattggggcgggcttgggcttcactgtgggggccctgtccatgatcggcatccccctgttcggcggctttgtctccaagctctactttgccagcgcggccgtgcccaccggtatgacggcgatgatcctgctgaccatcgccctgtccacggtgctgaacgcactgtactatgttccggcgctgctggccatctgggtgaagcccccggcggaggatgaggcgctggtcctagccgacgtgcatccgggggatctggctgcggaccgggccttcaccgcggctgccgccatcctgatcgtgggaatttttgtgctgggcattttttaccacccgatcacagacctgatcgaggcgggtgtccggctgatttgagacttgttgtttgtgagggagtgcgcccatgctgttgctgctgcctattctggtgccgctgatcggcgggatcttcgtattccggcagaaaaatgagacttaccgtgactggctggtggtgacgctgatcgtgattaccgccgtgatggtgctggctaactgcacgatgcccacccagcggctgtggctgctgaccatccagggggacttgggcttggtgctgaacagcgactggctgtccaagttcttcatggtgctggcagtgtgcatctgggcgccggtggtggtctttacaaaaccctacatccgccatgcggggcagggcaatcagttcatgggattttataccatgacgctgggggtactgatgggccttgctcaggcggccaacttcgtgaccatgtatatgttcttcgagatgatgtccctgattacggtgccgctggtgctgcacaatgccacgccggcggcccgccgggcaggcttcaaatacttggggtattccgtattcggcgcgggcatggccctggccggctacttctttatcgcctattacttgacggtgccggattttcagccgggtggggccatcgatttctcccgggctgcagagcaccagccgctgctgctggtggcatactgtctgatgatcgttggcttcggggccaaggcgggcatgatgcccatgcagtcctggctgcctgccgcccatccggtggcgccggccccagcctcagccgtgctctccggtgtcattaccaagggtggcgtggtggctgtgatccgggttacttattatatgtttggaccggagtttctggcgggcagctggccccaatatgtgctgctgacgctgacgctggccacggtgttcgtggggtccatgttggcctatcgggaaaagcagctgaagcggcggctggcctattccacggtgagccaagtgtcctatgtgctgttcggcctgatgctgctgacgccggatggcgtccaggcctctcttctgcagatggtcttccatgccctggccaaggatacgctcttcctggcggcgggcgccatcatcttctccaccaactgcacccgggtggatcaactgcggggcatcggccggcggatgccggtaaccatgtggtgcttcaccctggcggccctctccctgatcgggattccgcccatggcgggattcgtgagcaagtggtacctgctcaccgccagcctggaggcaccgatccaggcctttggcgtcgcagggctggtggtgctggtggtctccgccctgctgacggcgggatacctgctgccggtggtgacagagggattcttccccggccgggattttattacggagcggcgggaagtgggagtccagatgacatggcccatgattgcctttgccgcggctgtggtgctgatgggtctgctgcccggcggcctgctgcattggctgggtcttctggcggcccggctgttcccctgacagtggggaagctttgagaagggaggtacgtctgtgcgccaatttctgacattgcccattctggttcccatcgtgctgggaatcgcgctgctgatcctgcagcccaagagccggagggtgcggagcatctatatcatggcggcatccctggcgacgacagcactgtctctggcctgtatcgtgctgacctatctctatgggagcggctttctggcctgtatcatggtgagattcaacgaggcgttctccatctccctgcggatcgacggggcgtccatggtctatggggccatcgtgtccgtgctgtggccgctggtgacggcgtactcgctggactatatgtcccacgaggggcatgagaaccggttcttcgctttttggctgatggcctacggtgtggtgctgggtatcgcttattccgaggattttctgacgctgtatttcttctatgaggtcctgacgctgaccacgctgcctttggtgatgcacgccatggacgagaaggcccggtatgccgggcggaagtatctggtgtactccctttccggcgcggcgtttgcctttatcgggatcgtctttctgctgaattacggcgtgggacacctgaacttcacctacggcggcattctggatcagagtctggcggcgggaaacgagcggacgctggagctggtgtttgtggcggcctttttcggcttcggggtgaaggcggcagtatttcccttccacggctggctgccggacgcctcggtggcacctacgccggtgtctgcactgctccatgcagtggcggtggtcaaggccggcgccttcgcagtgctgcggctaatttactacggcttcggggcggatttcctgcggggaagctgggcccagacggtggtgatgacggcggctatcgtgaccattgtttacggctccgctcgggcgctgcggacaccccatctgaagcggcggctggcgttttccacggtgagcaacctttcctacatcctctttgccctgacgttgatgaccccggcagggatggtgggcggcatgacccacatggtctaccacgcattcaccaagatcaccatgttctgctgcgccggcgccattattctcaagagcgggaaggagtatatctatgagatggaggacttcggccgggccatgccggtggtgtttgccacattcaccgtctcctcctttgcgctgatcggaatgccgccgttgggaggcttcgcaggcaagtggatgattgcggaggcggcagtggcctcggtgaatccgctggcctacgcgggcatcgccgcgctgattctgtccacgctgctgacgacgctgtacatgctgactattgtggtgcgggcctatttcccggtgggagagctggaccgtgcggcactggcccgggtacacgacccggccaggaccatgtggatcccgctggtgctgctgaccgcctccggtgtgattctggcgctgctgtccaacgaagtgatcggctttttatggaacgcggttccgcggaactggtaagggagggagacgatgggaaacattctgctgctgtttctggtcctgttccccatgctgctctctgcctgggtgttcccgctgcggcggcgggacaggagataccggaattggctgatccagatcattcccgcagtggagctggccgctgcactgctgcttctgctgtggcccggggctgccctggagctgccgggggtctttggctttggcctgcggcttcaggccgggagtctggggagcctgctggcgctggtgagcgccttcctgtgggcggccaccggcctcaactgccccagctactttgccgccgccgagggctgtaatcgtttctactttttctggctgttgacgctgggggctctgatgggggtgtttctggcagcggacctgttcacgctgttcgtgttctttgagatgatgtccttcacctcctatgtatgggtggtgcaaaacgagacggaggaggcccggcaggccggacagacgtatctggctgtggctgtgatcggcggcatggcgctgctggcgggcctgctgctcctccagcagctgctggggacgctggagttttctgctatggcggaggcggtatccgcgctgcctgcggagaagcgcgggtccctgtacgtggccggtggatgcgcattggtgggatttggcgccaaggccgggatgttccccctgcacatctggctgccaaaagcccatcccgtggcgccggcaccggcgtctgccctgctgtccggcatcctgaccaagagcggtgttttcggtgtgctcattctctgccggtatctgttctggacagagcttccctggaatacagtggtactggccctgggcgtggtgaccatggtgctgggagctgtgctggcgctgttctccgtcgatttgaagcggacgctggcctgctcctccatgtcccagatcggctttattctggtgggcacagccatgcagggcttcctgaacggcgagaacgccctggcggcctggggcacggtgctgcacatgctgaaccactccctcatcaagctggtgttgtttgtggcggcaggtgtggtgtatctgggaactcactcgctgaatctcaatgacatccggggctgggggcggaacaagccggttttgaaggtcctgttcttcgtgggggcggcctccattgcaggcgtaccgggtttttccggctatgtgagcaagaccttgctccatgagagcatcgtggagtacatccatgtgctggagcacgcgggggccgccgcaggttggttcacgacggtggagtggctgtttctgctctccggcggactgacagcggcgtacatgacaaagctgttcgtggcgatttttgtctccagccgtgctgttggccaacggccggccttgaaggactatatgtccccgggcacccatgcggcgttgagtgtgggcgcagccctgctgctggtgctgggcctgactccgggactgaccatggagcctctggcccaatgggcggggcgattcctgcgggcagatcctggtcacagcgtccattattttgcctgggtcaacctgaagggcgcatgcatctccctagctattggcgcagcagtctatctcctggtggtccgagggctgctgatgcggcgggaggcggatggcatggtttatctggaccgctggccggcccggctggatttggagaatctggtataccgcccgctgctgtcggccctgacctttgtgggggccctctgcgcccgggtggccgcctccgtaggcgactggctggtgctgctgggggagcggatcctctttaccaaggcccccggcatctttgtgccgaagcgggccgagaacttcggcacatacggacggaaacccctccgtttcctaacggaagagaccttctcctttgatctcatgctggcaggcggagggctgatcttcctgctgctgtatatgctgctgtgagtcgacaacggatacagaagaacgcgaaaggccaggaatgccgcttatgcggtgttcctggcccatctttatgggagggagagaagattgtgggtacgatcatagctgtcacggccgcggcaggcatgggagggaccgggctggggggcctggccgcctatctgttccgcagaggtacggacaggaccgtgagtgtgctgctgagctttgcggcgggcatgatgcttgctgtggtgtgtgcagacctgctgaccgatgccattcaggcggggccagggctctccgcgcttcctgcggcatctgccagcgtactggcgggctgcggggggatctggctcctggaggagctggtaagcgggctgcaggcaggtgcgaagcggggagggctctttctggcaggtgtggtgatggcagccgctattgccctgcacaacctgccagaggggatggtaatcggcgcctcctacgctgcggatctggccgaagcgggagaggatgggcgaatgatggcactggtgatcgggctccacaacattccagagggaatggctgttgcagttcccctggcggcaggcggtgccagcagaggacgggcagtcctgaccacagcggtagccggcgcgcccacggtgctgggggcggttttgggcttctgcctgggaacgatggggccgggcctgcagatgctcacactgggcggagcatccggggcgatgctgtacgtggtattcggtgaactgctgccggagtccttccgcctgtgccgatccccagcgcccgtgatggcggcggtgctgggggttctaacaggcatgggcgtggttttgggataaaaagaacccgtcccgccacttggcgggacgggtttgtttcagaaaatagttacagcttacagcttctggagccgggcagcgcgcttcttgccgtaccagacaatgatagcaacgtaagccacagcagcgcagacaccgatgatgtaggcgggcgtccagggaatatggaagccgatctgtgcattggcaatgaaggtcactgtaacaaaggtgtaccaagcaccgggaatcagggggatccacacccacttggccttgctgttctcgaacatccatacggagatacccaggaatgcgaacagggacagggtctggttggaccatgcgaagtaacgccacagcagattgaatccatcggggctgctcttcgcaaagaccagaatcaccgccaccagcgcgaagatgatggcggacaggcccaagcgcttcggcttagagctctgatcgatgtgcagagagtcagagatggacaggcgcagagaacgcagcgcggtatcgccggaggtgatgggcagaacgatgacgcccagcagggcgatgatgccgcccacggggcccagcagatcgcggcagatgatgccgacagtgccggtggccagagaggcattgacctcctgcagacccaggttgtacacgcccatagcggcggcggcccagatcatggcaatgaagccttccagaatcatcatattgtagaaggtcatgcggccctgcttctcgctcttcatggtgcgggagatgatagcggtctgcgtggaatggaagccggagagaatgccgcaggccacagtgatgaagaacacaggaatgaagtgctgcgcggtgaaatactcaccataattgaaggtggcgctctgccagttgtcccacaggttcagcaggggatagcccttgacgaacatgccgatgaacacacccacggcagacagcagcaggatagcaccgaagatgggatagatgcggccgatgatggcatcgatggggaacacggtggcgatcagataataaacgaagatgacaccgtaaatcacccaggtggagacagaggtggcagcaccgtcaaaaccaaacacctgagtggcggcgatgtcgccgggggtgtagatgaacaccgcgccgaccagcagcagcagtacgctcaggaaaatctggtaaacagtgaaaacacccttgttggagtacttgcggaccatgtccggcatctgggtgccgccgtcgcggaggcagatcataccggagaaatagtcgtgcatagctccgccgattacgttgccgatggggatggtgatgaatgcgatgggcccgaacaggatgccctgaatgggtccgatgatggggccggtgcctgcgatattcagcaggttgatgaggctgttcttccattcccgcatgggaacgtagtccacgccgtcctgcttggaataggcgggcgtctcccggtcatcggggccgaagaccttttcgcagaacttgccatagatggctgcgcctacgaac

SEQ ID NO: 4970 - DNA, 80197 bp, Unknown
  gut microbiota DNA sequence
gaatcaccaggccgatgagaaaggttgccatagaaaacacacactcctttatgcccagtttcccggacagattctggctttatcatagcactgaagaaaggagttgtaaataatttattcatatttataaagaatttgttaatatcgcagagaaaacaattaaaaattcgtttacctcacctaacaaagttccaaatttttttaaggaccggatgtgaacacgaatatttgtgctggacggacctggaaatatgcgggagttcaggcagtaaaaaacccgtcccgccttttggcgggacgggtttgattttggaagacactgcagcttacagcttctggagccgggcagcgcgcttcttgccgtaccagacaacgatgccaacataggccacagcagcgcagacaccgataatgtaagcgggcgtccagggaatatggaagccgatctgcgcgttggcgatgtaggtcactgtgacgaaggtgtaccaggcagcggggatcagggggatccacacccacttggccttgctgttctcgaacatccacacagagatgccaaggaatgcgaacagggacagggtctggttggaccatgcgaagtaacgccatagggtgttgaagccgctggggctgctctttgcgaagaccaggatcacagccaccagcgcaaagatgatggcggacaggcccaggcgcttggccttggagctctggtcgatgtgcagggactcagaaacagacaggcgcagggagcgcagcgcggtatcgccggaggtgatgggcagaacaataacgcccagcagagcgatgatgccgcccacaggccccaggatatccttgcagatcacgccgatggtgccggtagccagagaggcattgacctcctgcaggcccaggttgtacacacccatggcggcggcggcccagatcatggcgatgaagccctcgaggaccatcatattgtagaaggtcatgcggccctgccgctcgctcttcatggtgcgggagatgatagcggtctgcgtggagtggaagccggagagaatgccgcaggccacggtgatgaagaagatggggatgaagtggttggcgtcaaagtactgaccatagctgaaggccgcctgctcaccggtggctgcatcaacagcccacgcgtcgaacgcgatgccatgccagtcatcccacaggttcagcaggggatagcccttgacgaacaggccgatgaacacacccacggcggagaacagcaggatggcgccgaagatgggataaatgcggccgatgatggcgtcgatggggaacacggtggcaatcagatagtagacgaagataacaccgtagatgatccaggtggtgggatcattcaccgcgccggagaagccgaagacctgggtggcggcgatgtcgccgggggtatagatgaacaccgcgccgaccagcagcagcaacacgctcaggaagatgttatagacggtaaagacacccttgttggagtatctgcggaccatgtccggcatctgggtgccgccgtcgcggaggcagatcatgccggagaaatagtcgtgcatagcgccgccgattacgttgccgatggggatggtgatgaatgcgatgggcccgaacaggatgccctgaatgggtccgatgatggggccggtgcctgcgatattcagcaggttgatgaggctgttcttccatccccgcatgggaacgtagtccacgccgtcctgcttggaataagcgggcgtctcccggtcatcggggccgaagaccttttcgcagaacttgccatagatggctgcgcctacgaacaagaccacgaggccgatcaagaaagttgccataaaaacacacactccttttccttaacccgcggccaggtcctcgatttggacacgcgggcttctggctataagcatagcagatttttggccgcataagcgttaaaaaatagttcacggaaattaagatgtcgctaagaaaacgacagccttatcaagaatgcgcttacttttggggagcgatgcacaaaaagcgcatgaagaagcccggttgggagctcttcatgcgcctgtgcggacggcggagcggatcagctgccctccgccatgcggtagccgacgcccatctctgtgaagagatactccggctcggcgggatttttttcgatcttccggcggatgttggccatgtttacccggagaatctggttgtcgccgctggcccgggggccccacagctccttgatgatgaaatcatacgtcagaaccttgccagcgtatttgcccagcagggccacgatgcggaactcgctgagggtgaggtggacattctcaccgcggacacggacctggtgcttattgtagtcgatgaccagttctcccactgtataggtgccgttccgggcgatttcgtcattaccggagatggtgcgggtgtggcggatcgcggtgcggacccgggccaggagttcgtccgtgccgaagggcttggtgaggtagtcatccgcccccagatccaatgcggcgaccttgtcccgctcatgggagcgggcggagaccaccaccaccggcaggctggaccagctgcgcaggctgcggaggatgtccagaccatccatgtccggcaggccgaggtccagaatgaccaggtcgggacagtgggaggagatcatggaaagcgcctcctcgccggtctgggcctgcatggcttcatagccgttgttgttgaggaccgtggaaatgaagtgcgagatgctcttctcgtcctcaattaccagaattttttcacgaatcgtcatgatacttcctccttagtgagcggcaggcagaaggaaaattccgccccggactccagattttttgcttccaatgtgccgccgtgggcacggatgatagccatgcagaccgataggcccaaccccatgttccgctttccgtcgccgggggacgagtcctcacagcgaagcgcaccgctgaacagggtgtgcagtttctgggggggaatgccctggccgttgtcctgcacgtaaaagcgggcccaggggccatcccgctgcgcggacagggcgatgtgcgtggtggttccgccgtggaacacggcgttctccatcagattggacaggacctgcatgatgaggatggcgtccatggggaccaggagcagctcatccggcacgtggacctccacggacacggcgggaaaccgttttcggaatttgcggaccgcctcgtccaggacttcctccgcagcctccggctccttggtgattttggccgattcgttgccgatccgggtgatggagagcagattttccaccacgcggatgagccactgggcgtcatcccgcacatccaccagaagggactgctgttcggccggggagagggcgggattttccaaaatggcggaggtggcacccatgatagaggtcagaggggtgcgaatgtcgtgggagacggagcggagcagatccgcccgcatcttcaccttttcgttttccatccggaggcggtcctgctccttggtcttggtggtcagggtgctggtgaccagcgagaccaccagaaaggtgaacattgtcagcggatagccggaaatggtgaagttaaacgccatatagggatatgtaaacacatagttgacgccgatgacacccagcaccgccgcaatcagcccgaagagatatccgctggtgaagcgggagatcaggagcacggccagcacatagaccggagaggcaaagccgtcgatggtgtccgccgtctggtgcagaagggcgcaggcccccgtggcgcatagaagaatggcggcggagaccagaaggtcgcgccaggagaaggaaaaggtacgcttcaaactggaacgggtgatcttcacagcaggtcctccttacatctgtggggcttgaaacattattatagcagaaagaggtgttaagattccactaaaaaacgttaaagaacataggcgggaaacctgtggatttttgcatacgtttaacaagccccaaatggaccttgtcagcggttgaacaacggaatgcgtataataatggatggcagggagctgccgaaaaacaaaaggagtgtgtatcagtatggaggaaagactcaaaacatatctgcggccgggagagcaggtccgctggcagggccgtcccgccccgttttcgcttctggaggcagaggcaaaaaagcagatcctgctgaagtggggactgacggtggcactgggcggcgggctgctggccgtgtatctttccaggaccgaggcgcccagtatgggatttatcggcctggtgctgctggtggctgcggtgattctgatctcgcccgtggcggagcgccggaacctcatgggggagcagtattggatcaccaaccagcgggccattctgatgacccgggacaaaacgtttttctacatggaactgtctgacatcgacgatcttcaggtagtgggtggaaccacaaagggaaagagcttggttctgggcagatgcctgtttgaggaggccaagaagctgctccgctggcgggcctgccatcccaaggtcgacgtccagagccatgacgagacggaccgggccctggggatgattttctatggcgtccagggagccgaagcggcggcggagctgctgcggcagggcagagacggcgaggcagcctgaccggctccaaccggcggctcacccagccatacaattgaatctggagcgcaacacgctgtaccgcggggatctcctgcccgcggtacagcgtttttttattattaagtcaaaagagatgcccggcggcgtgcaacttttggccggaaggcggttattatcgaacgactgagaaaggaggtacgcgtccttggagaaattgaaggggcaggccgaagcattctgccggaagtatctccagtgcatggacccggaccaggcagcggcaatggctggctgcgccgatggatacgccgtgctggagacgaagatggtgcgcaggcggctggagcggatgcgggaggcagcggctgggcaggtgcaccgggaggatgtggtacggcgtctggcccagctggctttcggccgggtgaatgatgcggcgcggctggccctgcacagcgaagaggcggatttggagacgctggatctgtctgccgtggcggagctgaaggtgacggacaagggcggcgtggaagtgaagcttattgaccgcatccgggctctggaggctctgcacggactcctgagcgaggaaaaggcggagggggccggagagctgtaccgggtgctgacggaagctgccggggaggaaggagggtgggacgacggctgagatcatgcggttttcccaaaagcagcgaagggtgctgacctggtggtgccgcccgggagattgggaggccatcatctgcgacggggccgtccgcagcggcaagaccttctccatggggctctccttcttcctctgggccatggccaggttcaacggacggcagctgggactgtgcggaaagaccatcacctccctgcggcggaatctgctggcggagctggtaccctatctgcggcggctgggcttcgactgctgggagcggcggtcggagaatctgctgaccgtgcggctggggggccgtgaaaaccgtttcctgctctttggcgggcgggacgagtccagcgcggcgctgatccagggcagcaccctggcgggggtgctgctggacgaggcggccctgatgccccggagctttgtggagcaggccgtcgcccggtgcagcgtggcggggagccgcctgtggttcaactgcaatccggagaaccctcagcactggttttaccgagagtggattttgagggcgcgggaacggcgggccctgtaccttcatttcaccatggaggacaaccccgccctgtcgccccggatccgggcccgctaccgcagcgcctactccggcgttttttaccggcgattcgtgctgggggagtggacagccgcccaggggcgggtgtacgacttcttcgaccgggaccgggacagcgcgcctgtgccggagggagattttcaggagtggcggatttctgtagattacggcaccgccaacccggcctccttcggcctgtggggccggcagggagagatctggtaccgggtgggggagttctactacgactcccgccgggagggacggcagaagaccgacgcagagtatgtccgggacctgcgggagctggcggaaggcagggagatcacaagggtgatcgtggacccgtcggcggcaagcttcatcgaggcgctgcggcgggagggattccgggtggtccgggcggacaacgatgtggccgacggcatccgggtgacggcggacctgctgaagcggcggcggatcgtgatctgcggtgcctgcgccgactgcctgcgggagatggaaacgtactgctgggacgacaaggggcggcgggacgctccgaaaaaggagcaggaccacgccatggacgatctgcggtacttcgccatggatctggcggcggaagagcagaatggctttgcggccacctgggtggagagacgggcctgagggaccgcggtaaggaatggacgggaggtttggaagttgaagtggtttcggaaacagacggcgccggcgggagcgtcggtccagctgcgggaggcgggacaccacccatttggactgctggggcagtatgtgcccatgcgcagtggggagatccggctgtaccgggcagtacgggaggcggtgccggtggtggacgccgccatctacaagctgatccggatggtgggcggtgtgacggcggcctgttccgacccggcggcagagcgggggctgggggaattcctccgcacggtcccggctggacgggggcagtatggggtcaatgcctttctggagggctacctggacgctctgctgacctgcgggcgagccatcggggagatcgtgcccgcagcagggaaccgggagattgcggccgtgctgtggggccgggtggaggatattgagattcgggagggagaccatcccctggcatttacaatctgcggccccgacgagcaggggcggatggggccgctgccctgtcaggacttgctgctgttcacgcctctgaatcctgaggcggacagcccctatggcgtgtcccttctgcgggggctcccgtttttgacggatatcctgatgaagatctaccacaccatcgggattaactgggagcgatgcggcagcctgcgcttcgccgtcacctgccgggacggcggaaacggccaagcggaggagcggagccggatgctggcaggagagtggtcccgggccatgcaggataccaggagcggcagcgtgcgggactttgtggctgtgggagatgtggatatccaggtcatcggcgctgacgcgcccgtcctggacagcgaggtgccggtgcggcagattttggaacaggtggtggccaagacggggatcccgccctttatgctgggactgagctggagctccacggagcggatgagctcccagcaggcggacatgctcaccacggagatcacggccatccggcggaccattacgccggtggtggagcggatctgccggctgtggctgcggatgcacgggtatacttgcggctttgaagtcctgtgggaggacatcaacctccaggacgaggtggaggacgcccgtgcggccctctatctggagcaggcgcggaagctgcggcttgagaacgacgcggcggaggcggccgcgttccatacaaggagagaggtatgaaagaactcgaaaaaaatctggaggcaacgggaggcgtgccggcggaggcagagctggcggcgatcaaccgctttgccaagtcacccctgcgggcagaggaggtgtacaccttttccctgcgactgtgcgacaacgaggtggaccgggactgggagcggttcgatacggcggcgctcaacacactgggcgacctgttcgtggggaagagcggcatctttgaccaccagtggacggcggaggggcagaccgcccgcatctaccggacggagatggtgcgggagggcgcccaggtgaccgcggtaggggacggctactgctggctgaaggcctgggcttatctgctgcggacggagaaaaacgcggatctgatcgcggagatcgagggaggcatcaagcgggaggtcagcgtagggtgcagcgtggcccggcgggtgtgctccatctgcggcgcagagggcggcacctgccagcacacgccagggcagcggtacggggagcagctgtgctacctggagctgcgggatcccaccgacgcatacgagtggtccttcgtggcggtgccagcccagcggaaggcgggggtcctgaagcggtacggccacgagaaccaggggatggcacagctgagggcccaggcggagctggggcggaaatacctgcgggagctgcggcgggaggtgacgcggcttgccatgctggcggacgacagcatggacggcggcgccctggccaaggcggcggagcatctggaggagccggagctgctggagctgaagcgggtctacggggcccaggcagcccgccggttcccgcctgtgccgcagctgcggagccggggagcggcaaaaacagaggacgagacagaatttctgatctaagggaggatgaagcatgaagctttcttatgaggggatcggccagtgggccgccaccttcgcctgtgatgatctggcggagggggagctggtgaaggtcagtgccaacggcacggtggccgcctgcgcggcgggcgacgatttctgcggcatggtgctttctgtcggccggggcggcgacgcctgcgccgtggccctgggcggcatggtcaccgccgggtacaccgtaccggcagaaggagcggcaccggccctgggctggagcggcctcagcgccgacggcgagggcggcgtccaggcggacgcggacggcagcacctatctggtggtggatgtggacaccaccgccaagaccgtgacctttgtactgtgaggaggagagagacgatggcatatcattttgagaacatcaagctggaaaagggaatgtacggccgcagcagccgaagcttttcccaggccctggaggagctggaccccagcgaacactaccggggtacgcctctggaggggctggacgcctttcagcggcagctgaagcgctttgacatccatgtaaagggcgcgggcagcgacatggtagagaagttcttccacacctccgactccgccgtgctgttcccggagttcgtctcccgggtggtgcggcaggggatggaggaagagagcatcctgccggccatcaccgccacggtgaccaagttcgacggcatggactaccggtccatcgcctccgtgcccagcgaggaggacaaaaagctccgccgggtggaggagggcgcccggatcccggagaccaccgtccgcacccaggagaacctggtgcacctctacaagcgggggcggatgctggtagcctcctatgaggctatccggttccagcggctggacctgttttctgtgactctgcggcagatcggcgcctacatcggccggatgcacctggaggacgccatcgaggtgctgcgcaacggtgacggaaatcagaatgccgcacagcagtacaccatcggcacgaagcctatcaccggaaccaaggggacgctgacctatgacgccctgctggagttctggagccagttcgacccctacaccatgaacaccatgctggtgggcagcgacgtgatgctggccatgctgaagctggatgagttccagaatcccctgacggggctgaacttccagggcaccggcacgttgaccacgcccctgggggcaaaactgctgcggacctctgccatgccggcggggatcctgatcggcctggacaggaactacgccctggagcagatctgcggcagcgagatcacggtggagtatgacaagctcattgaccgccagctggagcgggcggccatcacctccatctccggatttgccaagctgttcacggaggcatccaaggtcctggtggtatgagtgggacacaggagacggccctgaccctggcccgggaactctccggggccggggaggcggaagaggctttgctggaactgctttgtcaggcggcggagcagcagtgggagaagcggctgcggccgggaatgacgacggaggactgcggcaaggcgttcccctgcgccgtggccttcaccgccgccgcggacctggcggcggcgcggggcggtgaaggcgtgtccggcttcacggcgggcagcgtgtccgtgcggatccgcggcgcggcggagagctgcgctttggcggagagcctgcggcgcacggcggaacggctgatggcaccctttgcggtgccggacgatttttgctttcggggagtgagaggatgacagactgggttcggcaggtcctggagcgatatggacaggatgtcaccgtggacacggcggacggagagcggaccgtgcgggcgtttttacagccgatgacggagcgggatgaacgggcccgaagtgacgttacctccatcggctgggtggatgggcggctgtggctgtatctggggcagacggccctggaggagggggaagccctggcctgggaggccacgcgcttccgggtgcgcagctgcaggccctactacattggtaacgcgctgtcccactactgggcggcgctggaacaggagcgggaggcggcggaatgcgggagctgagtcagatccgggatgcagtggtctccgccctggcggcggagggggtggcggcgctggacgcctacccggaccagcgggccaggcggtatggctgcccggtggcagcggtggctgtggagaccgcagagagccggaccgtgggattctgcaattatctgggcgaggtcttcgataccggggccggcgcaccgcgggagctgtatggaaagcagctggaggcggtgatctccatagagatccggggacagcgggctgcggactgtgaacagggctgtgagacggcggcggaggtgctgctgggaaggctgcccgccggcatccgccccggtgagctgaactgggaagccctgacttgggagcgggagacagggctgttcctgcggcggggaaggctccggtgccgggcgtatttcctggcccgggcggaagagggcgacacggtatttttggactttcgattgaagggagcagtgaccacttgagcgagacaatgcatgagcggccgggggtgtactccagctatgacgcgtcaacggtggtatccgccgggcgggccgccaaggtcattggcgtggcggccaaggcggtgaagggcaccgccggagaggtggtgaccctgacgggctatgccgcgggcgtggcggccttcggcgaggacgcagcggatacgccggggatgagcaccatcctgcggctgctgtttgccaatggtgcctccactgtggcggcggtccgggtggcggaggccggcgcggtgaaggactaccaggacgccttcgcggccctgggcggggaggaggcccggattctggtgtgcgacagcgccgaggagacggtgcagcaggcgctgcggactgcggtggaggatgcctctgccgcccggatggagcggatcgccgtggtgggcggcgacggtgagtcggcagcggagctggtgacccacgcggcggcgctaaacagcgagcgaatggtgctggtggggcccgatgccctggacagcggcgggaagacgctgcccggcgtgttcgccgcagcggccctggcaggggtcatcgcctccggacgggacccgggagtgccgctcaacggggcggagatccgggggctggggggcctgggcaccgcatacaccgacaatgacatcgacctgctggtgcggggcggcgtgacgcccctggagagcacggcgggcacagtatccccggtgcgggggatcaccacccggaccacaaccggcggtgcagcggacaccacttggcgggagctgaccaccatcctgatcgtggacgatgtgatcccggcagtacggcaggccctgcgcagcaagttcgcccgggccaaaaacacggcccaaagccgcagcgccatccgctctcaggtaattgtggagctggagaagaaggtggccgaggagatcatcgacagctatggcgaggtgacggtgacggcctcggaggatgaccccaccgtgtgtctggtggagttcagcttcgcggtggcccacgggctgaatcagatctatctgacggtccacatcacggtgtaaggaggagacggcatggaagcaacgggatttcccaccagcgcggacatctatctggagctggatgggagaaagatcgcggtggtgcagggctacaccgcccgggccagcaaatccagccagagcgtagaggcgttcggcgagagcgagccggtggccaccatcgagggtcagcggaagtacaccctggagctgacacggctgtacgccactgaggacgcggtgacggacggcatcaatttctatgacctgcgggatttctccctggtgatctgcaagccggaccggaaggtcatttacagcagctgccagtggagcgccattcaggaagagggccagctgaatgccatggtggcagagaaggtgaccgtggtggcctccaagcggatcgagaccacggcatgatggaggaactggacgagctgcggccgcccacggcctggcggctgctggagatctggcgggggacccgggagctggcagaggagcccctggaacgcgccctgctgtgcaacgcccaggtgctggcagagagctgcctgcgccaggggaagccggtgttccccgacggcgcggcggtcctggtcgggctgaccgccggggagatggaaacactgctgcgccgtctggcgggggaggaaccctcccccgctccggcggcggtgaaccgggactttgatcaggggcggttccaggcgttgaaggagggctgagatggaatacatccgggagatgctgctgcggcagcggaccgccctggggcggctgatgctgggcggcggaagcgcggaagagccggagaccgcagccgcctctccggccacggagagaacgtctccggcagcgcctgccccatgggagacggacgggacggcgtctgggaccggcggatgggagattcgtgggaacagcttcgcgggcgctggggccgacaggcagactggccccacttcggcgggggagacgctgcggctggtcctggcccggaagcgtgcagaatggcagtatacggccgccttcggaccggctggcaccggagagaccgccgattctgccgggaggcggaatcccatgacggaggatggcggtctgtctgatggaggcggggcaacaatgcccggcggaggcgaagcggaggagacgttctattttctgccgggacgccgggactccggcgcggcaggaatgatggagagcgccagggcgctgtcccgcacggtgcagcgggacgcccgccggtatgacggcggattcccgctgtatgactgaggaggtgagaatttgctgctgaaacccatgcgctataaggactacacctggcctcacaacccggagagctgcgcggtggagtaccggcggcagatagcagcccacaagatccccctggggggctggtacctgcaggatctggggcggacataccgcattttccggggagagggtacctttgcaggggagcgggcctacgaggagttccagacgctggcggaggtctttgaccagaccgggccggggctgctggtgcacccggtttggcggacggtcagcgcctatttcgtgaccctggagctgatggaggagccgctgccggactatgtgcgctaccgcttttccttctgggaggacagcacggcctccggcgggctggtggaagtgcccgtagaaggggagccagagggcggaacggacccggagattcccgccggaggctggggtgccgtccatacagtgcggaaaggagaaaccctgtgggggatcgcctggcggtacggcgtggcgctgaccgccctgatcgcagccaatccccagatcaagaaccccaacttgatctacccgggggatcaggtgaggataccatgagaggacggatcatcaccagcgaccaccggatttttgagctgccggtgctgctgcgctggaatatcacctacaccggcggcgtgccctgcgacagctatgaggtcacctgcgtgtacgacaggaccatggcggagctgctgcatctggcggcgggtttcctggcgctggacgagaacggcggggtgctgctgcggggcatcgtggacgagtacgaggtgaagctgacggcggcgggactggcggtgaccatctgcggccggggatacgccgcccggctgctggacaatgagtcccggccggtgacgtaccagggagccacgctggccgagatcgtccggtgccatgcggcgccctacggcatttccagcgcggagatcgcgccggtgtcggcggactctgtttacaccgtggccgccggcaccagtcagtggaaggcgttggagggtttctgccggacctatgggggcttttcgccccgcttccggcgggacgggctgctggtggcggcgccggagcgggacgacgggcggcggatcgtcatcgacgggaccagcccgatcctctcctgcaccctgcgggaggaccactacggtgtgctgacggaggtgctggtcatcgacaagacccggaacgtgtcctacagcgtgcagaaccgggacatgctggaccggggcggccagtgccgccgggtggtctacaccccggggcagagcacctgggctgccatgcggtataccggggagtatcagatccggcggtcccgggaggaggaactgaccattgagctggggctagccgggtgtttcccggcgtttcccggggacacggtccggctggaactggaggccatgggcctctccggcgagtaccgggtggccgaggcggaaaacacggcctccccggagacgggagaggtctgtacattgatactgagggagcggatatgagatgtggctatcgagacagatgaaagcgccggcgcccacggcggacgcggatctgggcatgaccaccatcaccggagacagcgtgggcgtggtcacccggggggaggtacgggcgcttccagtgtatggccccggcggctatgtgtggatgccggagagcggcgctgcggtactggttatcaaaggtggccctggcggggaggagcagtgcgtggcaggacagcagcaggctttgatcccggaaggcatgggaccgggggaggtctatctcttcacccccggcggaaacagcgtgtacctgcgcagcggcggcgagatcgagctgcagggcaaagtgcgcatccagggcagcctgacggtgaacggggagccctatgcgccctgcgagagctgaggggggatggagatgggactttccctgcggaatggagattatgtgcctgacgggaccggtggcctgcggcggaccgagggccgggaggccctgttggagcaggttctcttccgcctgacagcgcggcgggggaccttcccattcctgccggagctggggagccggctgtggcagctgggacagctgcccgccgccagacggcagagcgcggcggaacaatatgtggcggaggccctggcggcggaaccggggctgacggtggagcaggtgattttgacggaatccggcggcggccgggcacaggtgacggtcggcctcacctggcagggagaggctctgtccgtcaccgtggaggtatcgtgagaggagcggttgtttgaaaacgacagaggagatctaccagacgctgctggcggccttcgcccagcgggcgggcttcacaccggaggcagactgcgatctggccgtgcggctgtacgctgcggcagcggagctgcaggccctgggcatccagagcgagtgggtgctggaccagagctttccccagacggcccggggcgtgtatctggactaccacgcccagatgcgtggcatcgcccggacggcggccacgaaggcggtgggaacgctccgcttttctgtggagcgggcgccgtccacggctctgagcatcgccgccggaacggcctgcatgacggagggagagacccggttccaaaccacggcggaggcggtgctggcagcaggggagctgtccgtggatgctccggcggaggccttggagcctgggcggagcggcaatgccgccgcggggaccatcgtgatcctcaccgcctgcccggtggggatcaccggatgcaccaatccggcgccctttaccggcggcagtgaccaggaggacgacgcgagcctgcggagccggattttggagagctatcagcggctgcccaacggggccaacgcggcctggtacgagcagaccgccatgggccatgagggcgtggcggcagcccgggcagtgggccgggcccgggggatcggcacagtggatgtatacatcgccacggcggccggactgccgaatgggacactgctggcggcggtccaggcggacctgcaggagcggcgggagatcgccgtggacgtgcaggtcaaggccccggcggcggtggagatggacgtgtccgcggagctggccgtccgggagggggcggacttctccgcggtgaaggccgccgcagagcaggctctggcgagctttttcagcggccgcaggttgggcgggccggtactgctggcggagctgggggacctgttgtaccacgtggagggcgtggagaactaccgcctgctggcccctgccgccgatctggcggcggaggacggaacgttgcccatgctgggccgggtgacggtgacggaaatggaggcggacgacgatgtatgaggcgcacctgcgcagcctgctctcaccgctgggaatctatgacttggaagagcactccgccagcggcgcggccgtctgcgcactgggaacagggctggacacagtcagccgccggctggaggagatcgagcgggaggcgctgactgccacggcggagggagaggggctggcccggcgggaggccctgtttgcccgccgccccgccgccgtcacggcagaggaccggagggccgccatcgcggcccttctgcagattgacggggacagcctgacgcccgcggccatcgaccggacgatccggggctgcggaatccgcgcccgggcgctggagatgggcgggggacagctgcgggtgattttcccggaggtggccggagagccggaggacttcgaccagatccgaaagatcattctggacatcctgccctgtcacctggaagtggagttttacttccgctatctcacctgggcggagtgcgaggccgccgggtacacctggggccaggtggaggcggcggaatacacctgggagagtttccagctggcggtaccgccggagcgatagcgcaacgaaaaaaggccgctgcccttacgggcggcggcctttctctgcgccggaagagactgggcgggctgctgtctgaaaaccacatcaaagcagaaaaagacaaatggttttgtggcgcggacaatatttttttacacttcgcagattgcaaattctgggatttccctgtatactgcatctatcgagacgcataccgcgtttggagacaagcataccccgtcacatgaaaaggaggaaacacgttatggcgaatttgacactgtgggagcagatcaaagagttgaagtcccccaagtacaagtgggtggacctgacccatgagttgagtcctgagacgccccattggttcggcttcaagcccctgcaggcggacctgctgttcgactatgcggagggcacgcctgaggacatgatggcccctatgcgctgtatccagtacagcgtggccagccagtacggcacccacaccgacgtgccccggcacttctggggcagcggccgggacatgagcgcgatcaccgtccaggagctgatgtatcccctggtggtcatcgacaagtccgccgagtgcgccgccaactccgacttcatgctgacggtggacgacctgaaggcctgggaggcccagtacggcaggatccccgagggagcgttcgtggccttccggtccgactggtacaaaaagcccaacctggacaatcccgatgagaacggcgtgccccattatcccggctgggacaaggcggccatccagtggctggtggaggagcggaacatcggcgccatcggccacgagccggcggacaccgatcccggcttcgttaccaccaaggagggcgcctatccctatcccggtgagcagtacatcctccaggtggaccggatccagattgaggtcatgcggaatctggaccaggtcccgcccgtgggcagcctgattgtcatcggctttcccaagctgaaggacggcaccggattccccactagatgcttcgccatctgcccggtggactgatccggacccaacaggcgcggcagagctgcactctgccgcgcctgcgcttctttacactcaaacgtttttatgctatcatgaaaccagcttatttttacaggaggatcgcactatggcactggaatttgatgaacagctctcccggctggaaaagcccaaccgcaatgagatgaccaacaaggaatatgccgtctttaacgagaacgtggagaccatggagaagaactggggctttatcaacaacctgttcaaggtcctgcctctgaacgcatcccagtacatcggcttcctggacttcaagggatccctgttcaacccggacacctgctacctcaccaacgcggacaaagagatgatcggcgtggtagtctcctccatcaactgctgctcctactgcctgaccacccacggcgatgcgctgcggggctataccaagaatcccatgttggtggataagctctgctacaacttccgctccgccaaggatctgctgacggagaagcagtatgccctgtgcgagtatgcctggtatgtcaccaagcacgccgacgagatcgacgagacccagatcgagaacctgcgcaaggcgggcttcaacgaccacgagatcctggaggccgcctttgtggccggcttcttcaactacaccaaccgctgggtttctaccatcgccccagtggccaatcccggtcacttcagccacaaccgcaatttcgagggctgacccatggcgtacaaaaagctctttgaacctggccgcatcggcggcctcaccatccggaatcgggccgtcatgtcccccatgggcacagacctggcggacattcggggcaacgccacaccccgtctgatcgcctattacactgagcgggccaagggtggcatcggcctcatcatcaacgagtacaccggagtggacgacgtggactccatccccacccagcacaacctgcggatggcccaggactacaacgtccaggaggcggaggagctgacccgctccgtccacgcctacggcgccaagattttcgcccagctccaccacggcggcgccacctccaaaagcgccttcaccggtcggcagaacctgagccccagcggtgtccccatggcgcccgggggcgaggtgccccgggagatgaccctggaggacatcaagcgggtgcaggagaagttcatcgccgccgccatccgctgcaagaaggcgggctatgacggtgtggagctccacggcgcccactcctatctgatcgcccagttcttcagcaagtactacaaccgccgcaccgacgcgtacggcggctccctggagaaccgctgccgcttcatcgacgagatcatcgccggcatccgggccaagctggggcggtatcccatctcggtccgcatctgcggcgacgagatgaccgacgagcccggcttcctcacgctggaggacggcctggagatcggccgccacctggaggcccagggcatcgactgcatcaacatttccaatggcagctcctggaacggcaacgccaactgcgagcctttctcctacacccccggctggaagaagcacgtggccaaggccttcaaggaggcgctgtccatccccgtcatcgccaccaacaccatcaaggacccggatttcgccgaatctttgctggaggagggcgtcagcgacttcgtggccctgggccgcagccagttcgcggacccggagttcatgaacaaggccagggccggcaagccggagagcatccgtaagtgcatcggctgcatgtactgccgggagcggctgctgggcaacgccatgccggtggagtgctccctgaacccccggctgggccgggagtaccgctaccgctggcaggacctccagaagaacggcaacagccgccccgtggtagtcgtgggcggcggccccggcggcttggagtgcgccgtcatcctggccaagcggggcttcgccgtgacgctgctggagaaggaggccgccctgggcggcacgttgaacatcgccaagctgccgccccacaaggccaacctccaggacgtcaccgacgtgctggcgctggaggccagggagctgggcgtcaccgtgaagctgaacaccgaggccacgccggagaccgtggcggccctgcaccccgtgggggtgtttctggctgccggtgcgccgccggtggtgccgaagtccatccccggcatcgacaaggccgtgctggcggaggacgtcatcctgggtaaggccccttgcaccggcaaggtggtgctggtgggcaccggcctgacgggcctggagtgcgcggagatgatcctggagcagggccacagcctcgccatggtggagatgaaccccaccgtgggccaggggattttcggcgtggtgttcaacgacatttacagccgtatcaagccctatgacccggaggtctacaccagccacaggctcactgccgtcactgataccggcgtgaccgtggaggacatggctaccggtgagaccaagaccatcgccgcggacaccgtggtgctggccatgggcacccacagccaggaggccatggaggcgtcttaccgggccgccggactgaacgccattctggtgggcagcgccgagatgccgggccgcattgccggtgctacccgggatggctttgaaaaggcatggggcttcgaggcagagtgatttggcaggctccccggaaaggggccggaacgggcacagcgattcccgcatgatccggcgcaccgggaataccggcgaatgccgctgtacatgaagctttttgggcattatttccaatcgcacacggtaaaagagaccggacagatttctgtccggtctctttttggcagggtcaggcaaacggttcagcacccgttcaggggattcacatccccctccggcggcacgatgcacagggccatcagctgccccttgccggtattgccgaagttgtggcgcacgccgccgggcacatggacccaggtgccgaactccaggggcacccgttccttgtcgatgaggaaatagccctccccctggatgcagaggaaccagtgtggccaggggtgggagtggacactgctctcggcctccggctccagagtgaagaggcgcatcacatagtcgttccagaaccggccgtcaggcccgaagacgatcttcttggtggaattttcaatgaagtgtccgccggtcaccaccggcagatcccggatgttgccggaatactcgctcatagacagatcctccccttattttgataacctcagtatagaatctttgggtggaaaaatcaagtgttctccagagaggcggcataatggagcacgttctccagtacaaagtcgggaaagcggcagtccctgccgcacacccgcgtgcgctcccggggcagccggggcagcagctccgcgtccgggatcagggccaggtccgcctgacggagcatgggcacgtcgatgacgctgtccccggcggcgatcacccgctccgggccgaaccgctccaccgcccggcggagagcggtccccttgtcgatccccggtggaaagaaatagaccttccggccggagaccaccgcctggagggcggagccgccgcaccaatcccgggccacgcgttccgccgccgggatgtccggataagcggcgtagacgtacacaccctccacgcaccgcacggaggtggccccgccctgccgggtcagatgatccaggaccgcggccagcgcctcccggtggtcccggaccagcgcctgggacgcggcgtaccacgcccggtccacctgaccgtcccgcagcaggacggcgccgttggcggtcagggcaatcctgggcgccgtgccgtccggccactggatgcgctggtactgctcgatggaccgggtggtgatgggcagcagatggacccgctggacgacctggggcagcaggtctggcgtctcccgggtgaagaagccctgctcggccccgttcagacgctccacacaccggtcctcgggctgccggtgccggtgggagaagaggagcgtgttgtccaggtcgctggcaaacagaatcgttcccatggctatgtgtccgccaggtcccggatcaggccgcaggcccggtagttctccaggggatactccaccagctccgcgcccttctccctggccagttggtagatgtgccccagatgggcttcgtctcggaggctgtggaccagcaccttccagggcacccgccgcagcaggacacgggtggcctccccgatgctgggcttgatgagattgatgtcccggatgccgaagtccgccccgatccggtgcacctcctccagtccggcccggccgctgcgccggggcgggggaacggcgtcggcacaggcggggaaatgggcctggatggtgtcgatgaactggtacgtcaggtcctggtccttcagctcccggtagaaggcagcgccgtgaaagtccccggggctgatgatgtcgccgcggaggaacgtccggctcaacaggccggacacggtggagttcaggcaggagctggcgatgaggaaatcgtcatgggtgccgcagatggccgctacgttggccgggtccgacaaaactgtcagccccggcgagacgccggggtagtccgtcatggctgcgtccagctgccgctggatggcgcccttgccggtccagccgtccacgaactggatatctccaggggcgtggcggttcaggagataggccatggcattgcggtcgatgccccggccccgaatgatggagatggtgtaatgggggaggtcggcaccgtaccggccttggagatagcggcggatcagaatgccgatgggcgtccctgcccgggccagggagaccagggcgcactgccttcccctgctctcccagatctgctccgccgcccgggccacagcctccgctgtgatgccggcgtaccgctccagggcgtcgtgataggcggccagataggccggggagggctcatactccaggggcagcatctccgagtagtggacaccgctctggatcctggcctcccgctcccgggtgcccaggggcgtcaccaggccggtgatgtctttcagcaggatggtcacatcctgactttgatatgtgctgaacataagatcctctcaaattctgcagagatagagtcggggacagcccagctgccccagggccgccgccagccgggtgcaggcggtcccgtccaccgccgcgggcgcatccgtcaccaccagagcggcgtcataggcggctaggtcatagagatatgtcttccggtccccaccgtagaagctgggcagcagcaccccgtttcggatggggtaggcagagtcggggcagatgccgatgggactgcgggtagtggcatggcagcgtactgtggcacagagacccgtctgctccgccagcgaccctaccgtcagggcaggatacatgcactcttcggtccccagcaccagcagggcgccctggtccggcagctcctcccggaggcgggacagcagctcttccgcggcggcgcggcagcagtccgtatagcagccgacggccacaccacggcgtgggtccggcagaggctccgccgtgtacagcgtccgcaggtccggcagggggccctgggcagggggagccgcctcctttacagggatcccggtcaccatccgctcatagtcttgatgttccagccgcaccaggcactcacaggcaatgccggcctctgccagcctggcctggttctccggagagacccggctgaggatggacgcagctgccagccgccgctcgcccagccggggataccgctcccgcagctgctggaccatgttgatgagggtccgcccggtggagaactcgtcatccacgaatacgatggcggggctgcggtcgatccagtccgccagctggtcggcacagagccggtgctccgctgcgtggctgtgctcctcccgaaagaggatccaatctccgtccaacgcctcccgggtggtgtggacatagaggcagtccggccccagccgggctgccacggcggcgccgatggcggtggccgtctcggcaaagccgatgaccagccgggcctccgggtacttggcggccacctggtcccccagggcacccatcatctccagagccgccgcggggctcacagggatgtgcttggcctgcaggggattgaccagcaggtagctccgcttggggttgttgtatcgcttggcgatccgcagcgtgtctgcggccgtatatgggtgcattgcggcaccctcccttcgtcgtgtcatgaaatcgtggtgagactttgattatagcacagcttccaccccaaagaaacctctttcccgcgcctcggccatttcaaattgcgccgccggagaatctgtggtaagatgggaaaaacaacaccgccgcggccggcggggaggagcgcgccatgaaaaagctgcaatacaattctccggtgatcctgacctttttcctgctgtccctgggtgtcctgctgctggactggatcaccggaggatggacgaccctgcacgccttctgtgtctaccgctcctccctggcagatccgctgttctatgtgcggctgttcggccatgtgctgggccacgcggatttcgaccatttcctgggcaatatgctgctgcttttggtgatcggcccgccgctggaggagaagtacggtagccggacgctgctggccggcattctactgacggcgggggtctccggcatcctgcaatgcgtgttcttccccggctccgccctgctgggggccagcggcattgtgttcatgctgattatgctggcctccctggcgggcatgaaggacggccgcatccccctgacgctgattctggcggcggtcctgtatctggggcaggaggtgtacgccatggtggccctgcgggacaacgtggccaacttcatgcatctggtgggcggcgtcaccggcacggtattcggcgtggtgctggcaaaaaggcggtgaagaaaaaagaggcgggcattttggatgcctgcctcttttttcggtttacttccgtcccacgatcaccttgcggaggatgtccacggggatcatggtgaacgccagcagaatggcggcagcccacccggcgggcgggaagggcacacagctgaacatattgctgatccagccgaataccggcacggggatcagggcagcgttgacgatgaacgcctgcaccaggacgatgataacgaacacccgcatgaaaccggggttcagcttcagatccttaaagatgtcaaagctgtcgctgcgcacgttgaaggcgttgaacagggcactccagatgaacagcacgaaataggcggagagcttctgctccgtgctggcaaagaagctgtcaaagaaaggcactttcaggaagacaaagctcaacgccgtcagccacaggcccatggtgacgatctgggccatcatggacttgctgacaatgctctcatcccggcggcggggcggctcggacatataccgctcctgggcgggctcattgcccagcataatggcgcccaagccgtccatcaccaggttcacgaacagcaggtgggtgactttcaggggctcctccacgccgaagaagggagcgatagcgctgaccaccacggcggccacattgatgaccagctggaacctgcagaatttcaggatattgtggtaaatggtccggccgtaccagatggcgtccttgatggacttgaagttgtcgtccaggatgacgatcttgccggcctccttggcggcctcggtgccgctgcccatggcgaagcccacatccgcccgcttcagggccggggagtcgttgacgccgtcgccggtcatgcccaccaccaggttcagctcctggcacaggcgcaccatccgggacttgtccgtgggcagggcgcgggcgatgacccggatgcgggggatgatcttcttcacctcgtcgtcggacagctcgttgagctgggtggaggtcagcgccacatcgtcccgggtccgcagcagcccggcctcccgggcgatggccacggcggtctccagccggtcgccggtaatcatgaccacctggatgccggccttctgcacctcggcgatggcctcccgggcctcgggacgcacgtcgtcccggatgcccaccaggccgatcagcaccgtgtcggcgttgatggcgttctccgtcatctcgctgggggagtagccgaaggccagcacccgcatggacttgcctgccagctcgtcgatcttggcgttcagggactccaggtccaggggatgctcgtccccatccaggctgaggtacttctgggccacggccaggaacttctccggcgcgcccttgtagaaggtgcggcccgccccggcgatgtaggcctggctgaacttattggcggagttgaagctttgggatttggtgacggcataggaggagacctcatccagcttgtggaaggtctcctgccccagaaagcgcatcagcgcctggtccgtggcgttgccgcccaccacgcggccgctgccgtcatacatggactggctgttcttgccgatggccagatcgatcaggcccttgagcttggtttgctgggccagttgatccagagggatagccacgccgtctgcggtgaagaactccaccacctccaggtggcccttggtaatggtgcccgtcttgtcactgaacaggatgttcagggagccggcggtctcgatgccctccgccttgcggaccagcacgttgtggtccagcatcttgctggtgttctgcatcagcaccagagagatcatcaggggcagcccctccggcacggcgcacacgatgatgaccaccgccagggacacagcctccacgatgtcctggatgatgactggggctccggaggagaagtacgccgcaaacccgccggcggagaggatgaagtagccaaagtacatgatggcgataaccacggcgccgatgtagccgaagcgggagatcatgtccgccagcttcccgagcttcaccttcaggggagagtccggctcgtcgtcctgcatctcctcggccatcttgcccatcatggtggcaaggcccaccttgcgcacatccagcacgccctcgccgtcaaacagcacggcgccccggaacagggagtgggcgtccacgaaggtgtcgccggtgatgtcctccggcagggggaaggactcgtccgccgcggtcttggggcattcctccgcctcgccgttgagggcggagttgtccacccttaaagttccgtggatcagcacgccgtccgccggcaccttgtcgccggactggagcaggaccttgtcccccaccaccacgtcatccacgtcgatgacggtgaccagaccgttgcggtagaccttgcactgatcttttttggtgctgtccttcagctggcggtacttcgtgtcgctggccacgccggtcttggcggagacgaatgccacgatcagcacggccacgacagtgccgatgggctcatagatctccgcatagcccagcacacacatgacgatcatcagggccgcaatagccagcaggatccggatcatggggtccttgaacgtctccttgaactccgcccagaaggtggtgggttcggagtcggggatcacattggacccgtatttttttcgggattcctcaacttgtttgtcagtcagtccattaaaatgcatgattgttacacccattcgctgcgggaagggggcctgcgcacagcagacccctcccgcggttcaaattttcaatatctttttttggggccgccgctcacatatagcgccgggccagctccaccaggccgggatccgtggtggcctggccgatggcgttgaacttccactcgccgttgtttcgatagacctcgccgaagatcatggcggtcatgttgtcgtagttctcggagaggttgtagcggcacatctcctggttgttccgggcgtccacgatgcggatgaacgcgttctggatcatgccgaagtgctggcggcgctgcactgcctgatagatgttcaccaccaggacaatgcggtcatactccgcggggacgcgggccagatccaccacgatctgctcatcgtcgccttcgccggcgccggtcaggttatcgcccatgtgctggacagtgccggtgtagtgcttcagattgccgaagtagacgatgtccttcttgtccgtcagcttgccgttctgcagcacaaaggcagaggcatcgcaatcgatggcggggccagaggacccgaacaggctgccgaacaaaccgcccttggacttggcggcctcatcccagcccagaccgatgatgactttggaaagaccctcgttgcccttggtcaggctgatcttctggcccttttgcagactcacagacatatatatttcctccttcaaaatgtccggccgcgcccccgggcgcggccggagagatctgatgctccctgtcgggatgcttattccacgtccacgccgtagttggcgcacagggccgccagaccgccctgatagccgctgccgatggcgttgaacttccactcgccgttgttcttatagacctcaccgaacaccgccgccgtctcgatggagaagtcctcgcccaggtcatagcggagcatctcttggccgttggtctcatcgaagatgcggatgaaggcgttgttcaccataccgaagttctgccggcggctctccgcctcgtagatggtcacggtgaaggcaatgcgctggatgttgtcgggcaccttcgtcaggtcgatgcggatctgttcatcgtccccggcaccctccccggtcaggttatcgcccagatgctctaccgcgccggaactgtgcttgagattgccgtagaacacgaagtccccggaggaggtcactttgccgctctctcccagcaggaaggccgccgcgtccaaatcaaaatccccgccggtgtcaaagctgttcacgtcccagcccaggcccacgaccaccttggtcaggccgggattccccttggtcaggctgactttctgtcctttttgtaaactgataggcatgatattcctccttgtaatcactcagcgtcaatgccgtagtggccgcacagggctgccagaccgccctggaagccgctgccgatggcattgaatttccactcgccgttgtggcggtacagctcacccaccacgatggccgtctcgatggagaagtcctccgccaggtcgtagcggatcagttccgtgccggtggactggtccacgatgcggatgaaggcattggacacctggccgaagttctggcggcggttctccgcgtcatagatggtgcaggtgaaggcgatccgctcgatgctggcgggtaccttggccagatccaccatgatctgctcgtcatcgccgtcgccttcgccggtcaggttgtcgcccatgtgctccaccgcgccggtgctgtgcttgaggttgccgtagaagatgaagtcccgctccgtggggcactttccgctggcgcccagcaggaaggcagccgcgtccaggtcaaaggcgctgccgctgtcaaaggcgttcacgtcccagcccaggcccaccatgatcttggtgaggccggggttgcccttggtcaggtcgactttttgtcccttggaaagattgatcggcatagtgatttcctccgttcccaatatttaatgattcacggaccccttgtccggcatgtgatacatctggtcgaactgggccttgatggcctccagtcgcttttggtcctccacccgctgcttgcgggcgttctcctggatctgcttcgtctcgtcgataccgctgacgatggtgcgccaggtctgctccagcgtctcgattttaatggagctgccggaggccagacgggcggtcatcttggcctgctccgccgtgttctgggcgttgcggatcagcatttcattggtcttggcgtccagggcgctcatggcctccgtctgcagccgctggcgcttgagcatgatggcctgggtcagcgcctgcttgaacaccggcagggtgatgatgaaggcggagttgatcttccgcaccagattcatattgctgaactgcatggtcttgatcatggggatggactgcatggccacgttctccgccgtccgcaggtcctgagtccgctgctccagcatcatcagggcctgattcagggtggtcagctcgaactggatggagttgtcccctgtggcctccatatccgcctggcgctgggcgatgtatgcctccagctcccggcacccctgctcaccggccaggatgtaacgcaccagctcgtggtagtagttcacattggcctggaacatctcctccagcttccggttggactgcttgatgtctgcctcgtactgcttcagctggacatagatcttgtccacttcatcgcccatggtgtggtacttggcgaggattttgtccagctgcttgcggaggtttccgaacagcttgccgaagaggccggggttctccttgatctcttcgatgtcgaacttgtccatgatcttggccagcgtgttcagcatcgcgctggagtcatccagctgggacaggttcatgctgttgagtaccacgtcggagcacttggagatctcgtctgctgctccggcgccgaaggagacaatggactccaggttgtatacctcgatctggctggccagggcatccacctccggcgagttgaccagcgtctgggtcatcatctgccggtcggcggagatgtcgtactgctgatagctctcttcttcctggggggcggcaggtgcctgtccctgagagggctgaggctgggatggggtcggtctgctgagattcaggcccataagtcatatactccttccaaatagttttctgatggagtgcagtccgctttcctgcacggtgttgaaatcaggaatccgcaggtcgtaaagatagtccccgatctgcgtctcgctggcaaaggggcgcgtgaagtgctgctcgatgcactggtagccggtggggacgaagaatagcacgtcgaagccaaccaggcttagaaacgcggtgaggatgctgtcctccagagagatcctctcctctgtggggttgatgtagatgagcttggggttcttcttggtgaagtcgaacttctggatcttccgcagcaggtccttggggagattcagggcggtggcgatcaccgtgtactccgtgccgttctcaaaggtgccgcggatcagcttctggtccagcagcagctgcaatttgtccaacaggtgctcctgcatctccgcccgcaggatgccgtagagataggcgctgtgggacttgatcttgccgcgcagcagcttgccgttcttcaaaaactgcgtggcgtacggcttcacggggttgggatccgtgccttggacccaggggacggaccgaatcacctccgtgtccggcgtgatgagcttcttgatgtccagccagtactgggaggcgttgccgtccttcacgccgcagatcttctggcagatcaccggcagggtgacggtgtcccccgcggcggaaaagctgggacggtatttcatctcctggtcccacagaatcgggatctcctcgtacatggtctgcagcaggaccgtggaggccttggcgtactgctggttccgatacagtcccgtatcctggtacatcagccggtccagatcccgctccgcctgataggcggcggtggtgacccgggcctggttctggtccaccgggaagcggtccagagagacggattggggacagtggacctccagcagatccggggtgtggagggcgctgccctcattcagattggggagcagcaacaggacatccaccggcaggcgggccagcagccgcaggaacagggctccggtgtccgacgcgcatctgccaaactggagaaagaccgccacctccggcgccttccagtccggaaagaggtccttctgataccggttcagccagcacaggaggtacaccgcccggctggtgagcttggagacgctgccgccgcaccgctccccctcctccagcaccagatcgatgaaagctcgggtcatcaggcgctggagctccacattggccggataccggatgttggcggcgagacccgccgccagctgctctgcggaggcgtagttgccccgcttgaccgcggcgatctcctccggcccggggggcgcggggtctccgttgaccacgcagatccggcggccgccgccctggagggactgataaaacgcgaagaggtcgttggtataggtgagattgtcctccacgccgtactggcagaggaagaggttgcagaaaaagcggggatcgtttccgcgggcctgcacagccgtcagcgccgcgttcagctctgccttctgcacccaggcgttggtgcagggagagagggagggcggcgtgccgtagagccgctggcggcgcacctcccgctccagctccgcctgaagctgcttgacaccgaagcccgccgggaagggccccaggccaggggcctgatacaggtgcgacagggccgactgggggtccacggtgagatatgcctggtcgccgccgcactccagcaggacgatatccgcccccgcccgggagaggaccgtcagcagctgcagctcataatggctcacgtccccggcatagaggatcttgggcagcgtctcgccgcccagcacgttgacgatccgctcgaacttgtagtagagccagcacatgtatttcatgtaggcattgcggagcatattgtcgtttttgcccgcccggcgcatatcgtccagggtggcatacatggccgtcaccacagcgtcccgctgcccgtccgtcatccggggcagccattttttcagccgctgggagagaaaatcccggtccatctggaaaccggaccccatcatctcattgaaataggacaggttgtcgggcgtggggttggggatgcgcccgtcgatgatgacgccggaccggcgggccgcctcatagtagcggcgcagaaaagcggccaccgtctccccgtacccggcgatccggcagaaaaacacgcgggacccgccccgttccgagagcgggcggaaataatcattcagttgtgccgttcccgcctgttgaaacatcgtagcccagtctctttctcatcacaagatttgtgtttctcattatagcggctttggagagaattttcaacagatgcatggagcatagcttgagaatccacaaaaattttacattcgtcagcatggcgcgggtattttcttctccggcgggaagtgctataatagcgcccataagtgcccggccgaagccggccgctgatctgaaggtaaaagaggatgagcatgagaagcaagttgactggatatgacgtgggagcactgctctactgccctgccaacgcccacgggtcgattgtgggcgcgattgtggagcagcggtttccaacgccgtattctctggcgttctgcctggaggacacggtgcgggaggacgccgtggcggacgcggagcggatgctgcgggggacgctgtcccggatcgcgtccgctgcggagggcggctccttttttctgccgcccatttttgtccgggtccggtcaccggagcagctgctgcggctggcggaggagtacgccccgttttcctccattctccgtggattcatcctgcccaagtttttcctggagaactgcggggcctatcttgcagccatccgctccatcggccggacggaggagtacttctatatgccggtgtttgagtctgcggccatgattcccccgcagactcgccgggaggctctgacggaggtgcgggcccagctggacaccgtgtctggctctattttaaacatccgggtgggggggaacgacctctcccacgccttcggcctgcgccgtccggcaaatcggaccatctacgacctgcgcccggtggcggatatcctcatcgacatcgtggcggctttcggcactcaatacgtggtgtccggcccggtatgggagtattactccggcgagggatgggaagaggggctgcgccgggagatggagctggatctgctgaatggcttcaccggcaagaccgtcatccatcccaatcagatccccgtggtgaacgaaatgctccgcgtctcccatcaggattacgcggacgcccgggctatcctgaactgggataccggcagcggcagtctggtctctgccagcgaggacggcggccggatgaacgagtacaacacccatagccgctgggcccggcggatcctcctgcgtgcggagcggtacggcgtcagggcgtgagaaaaaggacttgaatttcgctccgacctcctgtataataaaccagtatccaccggccagtgtgatggaattggtagacgtgacggactcaaaatccgttggtggcgacaccgtgtgggttcgagtcccaccactggcaccagttgaaaatactcaggtttttcatgaattgaaaacctgagtattttctttttgaagcccggttctctccccgagttctctcctccggcttgaatcgcggctgagatgccaggggtgatgctgactgtctggttcattttcgttgcaggctgtttcttggaatccgtgtccaggtgcgcgtagatattggcggttgtagcgtagctgctgagtcccagccaatcctgaatatccttcaccgcgactccgtttttcagaagcagggatgcgcacgtatatctggaatcgtggaaacgaatcggacgaaggccgtgctgcttcaggacccgcttgaaatggtggacacaaaattaggcttatatgggatacccagctcgttgacatagatgtactccgactccgtgtagcagtttccgcagaactctttacaagtggctttccgttcctgcatccgcagcagaagttcccggtactggggaaccggcggcatcgttctgcagctggatttgtttttcatccggttcttgccatcggaacgatactggaccacagtatgatcgaccgtgagagtatttccctcaaagtcgattgcgctccaccgcagtcccataaccccacttctacgcaggccgtagaacgcagccatcaggaccggaaattctaccggatctccttacataaaatgtccatcaaaaatgaccaaataaataaaatggttgtcttaatgcatgtgtattcgctccatatggagccggcctgtaaaagtaagtatgcgctcgtgttacatttttgtttctcccaaaagggaaaaccgttcacatcttcaaatggatcatttgatagaaaagtcacacgggtgtggaggaattcgtatgcctaagatattttcagattgagcattttcccttttctcaaaaagagcaggcccataaccaccatgtagccctccttgagcaccataagaccaaacaggacccacatctggggatagcggaaggccagacaaagagccaatgcaccgtgtgtcagtttgtccgcgatcgggtcaagcgccttgcccaaatttgtgatcatgttgaactttcttgcgatcatcccatcaaacagatccgtgagactggagaggaggacaacacctgcggcccaatggtacgcttcttttgccagatagaggtaacagaataccggaatgaggaggagccgaaaatatcccatcaggttcggaatagagaatctctcttttgtgttgaatggcttcattgaggttcttctccctctcctatatgcagacaagtcatgcggaagcagaagactggaaaaattgcgacaacgcgtttacagcttcggcttcgtcagggccgtctgcagcgacctgtacctgctgtccctgacgaaagccgaaggagacgaccccgagaagacttttcgcattgatgcttcgctcaccggcgattatgcggatggtgctctgaaagacattgacatggcttacaaacagtgcggctgtatgtgtggtgaaatcctcctccaactgcaatgaaagggtccgcgttgtcatggtaatcgtcctcccaatgatagattttcatttataaatgctcgatccaggggcttcggaacatgtgcgcttatgatgcgcgatatttgcgctctcctttgcacagccagccctttcttctccaactccgaaattcccagcgggccagcagcaggcagagcaggaacgcaagagcatcggctatcggtgcggccagaagtgcgccgtccagcccgaaggagcgggatagcagaagcgccagagggatcaggaagcagccctgccgggccagaggaatcagcagggacttaccaggccggccgatcccctggaagaaggaggctgaggtcatgtgaaggccatacaggaaaaaggccagcatatagagccggaagcagtgctgtgcgcaatccagatagagcgcattgtccgatacaaagcagcttgcgatctgccgcgggaacaccatgaaaatgagaaaccacaccactgaaatgcctactgcaataagagaagctatatggaatgtcttttggacccgcgcatagtggttggcgccgaaattatagccgttgatgggctggatggcagaggacaccccgacgaacatggagtgagcgatctggtagaccttcatcatcatgccgtagacggataaggcaatgtcactgccatagactgtggcggctccataggcccgcatcagattgttcagggtaatctgcaccagagcggagagcatctgcgtaagcaagctggggaagcccagtgccagaatacgacaggtcagcttccgtgtagggcgcaggtcctcccgccggatatgaacggttttgaggcggcgcaggtagagcagggccaggcatccagcagccacctgcccgatcaccgtggcgatcccggcgcccacaacgcccatcttcagcggaaagataaagatagggtccaggatcaggttgatgaccgcccctgtcatcatgcacttcatcatgtactgcggggagccgtctgcccggataatggcggtgaaggcgggacaaaggagctggaacgggatcccccatgcgatggcgcgcatataggacagagactctgcataggcagtcggcgtcgcgccgaaaaggactacgatctgcggggcgaagatgccgcaggccagagcggccagcagaccgctggccaagatcagggtgagggcgtgactgatggtgctgtccgcctcccgctgctctttccgacccaggcacagactgatattggcggcacatccgtctcccagcatcaatgccacagcattgaccagaatggtcagcgggaacgcgatattagtggctgccattcctgtaatgcccacgccctgtccgacaaagatctgatccacgatgttatagaggtagttgaccatcagtgtcagtgaggtgggaacggcgtatcgaacgatcagtttgggtatgggatccgtttccaatgggtttggctgcaggtttggctccatagcaaggctccttccgtattcatactggacgcttccgagggagaagccgccggaaataaaaaatcccggcgccatttccctgacgcagagagatggctgtaccgggtgcttagagtatacacttttgcttgaggaggatgggcatccggcacggcaccagaaagccttcttctcccctccagaccgaacctgttggctccggaattccaccggattagctgatcgctcgcggactgttaccgccagtagagaaatatctcgtttccgaagaaaacttacatacctaaatgtatcattaaataaaagaaccgtcaaggaaaatgtccttcccgccgtatcaacttctgcgctttctgatcgatatcctgtgtcccgtacaaggcattccattttggcttttcctgtggtaaaatatcaaaatcgacaaaatcacaggaggcaggacagggatgaaaacgggcttggtcttggagggcggcgccatgcgcggaatgtttaccgcaggcgttctggactcctggatggatgaacagatatcctttgacggaatcgtcggtgtgtcggccggtgcgctgtttgggatcaatgctcctgccggccagaagggacgcgccatacggtataatttgaagtatatccgggataagcggtacatggggctgcgctcgctgctgaccacgggcaatctgatcaacgccgactttgccttctatgaggtgtcctccaagctggacgtatttgatgaagcggcctttcagagatcgggcgttgacttctatgccgcggtcaccgatctgcacacaggcgccccggagtatatccggatcacagagccgttccgtcagatggaggtcctgcgggccacctctgccatgccctatgtctcccggcctgtggagttggatgggaggttctacctggatggcggggtcagcgacagtattccagtccatttctgcaagagtctgggctacgacaagaccgttctcgtgctcacacgtcccttggagtatcggaaagagcggcccgcagcatggcttcagcgattcaaccgcctctattaccatcgctatccggcctttgcggagagtctgaaccggcggtgggaagtctataaccggcaggtggaggagatcatagggatggagcagcgcggggggctcttcgtggttcggcccaatggcccactcccaatcaggcgtgtggaaaaggaccccgccaagctgcaggctgtttatgacctcggggcagaggccggcagggcgtctctcagcggactgaaagagtatttgctgacgcatgaatgatggtagatgatataggaaattgcgcatccagcaggcaggggcttgtatggatgcgcagtttttctttgtgcagtatacagcgtcccttggtccaggtatcatggttggcaaaactggcgggatggcatatatactttttgaataaagaatttctgatacatatcggacaaattgacatttttttcaagtaacattataatgttcatatattcactgccacaagaggacgtggttagaaggggtgaagaatatggatcaggatctgcccttatgggtagagggctgcgccgaaacatatataatgtgggtgtgaatggaagcagacagctgctgaagatcttgccggacaaaggtatgcaggtgcggccctctggagcaaacaaagaaaaggagggcatttttgatggatcacagcgtattgacgattttggatctgggaatcattacggcataccttgtcatcatggtcctggtgggggtctattccgtcaggcggatccagaacacaaaggattattatgtagcgggccggtcctttgggccgatggtgctgatggccaccgtctgcgcgacgatcatcggcggcagcggtctgatgggccgggcaggtgtggcctataccgacggcttcaaggcggtccttaccgcaattccataccttctgggaatgttcattttctccggcatcgccgggaagatctcggatatcgggatgcagtacgggatcacctctatcccggagctgtttgaacggcggtttggccgggcagccaagatcaccctctctgtgctgatcgcgttcgccatgatggggacggtggcctcccaggtcaccgccacggccacgatcatccggatgctggggggagagttcggcctctcctatgagatgggcgcgctgatcgcaacagtggtctttatggtctacacagccacctccggcctgttcggcgtggtatacaccgacgtgctgcagttttatatgttgatcgtcttcgtgtatatcctgatcccggtggcggccctgttcaacgtgggcggctttgcgaactttgcggccaacctggacccggcgctggtggagccgcatattgacggcagcattttgggagacatcatcacctatctggttttcaccatggcaggtgcggaaatgtggcagcgcgcatttgccgccaagagccggagggcggcaaagcgcgggatgttcctgggtacggccgtatacggcgtgaccattgtgctggtctactttatgggtgttgtgggccgtcagatcctcggcggcgacatcttggcgcagtatggctcgacggacgctgtcgttccggccctggcgatccggatccttccagccggtctgacgggacttgcgttggccggtatgctctcggtcatcatgtccacggcggacagctatctgctggtatctgtgcagacctgcgtccacgacatcggaaagaccatccgtccccaaatgccggagcggaccgagatctccctctcccgcatcttctccattgtcctgcccctgggcgcgctggtgatcgcgttgtacatccacaatgcatacaacatcctcatgttcgcctggagcttctatgccgcatcggctgggattcccgcatttgcagcgctgttctggaagaaggcaaccaagaccggcgtcatggccgggttgctgggcgggtttgttgtctgcgttggctggaagctggcaggccagcccttcggccttggggcggcggtgccgggcacggttgcctgcggtatcgcactggtcgttgtgagccttgcgacttataagcgcgcaccgtccgtattcctgaaagctgaaaagcagagctgatagggagctgctgcatccccatatcggaaagcaatggagtgaacattataagagccagccggaaattttgaagatccccggctggctttgttttggcgtattactgatagataaaaagtctccgatcagacagcagacctcgccactgctgtctttgccccaatgccaatggcacacaccgctttttcagatcgcgtcaccaatgcggcggtcagcgctccgtcctcagagcttccgacagcgtatggcagttcttcatcttctgcatcccaaaatcctgtcctgcacgcatcaactacatggcgggacggtggcctgcgcttgtgcgcctggccatggaccatctttgcaacaacaaaggttactggatttctgctgcggaaccggatgatggcaaaggctgagaagtgatcctgatctgtccggagcacagcttcagcagaccgatatcctgccgtgtgacgccacttatcccatgcggatttgtcagcagagcgacatcttccttctcgccaatccgagccattctcagaaaggaaactaatattgttcagaaaggcgaattgcaggaagaagtcattgcaaaaatataacaagcacgccctgcggagcgatggggagaaagaccaaaacaagggaggcacgcttttacaacccgtatccgtcattgcgggccgcccaccgcgcgggacttctatacaccatgatataaaacagttctgcgggcttttacgccgtcacagggcacagccgggcagagatcatttgtgccagtgcagaccgcagcaagaccaatggacctgatcgcctggaaacgcgtgctggatgggcgtacgatgagcgggtattccaaactgtattgagtatctgatcgagcgccagagcaccttcgccatgtggaaatttgccgcctgtgtcagtgagcttctggttttccgccgataggatattttgggataagggcgcgcccccagacaagcggccgtcatcaaggcagacaaggagcatgatgcgttcaacaagacccggaaaatggtctccgactctaacaaggaagtgctcagaatactggagtcaggagatggaaaataacttcattatataattggctttttcgtgatcttatggtatgatacccttacgctgtccagagcataatttctagaatgaatcccctctgtaatgtgagtgaatcaccgcaaagtggtactgttcggcgccgatgggcgctatctttttgtctgggcggatgtagaagcacggatgaagaagaattacaatatgcattgtatgccgatggttgtgctgttgaacctcggagaggatgcgctggttgtccgccgccaaggatatgaaggcgtgccgcaaaatacgggcctgcctgaatggctgacggacggagaaagggggcaaagtgatgcgcacactgattaaacacggactgattgtagacccggccagtcatgttcactccaaaaataatctgctagtggaagacgggcgtattcaggggctgactgctgaagagccggaagctgatgtgattttggatgccgaagggatggtggtttcacctggttttgtggatatccacatgcacgaggatccttatgacccagaggaggggcgactgattcccagcattatgacctccatgcttcgcatgggagtcaccacagcgattggtggaaactgcggtatcaatacggtctcgcctctgcggtatttagaattgatggaccgtgatggcggcccgatcaatatgggactactagccggccataccttcctgcgggagcaggccgggcaccgggacaagtacagtgcaattcggcccgatgaacaacaacggttgtcaaggctggccaaagaggctctggaagcaggttgctttggggtgtccttcggtattcgctatgtacccggtgtgacacgggatgagatggtgaaaaccgcctgcttctgccaaagccatggccgtcttgtggccgcccatgtgcgagatgacgcggataatgtattcggcgcggtggaggagttggtttccatagggcggcagttggatcttccggttcaagtttcccatgtgggaagcatggggggatttgggcagatggaacgactgctggccttcatagatagatatcgcgcctccggtatggaactgagcggagattgctatccgtatgacgctttcagcacgcgaataggggaaacaacctacgatgagggatttttggagcgttactgcacacagtattctgcgatagaaatctgcgagggtatgtacaagggacaacgatgcacggagagattgtttcatgaactgcgtcagacagcaccggacacattgacggtctgccatgttatgaaggcggaggatgtagctttggccctgtctcatccggccattatgctggccagtgatgggctgatggatcgggggcaaggacacccgagaggtgcaggggcgtttccacgcctgctgtgccggtatgttgcagccgggaagatgaacttggatgatgcggtcgccaagatgagtgccatgccggcccaaaaactggggctgacgagaaaggggaccttacgcaagggcgcagatgcagacatcgtaatttttgatatggatcggatccgggactgtgctacgtttgagcatcccgaccgtcctccggaagggatagaatgggtcttgattgggggaaaaatcgctgtggaacacggaacagtcaagcagtcaagtctaggacgagccattcgcgcttagcaatggagcaggagggagagacggcatggacgaatatgtgaagcggcagctttcctcagttccggggcatatcggattttactacaaaaacctagtcacgggagaaacggacggaagccgccaaacggagttgttccaagcggccagcgtaattaaactgccaattttggcggccatcctgctggaggagcgggagcatcccggtgtgctgcaggagcggcttttggtccgggacggcgacaaagtgcccggatgcggcgcattgcagcatatctccggtacgcaggcgtatgacatagaaagcctctgtaagctgatgattactatcagtgacaatacggctacgaatgtgttaatccgccgctttggcattgagttcctgaatgagcgattccgggtgctcggccttcaggaaaccaagatttttcgctttctgtttgacacggaggccgcacgtcagggaaaggagaatttatgtcaaccgaaggagatcggtagccttctggaggaaatctaccacggacgctgcgtgagtgccaatgcgtctgagcgaatgcgggcgatgctatcgcaacagcagattaaccataaaatccccagcctgcttccgcccaccgtgcgggtggagcacaagaccggcgaggatgaggggattacgaatgatgtggggattctatatgggagagaaccctgtgttctggtatttgtatccaatgaaactgatgtaccggcctttgagcaggtaatccggacagtgagcctgcactatatacgagtgtgatgacagacatatggaaaaaggagaaaacttgttatggccattattaagacgatctcggaccttctgtggggaatgcctctcatcgtacttattctgttggctggcattatctttacggtcggctccaaattctttcaaatcgcacacttaaagcatattctgaaaaacaccattggaacacttttttcaaaaaaggacaacggtaagggcatgatgaaacccttggaagtaatcagcattgccgttggcggagcagtaggtgttggcaatatcggcggcgtggcgaccgctatcgcggtgggcggaccgggtgcagccttttggatttgggttgcggcctttttgggcatgatgatgaaaatggccgaagtttccctggcggtatactaccgttcaaaggatgaaaaggacggctattatggcgggcctacatactatatggagaaagggttgggacgggataagggcttcaaattctggggcgtgctggcggttatcttcgggatcggcatttttggaaatgtcttttccatgcaaaacttcacggtcgcacagtccgtcaacgccacttttggcattccatgctggcggtaggtttagtctatgttggtctcacctatttggctactgtccgtgagattccttggctgggcaagctggcggcgaaagtagttccccccatgtgcgtcttttacctggtaggcggaatcgtgattatcatagtaaatatcacacaattgcccgcagcacttggactgattatcagcgatgcatttaccgggaccgcagccaccggcgctttcatgggagcgggcgtggctttgattatccgaaccggcttatcccgcgccatgttctccagcgaggctggctggggtacatcgcctatgattcacgcctccgccaaaacggagcatccggtgaagcagggattgtggggggcatttgaggtttttgtcggtacgatgtgtatctgcacggttacctccttggttatcgtcgttaccggcctgtgggattccggcctggatggtgctccattgaccttggcggctttcgaaacagtgcttgggcctgttggaactatcatcatcacggtggccattttcctctttgctctttctactactaccggatggtgggcttatttcgaagtgctgttgcgccatttgtgcggcacgaatgaaaagctcaagcggaccttgattaacgtatttaaggtaatctaccccattcccgggttccttgtagtgcttctggctgcggtgggaaacgatatttctggtgcggatatttgggaaatcgccaatttgacaacgggaatacctgcctttgtaaacctgattgtcattgtcatactgagcggaaagttcttccaattgcttaaggactacaaggctcgttatctgggaatcggtaccgttgatccgaacttcagactttttgatgaagaggaataaaccgagcctgaaaatggcggattgagaagccaagaggggggcgtggctctgccacgccctccagcggcggaaaatatcaggacagcgcatccaacaccacatcgaacagatgcatagggttaagctgccctctgtcataacgctggcaagtgaatcaacgaagtccctgtcgcaggaaacggctggaatcaatgtcacatcggtacagactccatccatcacttcggcctgtattccataagacggaagtcagctggactgcaatggtacagatcggccatgcggcacacgatgccaaatggaggggcagaagtccctgcctcatacaacaagtgtacgtgctttgctgcggccgcttgggtgtatccggctttctcccggcttgctcgaacggattttcaggatgaccacctttttcggttctgcacattttgaattcctcctgtcatttttctaatacatttgggccgcgctccccggaaatccttgtgttttcaaggtttccggggatattttcttggccatttcccttgcttttttccttacgagatgtctgtaagggaaagctctcagctttcacccgcacccttatccagaaaccgggcggaagaacctgtggttcctttctttgcatgggcgtagatgttcatggtggtgttcacgctggaaaggcccagcagctctcggacatctttaaagacgctccgccataaattatgttgcttgtgaaggtgtggcgaaggacatgaaagtgaagggcctggatattatcgaatgtgatgttggctcgtctgcacgccgtagctgcccccagagcgtacaaatgtcccatcattccacaggcagacgaatgagaactctgtaaagcattcccgtggttcatctgtgcggggcagggaagagagcccgtaatatgtacggctcgttttcttcggagatcctgtgtcagctcctgatactgccgttaaagcgcgccaaatccatataatactatttgggaatgagtttgtttgtgcagcaataacagggcctactgcttaagtcaaaattgcaaaaaaagacatgcaaaatttgggaatgattccaaaatagtgtggtttgtcaaaaaaagtgttgactttttttgatggcggctttatgttaaaaacatgttaagaaaagaggacgcggcgatactggttgtttatttttcacaatagagtgccagtgtttttttgaccttaaaaatgagaacgttttcaagagggcgtgggatacatacatggcagcaacaatcattgacgtcgcacggttatgtggttactcaaaggcaacagtttccagagcatatgcgtctccggaagcagtcagtgagaaggcgcgtgaaaagatatatgcggcagcgaagcagttgaactatgcgcctaatgccatcgcaagggcgatggttcggcaacagacagaaaatattgcatttattatccacgaaaagcagtatcccgctattttgaatcctttttattctccgatgctggaagcagccatgcaggagggaacccgaaggaattacagcctgttcgtaacgaccagtcaggatatccacctgcccaatggagatatttatatcaaaaagcacatggatggagtgatttttgctggcgaggttgatatccgggtcattgaagagtttcgtaaacagagcattccggtagtgttggtaaacaactatttggatatggatggcttagtgtgcatttcggcagatcactatggcggtgctgtgcaggctacggaatatctttgcaagctgggacattgtaaaatcggcctgttgtccggccggttttcaccacaagttagtgaagctcgtatagagggcttcgttaaaactcttgctaagtatgatattcccgttgatgatcgttttattgctgatattgagccggcgctggaagatggcgaggaaatcatgacccggatgctgcggggggtggatcgccccacagcttttttctgcaccaatgacaccattgccgcaggcgccatgaaggcagttacccgggcagggctgagagtgccggaagatatagcgatcatagggtttgatgacagctatatcagccgtgtggtggaacccgagttgaccactgttcgaattgatgctgctaagatgggatgccttgccatgcaaacgttatttgacttaattgcggggatgccggtagaaaaggcgcatattcaaattcctacggagcttatagtgcggggaaccgcttgatgctatgtagaaatttgacacgctcctgatagagcgttttaaatggtgaagtcaaagtgcggaaggatgtgatgccatgtgtgttacagtcatcaatgtcggttacggagacgcaatcctctttcagttaaagaatgggtatactgcactgctggatggaggaagtgccctggagtcagaatttgaaggcgattcttatcgcattcggtcagcagattatcttgccagacagcagattgagcatttgaatgctgtgattatttcgcatatccatgaagatcatgtatgcgggctggaggcggtattacagcagacagtggtagatcatctctatgttccgtacccggtagagcctttcttaaaaggctgtgaactgactccagccagtaacgctccccgcagtgtaccgctatatgttgcggccttgaatgcgtatcggaggattttgcttcatgcgaaggaaaaaggcattcctgttaccgtgttgaaagcaggacaggtactgaaatttggaatagacacgaagatgcggatactggcacccaaaagctgtgttgtagatgcatatatggagatcgtggaacgggcatacagtcttgaggcggatacaaatgccgtgactgagtgcctgatccggttggacgctacatccaatcacaccagtatgctgttgcgcttcgaactgggagacatcgtttttctcagcgcggcggatagctgtccatctgaatgggatgaggtgcctgaaatttttttcaaaaatgtaaacgttctcaaattgccacatcatggacaaatagattcaatttcggaatcttttatgaaaaatatgccgttggagtatattattacgacctcggcatctgatagacggtatcatagcgcgaatcaggcggtatatcagaagctggccgcaatctttccggcggagcatccaccacactttttgttttcggatgagcgagagtatccgccttatttctcacagcccgaaggctttcaggctatcaaacttgtaatggattccgggatggttataccggagtttattagaattcaatgaaaagaggagagaaaacaatgaaaaaactcatgtcgctggtcctcgcactcgctatgattctgagtttggctgcctgcggcggcaaaaccacgggaacgtcacctgacagcgcaggcgattcccagcaggaaactcccgcgacttcggacggcgctttccctgaaaagcagatcactattattatgccctggagccttggcggcggacccgataccattgcccgccaggttgcctcctatggtgagaagtatctgggtgtgcccgtgattgtggaaaaccataccggtggttccggaactatcgccatgaacgatgcattgcaggcggaggatgacggttataccatggtggttgccaacggccccttgttctcactgactcccagcttcattaatgtcaactacacactggatgatattacgcctctgattggtatgcgtatcacggagttcgttgttctgactaactctaagagcggcatcaccaatatcgacgagctgaaagcctatgccgcagaggggaacacaatcaagtacgctaccacaggcggccctggcaacgacagctatactatgatttccgtcctgttcaagttattggacatccccgctgagcctgttccctacgacggcggccaggaggccatcaatgcgttggtgggcggccatgttgacgtggctatcggttctcccccgacttaccgcgattatgtgatcaacggcgaattgaactgcctgggaaccttcattcccgaggggctggacgtggaaggcattggccacatcagttcctttagggatcagggagtcgacgtggacttcaccggcatggactactttgcggtccgctcctctgtggatgacagcaagaaggaagttttgaccaacttcatcgcggaggtttatgctgatcccgagttccaggaatttatgaaaggcatgggcatggaagcctgggaggccactgagagcgagatcgttgatatggtagaagctcagaccgaggcgatgaccgagtatattcctctggtgcagtgacactctgcggtgccccatatcgccgagatatggggcacccattttaaaaagaggtattgaattatgaaaatcagatataacagagaaataatatcgggcgctatttttgtggttctgagcgcagtgctgtggttcctgattcccgtacaggtccagacgctggagaaaacgccaatcaacgcacagaccttcccccgtatcgccattggtggtatgttcctctgctctgtcggtctgctgctggaggggatcttcgtccgggagaagcaggagttgtatgtgacgaaagagagttttcgctccaatgcctttaaaaaagaaatgcgttccgtagtgttcgcattgcttttgatcgcctactgtttcctgattggacatctgggctatattgtctccacaatcctgctggtactggcggtcatgatgttctataaagccagaaagtggtactactatgcgattcctctggggatggtgggcatcgtgtactacgtattcaaggtgcttcttcatatttccctgccctgatcgaaaaggagaatacttatggaacaatttttaggcggactgcaagttctgctgcagtggcagaactttttgattattccggtggggctggcaatcggtattattgtgggtgctatccccggactgacctccgatttaggtctcatcctttgtatacccttgacctatggcatggatcccacgatggctattttaatgctgctggccatctactgcggcggtacctacggcggttccatcactgcgattctcatcaacaccccgggtacctcggccaatgcggcaacgctgtttgacggttatcccatgacccaaagaggacaagcgttcaaggcactgcaaatggcactgtacgcatcaaccatcggtggccttataagcgcatttgccctactgtttctggctccccagatcgcaaaaatcacactgctgtttggccctgccgaatattttgctttggcagtttttggactatccgtgattgcgggcgtctctaacaacagtattttcaagggactgatcggcgcttgcatcggcttgttcatggctaccatcggcatggacaatatcagcggcaccgcccgctttacctttggaagcaatcggctcatgagtggtatcgacctgatcatcgccctcattggactgtttgctatctctgagattatgatgaagtcccagtatgatccaaggaccgaccacaagactatcagttcttcagccatcaccagagataaaatcacgaaggacgagtatcggcgatgccgcaaaccaatcggcattggctccctgatcggtgtcattatcggcgcaacccctggaactggcggtggtttggcggcgttcatctcttataaccaggtgaagcaatcctccagccatcccgagacttttggccacggcgagatcgagggtgtggccgcctccgagtccgccaacaatggcgcctgcggcgcaacgatgatccccatgctgacgctgggggtcccaggggacggcgccaccgctatcttgatgggtgcattcatgatccacggcatgatccccggccccacgctgttcgaagagcagggcaatattctatatgccattatgctgggcctgatcgtggtcaatgtgtttatgtatattctgggcagtggctttacccgtttttacgcgcatatcacccgtattccctacgagattttggcggctattgtattgaccttttgcattgcgggtgcgtattccaccaataaccggatgtatgatatctacatcatcctgatcttcggcattgtagcgtatttcctgcgccggatggattttcagttggttcccattctgctcggcattgtgctggggcctttggccgagaaaaacttccgccgggcactggtgctgtctgacgggagtctggacattttctttacccgtcctatcagctgtgcctttatcttgattgctgtaggttctattttgctgtttgcctggaaaaatcacaaggcaaaggtaaaaaccacacagaaataatacagatctgcgcaagtactgagacatctccttatttgagcattgccaaattcatacaatttgaagagcgacggtgtttgagatgaagaaaattttgaaaaggcttttctgcttggctatcgctgttgtgatgttaatgagtactgcgggggcagaaggaacctccacttatatggcttaccggtcaaatgccgttacaatatcagcagctgacggacttggcatcgtaagtggaacattcgtaataaaggatctcagtattacaaacgggcaagatcctgatggtcgcaactatgttggacaggtgcatacacttgaaaatggggaatttacattcagcgttgggcgcagtgcctctgaaagcgttgcatcatggttcaattcaaagatctcaggatataatgatccttctgtgaacggagatagaacaacatttgaccagactgctgatgatttgaattttgcctttgtcggtgatttgaatttggttgtggatactgccgatgatccgcagggtctaagtgttacatttcctgatgttgttattgctcaggggagcaccttgtttagaaataattggtggtttggtcaacgctctggccagcatacaagagatagtgacggccccgacactgtattggcaattggaagtacgacagagggaagaacagtttatgcatcgtttttgagaggcggcaacgaggttaatgagatttctctggaagccattcacgtggtagaagctgctgcggatagtgcgaataaagttgtcgatgttaaaaataaatttgctgcgcttccgattgatggtgttcaaagcaatttggaaggtttccccggcagctatgaccctaccgtaaatcatatccagggatatgcgcagtatgatagttgcgatcatactcgatattctattctgacgcatagtgtaggaactgcgccctatgcgcatattgtcgccggccccaaaacgggcagtgacaagtgggggttcaaaacataccttcagaattggagacatcctggtggcgttcaagtaatgggagattatctgttggttccctctgaacaagatgcttccgcgcatatagctttatatgatttgcgttcattggccgtaaaagaactaagaagagttgagacatttgacttagctgtaagccataaggctggtgctttggggattacttcttatgaggataaaaacggcattgagtattacgtgatgatagttgcccatttagatggcgagaatactgtgtaccatgtctatcgtgcattggcatcaaatggcattgaaaacgcccggttctccgaagttggaagttttgaatctgataaggactttcaaggttttggcttgattactgaggatgggacaaatgatatttatatgatagggctttggtcgccaagcgagggtgtgacatttgcggattatgcatacctgtaccagttgaatacggaaacatggaccattggagaagcacttcagcagattcacatggtcagtgttggtggaatggctggtatgatgggagttcatttccgttatggcgcaaatgtatatgttgcagacgatggtacgctaactttatccgctacagagcggaactcggttttgggcagctctttggcaacaaatgattggattcctgcaatcgtaaactaatatttgacgatatcgttatgtgaggaaagggaacgggctgtgatccgttccctttctccacagtgaatattctattgataaaccgcatgatggtggatatcttgttttgactgacaatgaataaaccaaagctgacccgtagtgcatagctgggggagaactacggcgaattggctcaaagacatcttcttcggttttttaagcagttgcgctaaagcttgcatgaagcaatctttcctgttcctttatgtaaatgcatggcgtcgagaaggtgccatctcccccataaaacagactgcatttcgcaagagccgattggaacgtctcctgaccggcacgctggcagatcttctgtttattctcttaaaagatttctgctgtgatttgcttttcggctctgccgggcggggctttagaagtttttggctttccggccctttagagtgagcagcaaacaagaaaccgtcaagcctcttttgatgcttggcggtttcctgtttgacgcttatattgctataacaaatttcagggaggtgtcacgaattttgaggacttcaatcaagcgggaatgagtcgcttttcgagtttagaagtgatccgccatgtcctcacccgaaaacatcttaaagggaatccgagtttttaggatctgatcggctgcaatttacagcataccggccatcacaccggccaccaaaatagagaccattgcggccataccgcccactaccaggcgaggcatgacccggctcatcagaaaggccttttcatcctcatcctccgccacagcattgcatacctccacagagattaggtaagtggaggggaaccccagcatctggcagaagcctacgccgaaggccatggacttatcccccagaatcttccacaccggcaggactttcatcataacaaagatggaaagtaccgacaccgcgaacacaaccaccagcgggaggatcaggtcgatgaggtcggatatggagatgttggccagggcgggaatgatggcagcgaacaccaccatgttgataaaaccgctggcttgggctttctggaggaggttcttgggcaccacacccagctgggtgaagatcacgcccaacaccagccccaggatggcgtagttgatgtgggtcagctcacccagccatacagagagcaggccgccgactactgccagcaaaatgcacacattgctggaataaaagccgtcaaatttctcggccaatgttatcctcttggacgctgtctttgcctcgctgttccgattctcggatttgcccgcggcggccataaactcgtccagggtgccgctggatttggccttccggtattcgccgatcaggccctgggcatagcggagactggcgctggaggcaaagggcgtacccacgaacttctgcacggcgaaggtaatggcagccagcgcggcggccagaggatagccagccttggtggcagcctccgtcatgatctgcgttgcgggcagagcgccgttgactaccgggatggcgctgagggccatctccttgccgatgatagggatggtcagtgagacgccgatgattaccgccagcataccgaaccagcaagtgaccacagtccgccactcatccatgaactggcgcaggttaatcatggaccccatagcgaagagcagcattggcacgctccagctggaagcggcgctgagaccggccttttcgatgatgtcggcgggcaatacgccggcgacgaacaggaccaggaacagcatcagcgtggcgaacaccgaggagatccgggctttggtcagcttggccactacgtcgccgacagcgaagagaaccatcaccactgcgaaccacagcaacatatcaaacacttgtcattcatcctttctctatctgtttattgaaagggccgcccggcgcagccttttagagatactggtcgaaccagtcgcacagagcgttgagccggatcagacggttgaccggccgcccggaccggttgagctcgtggccctcctgatgaatcaggaccaccttggaaggaacaccctgctgacgcagactggtgaacatctgcaggggctcgtccatccagcagcggtagtcggtgttggagtggataaacagggtgggagtggtgacattgcggacgtacttcaggggagacttgtcccagaggatctggctctcgtcccagatgacgcctttccgctccagggcattgaggcccatgtgctccagcaggaacagataccccttgtcacaggtggagatggaggtgacaaagttggaaatgctccgcatggcacaggcagccttgaaccgctgggtgtggccgatgatccagttggtcatgtagccgccataggacccgccgcacacgcccaaccgatccgcgtccacgtccggataacggcgaagcacctcatcggtgaagtccatcagatcctggtaatcgatggtgccccaccgacctaccagatcgaagtaatcctgcccccgaccgtcgctgccgtggggatttgtatagaacacgaaccgaccgccagcggccagcagctgcatctcatggtagtactgggaaccgtaggccgccttggggccgccgtgaatgttcaatacgccgggatacttcttccccggctcgtatccggaggggcggatgacccagccatccacctcctgaccgtcccggctgcggaacgtgatgtgctccggacgtgagatctggcgggtctccagaaaggcgtcgtggaattgggtgagcctctccggttccccgccggagaggggctggcggtacagctcctgaggccggtgatcccggaaagctgccagataggcgttctctccaatgatatcaaagcaggcaatcccctcataggaggccacaggagcaaagttccccgccttgtcgaagcgcagcagggcggtgacgtcgcgctggagacggacggcatagagactgtctccctggacggcacagaccttgccgccgcccaaagacatatccccgatggcggaggtacccaaaaaaccgtccggggcgcagaaggtccggcagtccccggtggccggattcagcagatagagcttggggcttcgggagacgctggtgtgtgggtcgccgccctcgaaccagatatccgtgccccaccagcccacctgggtgatccgatatttcctatcggggaccagtgaccgggtttggccggtggccagatcgtagagcatcagctgccggtagtcaggccggattccctcaaagctcacaccccaatagaggatccgagagccttccggagagactgccgctccttccatgtcataggtgggaggggtgatctggtttacggagccgtcggcaggatcgaaaatccatccgctcatccgggtgccgttaatcatccccagaccgtcggcccagaagggcagttcgtcaaaaaccgtatagtcacggccgggctgaggctggtccgcaggcaggtcctccggaggggtcatgggccgccgggtcaggacgaaccatcttccgtcgggcagggggtgaaactgctttaccgacaggggaatggtgaaagcccgttctgcttcgcttccccggatgtccagccggtaaaaggcggttttaccaggctgatccccggtccggcaggaggggaagatcagcgtatttgaatccagccagcgaaaagcggcctcgtcgccgttgccggtcagggggcgaacggcgccggttgcggtgtccagcagatggatgcaggcgtaatagccttttccatcatctctggcccggcgggacacaaaagctgcgtgagccccgtcgggtgcgaccgccacctcggagaggaatcggtatgcgtacaagtcatctgctttgatgcgttccataattatgcctcctgtttattgagataccgctggtaccagcggagcatttcctccagtcgccggagccgctgacggggccggccggagcgggagagttcgtggttttcccctgggaaaagacacagccgggagggaactccccgcagctggagagcggtgaacatctggatcgcttccagtttccagcagcgatagtcctcctcaccgtggaggaacaatgtgggcgtggtcacatgatcggcatagcgaagaggggactgctgccactggagatcccgatcctcccggtgggaagcgccggtttgccccttggcgaagtagtagccgatgtccgccgtgccctccatcccggtccagtttgcgatggaccgctgggagcaggctgcctggaaccggtccgtgtggccgatgatccagttggtcatgaaaccgccataggacccgccgccaacgcccaaacgggtgggatcgatgtccggccagcgggccagggctccgtccaagaaagccatgatatcctgatagtcgatggtcccgaaccggccccggatatcggcaaagtcatttccacggccctcgcttccacgggggttgcagaacagaacgaagtatccggctcccgccaggacctgcatctcgtgaaagaacaccgagccgtagctcaggcggggcccgccatggatggtcaaaatggctgggtattttttgccgggaacgtaggccaccggcgggagtacccacccctggaccggcagcggacctccggtatccacctccagcggctggggcgtggagacggcgcagcggtcatagatcccgtcgttggcgtgggtcagacggatctcccggccatgctccagagtgtagatctctccgatccggttttcccgaaacgccaggtacaccagccggtctgccgcggcatccaaatactccacactgcccggcccggtgagggggcgggcctcgccggaggtcagatccaaagcctcaatccggctgtcccggtccacggtggagaggaaatagagcgtgtctccgcagacgcgccaggtctctccggcaccaaggcggctgtcggtggccacggtgttgcccacacaatgatggctgtggcggaggagcagctctggttctcctccggagagagggatggtgtagaaatcgccattttccccatttccatagccaagcccgtcggtaagacagagaaccgcctggtcccgccaaagggcaaagagcttcaccagataccggtcctgttccaggaggcaccgggtctctccactggccgcgtcccagataaaaacaccgtggcgcagagtctggacatccgtgaagcgatgaccggtatagaggatccggccatcttccacggtaaagcctgtaaccttgaagggcggcgcggtgaggggggtggttacgccggacgcagggtcgtggatatacaactgggaccgctgcccgctggtgaggcccaggccgttggcccagaagggaatgtcctccagcacatcataggtgcggtttttgtattcctccagggccgaagcttcctccgggggactcagactgtccagatttgggcggttcatgtccacggtggcggtgaaaacgaaccgcccgtccgttaagcgccgggccctgcccgcccgcatggggacggtgaacaggggctgcgcctcgccgccatccaccggcagcgcgtaatatgtagtggtatcctgagaagcggaaccggctgtgcctcgcatcccggaaaagaggatggtccggttatccatccaagaaaaagcccgcaccggactcagggagctgaggggacggtccgcccccgtactgtggtcatagacccacagccgggcgtcatagccattggaggccaaattcgcctgctggcggatataggcagtgtaccgaccgtccggcgagagacccaggtcgctgagatatcggaattgcaggaatgtttcgcagatcataggctccatcatattcactccatttcgtcattgactacaaatttcatcctgtaccagcggcaccgcagatgtgtcctgctgccgggagaggcggcgtctggaaactggaaatagcatcctgattttaattatttatttttaattaaaaataaataattaaaaaatggccccatccttacaaccggcgaagcacaccttcgatatgctgctgtaaacagtgctgggccctcgtgatatctccggaacggatggactctactaggcgaacgtgatctctggctgtgccgctaaagtcccggagccgcaaagggcaaagcagatagttggacactagaaagcgcccctgtacccggtcatacgtctccagcagaatcctgttccctgacgcttctacaagcaaccgatgaaagcggcggtccaacatggcgaattcttttggagaaaaagaactgccggtgaggcggacaccctcttcactgtaacgattcaactgggctaatacggtttctgccgacagtccaaggccggacataaaccgctccagcgcatgtccctctaccatttgacggacttcacacatctggcgcacatgctcctggtcatactccggcacatagatgcggccattacccatgatctgaaggatcccgtcattggccagtaatttaacggcctgaaccaccggcgttcggctgacctcgaagcgatgagccagttcgtccaaggtcaggttttgtcccatctcataatcaccattaatgaggctctcaacaatatgctcatacaaaatttcgtccaggctgttctttactttcatggaattcttcctccagttaaaataagtgtaatcgagaacagagaaaaaaacaatagggaatagaagtgtcatttattgggcggcgaaaattcatgataaattcacaaggggttacaagaaattattgttaaaaatgccaacaagatgctatatgcgtttgtttctgattcttatatctaccatctcgcttcacattagataggccttatcaaatatcctatccagccagcagccagtgtgatgaggatgaccacaacatccccgccgggaaattgtgcgagggaagagaagatgtcagtccaaacagcatcaaaatccatgccaatacaaatggaacgctgtatagcatcagcgcagcttttccgacctttgcaaaaggacgatgcaacaagttcagcttcctttccggcagcgccgccgccagcagaaccttgctcccgcctgtcccgatcagcattccaatcacggccccccggacggcatccaatgccagcagcctgacagccgcgggggtaatttttcgtgttgccttttgattcatggggacatccttggtttttatcccctcttgttatcggcggcattgtagcatgaatgaagagcgataggctggattttggccccagatgtgcgtcctcggctttaaatgcgagttagtcctatgcgttcaggacaaattgcatttattcaggacaaaacctttcaatctgatatactgcgggaaaagatggacaagaaaggattccgcctatggtaacgatcattctttgcgacgacgatcccttcacattgcagcttctgtccgagctgctggaacgggcgatccggcaaagcaaagcagaggccaacttgtctgtctggcctctgctggtcaggagccgctccagtttatccgcagcggtggaagttatctctatttcctcgattatgacctgggaagggattccccccaacggcgtggaccttgtccggcagatctaccacacggaccccggcgggaaaatcgtctttgttaccggccatggggagaagggcatggatattctgcgcagcggcgtgcggccctttgggtttattgaaaatgtgtggatcagaatgagatggttcgggagtggagtatattcgatatttgaaaatggcggtgccggagcagcaaaacagcgcggacggggacaccgtcgaactgcccatcgggatcgatgaaacggtacggctgccggtttctgagatattgtatgtggattccgtcaaaacagtggcccattctatttgctgtcatttgacgggtcagggggtgactgcgcgggagacgatcgaacacgcccaggaacagctggaagatcaggttatccgctgccgttgctctgttttagtaagggacattgccgccgctgggcagttcagcgtttgcgataaaataatttttaagacgcagtgataaaggggctgcatatatacgcgcaagatagaacagaatttgtgaagacagcgcctttgcgttcctataaccttggtccgtggagatcggaatttacgaaaaaatacaggaattgttcaggatgccgttacagctgttgacattgatgatgagcgaaccgctctggtgcttgtcagtcttactcctgacgggaatatttgcacagaaagaacttattatgcgatgatttgcgagattgatgcgacggcatgtaaagttacatttcatgttactgacgacgtagcgtagccctcaatcaaatcctggtttacgattgaaccctatgggccgcagagtgcttgcggcctcattctgtttaaaaccgggtatgaaattgcggcattaaaacgcatagtccagcgaatagagtatgaagaggccagggaacggtgatcttttcagattgctgcaccctggctttttgttgtcaattgaaattcaaaaccgggatttcaatttttgtaatatagtcctcgattctgtcgatcaccagttcattgatcccaatctcataggcatagccggagaactgtaaatggtgctgctctgcgtagcggaggatcgcttcatagcgggcaggcagcctgtcccaattcccaatgcagaatgcccgcaaatagaccccgccggggcacctgtggagtcccatcctgttctgcgtgtccggcagttcgataaacagcttggagtagtcctcaaacctccgggccaggaggttttccaccgggagcatggagccgtagggagtctggtacatacgcggaagctgatatttcttggtctgctcaagaatcagctcaatctcatcctccagggacttttccggtgatgtttgcaccgtcgccagatactgcggttcccgctcaatgagggagatctcggagaggtccaggtccaaaagttcggtcatctcctggcggcggctgcacagttttgaccggacggccttcagcccctggatcgtccggtccagttctgagattttatcccgaagcaggtccgccatgctcccagcggacctgtttttcataaattcctgaatatcccggatgggcacgttcatgtcccggagcagcaggatcacctccagctccgtactctggtaatagctgtatagccggtacccattttcttcgtggataaacgcaggcttaaacagcccgatctcatcataccacatgagtgtctttttgttgatcccatgcagagcggcaaactggccgatggtaaacagcttcggtttttcccgcagcattttcaaaaacccccttgaccgtacagtaactgtagggattatgatactccatgccggtaactaccacaagaagcaggaggaatttccgtgcagaatgaaattgcatacagcagacccgtcaccctgacaaacattcttaaatttgcagtccccaccatcgccatgagcgtattcatgtccttctatacgatggtggacgggctgttcgtctcaaacctgatcgggaccagtgccctgtctgccctcaatctggtctatcccgtcatcgcgctggtgacggccatttccaccatgcttgccacaggcggcagcgcggctatcatgagaaagatgggagagggaaagcccgatgaagcaaagcaggactttacgtttctgatcctggtcaatgtcctgaccggccttgtgatgtgcgggctgggctatctgttcatggggaagatcttcggctccatgtccctgtccccggaggtctccgcctattgctgggaatatctgagccgttacctgctgttcaccgtccctattcttctgatgaataacttcaccctctatatgatcgcagcaggcaaggcgtccctttccctgctctgctccgtcgccggcggcgtgaccaatatcgtgctggactacctgtttatcgccgttttccgctgggggatcggcggggcggcggttgccaccggcctggggtactccatcacagccatcgtgggcctgctggtgttctccaaccggaacagcctgctccattttgtcaggccggtctgccggccccaaacgctcgggagagccgtcacgaacggctgctctgaaatggccaccgcgctggtcaacggcatcatcacgctgatgttcaactggacgatgctcaaatatgtaggggaggacggcgttgccgcaattaccatcatctcctatgtgctggcctttgccgggtccctgtatgccggttatgcctacggggtggcccccatgctcagcttttattacggggaacagaaccatgagaagctcaggaagctggtccgcaccagcctgaaaatcatcggcgcgatcgcggcggccaccgtgctcgtttctctggctgtcacagagccgctggtgtccatcttcgcccggcccggaacacctgtctatgacctggctgtggcaggaaaccggatctgttccctggccctgctctttgtgggcttcaacatttttgcaagcgggatgttcaccgcactttccaatgggctcatttcggcagtgctggcgttttcccgcacctttgtctttacactgatcgccatgctggtcctcccggtcattctgggcgtcaccgggatctggctggcgacaccggccgcggagctggcggcagtcgtcctgtccgccgtcatgctcctgaaataccggcggcgctactgctattgattccagggggggagtattttgaagctggtgattttgctggccgtaatcgcaggaaaatggcttctgtgcctgtggagcggcctgggcctggttttcctgctcttttggctgaaagggaagcagttcaggggtaatagcgaaaaatgggacgatttctttctcaccctgccgccgcaaaaggtggagcagtacgcgattggtatttatctggccgccgcgctgctctcgtccggcatcagctattgtgtcctgaaatgggcgggcttccagcacagtcttttgatcgcaggtgcgctgtttgtggtcggagccttgattacagagtaccggtggttcacaaaaaagcgggactatgtgctgaagcggtatcaggagatcccgcagacgattttggaaagaagaaatggagaaaacaaaatggatggacagatcgtattgagagaataccagacatcagaccgcccggctttgatcgggatcatccgggagacgtggcagtatgacaagtttgcctcccccaaggcggcgcagaagctggcgcgggcctatctggacagctgcctcaccaatcagacctttacccaggtcgcgctggtggatgaagtcccggtggggattatcatggtcaaagaccgcagggagaagagatgcccgttccgcctcagactgcggatgctcctctccgtggcgtcgctgttcctgtccaaagaggggcgtatggtcactaggttcttttccggcgtggaagagatcgaccagcagctcctccaggacacccagaccgagtaccagggagagattgccttctttgcggtcaattccagataccggggcatcggcctggggaagaagctgtttgatgccgcgcgggattacatgaggaaccggcggatcagcaatttcttcctgttcacagacaccacctgcaattacccgttttatgagtgccggggcatggagcgccgcggggagcgcgtccacacctttgcggcaaagagaaaatccgggaccctgaccatgtttatttacgattccttcatagaatgttaagacagtttctgtcgttttccccttcacgtgtgataaaatgcctttcacggctcaacgataaagaggtgtcttttacgaaatccagacagcgtattctcttcctgaccgcagcggggcttctgattgtcggaggtggatggttcctatactccaccggctttttccaggcggcgtcctctcaggaatccctgcgggcctacattgacgactttgcgccatactcccacctgtgttttttcctgctccaatttctctctgtcgtgctggctccgatccccagcaatattaccgctgccgcgggcggtgttctctttggaacatggccttcctttttcctcaccttcgccgcagtagtcgccggttccctgctgttgttctggttggcccgggtgctgggccgggactttgccgggcgttttgtcagccggaggctgtctgaaaaatatcagcagatcctccagaccaaggctccggtgttcctcactctggcgttccttttcccctttttcccagacgatcttctgtgcatcctggccggcctgtcctcgctctcattccgttgctttgcggtgatcgtcctgcttgcccgcccctggggactgctctttgccagcgccctgggcggcgccgcctttcatgtctctccgtgggcgatggttttgatcggtgtagcggggttagtcctgtttcttctggggatgaaatatggggatcagatcgaagcggccatcctgaagcgcctgtcccggcggaaaggcaatgatgcggcctgctgattgcggcagaggttccggcctctttggctcaatgagaatagcgactgtggacagccccaacaaggcggccgcttccggatttctggcggcgctgtcttgttggggcgtaatcctgctttgagacaactgggattgtgttgggccatggggcggcttgtcttttatttgaacttcccctatactataacgatggatatattttgtatgaaacggagaatttggtgattcttgatgaataaaaaagatttgaaaatgcggccggtaggcaatgagtatctggaacaatataacgccctgctgcgctatgtattccaggtgacggatcaggagctcagttccgtgggctggcaggagaaggagatcatccgggcgaaatttccaaccatgcagaaagcggacgtgatcggctggtttgacggcgacaccctggtttcccaggtggcggtctatccgatgcgcgtcaaggtttttgggaagacctattccatgggcggcctgacgggagtggggacctacccggaatactccaatatgggcctgatgcacaagctgctggagcaggccctgaaaaacatgagggagaaaaagcagtatatctgctatctctacccctattcgatcccctattaccggcgaaagggctgggaactgatttcggacaagatttcgtatgagatcaaggactatcagcttccgaaaaaccaccaggtcaccggcagcgtgcgccgggtgaaggcggacggcgaggaactgaaggagacctacgcccgctttgccgagcatacccacggagccatcctccgggatgagctggcctggaacgaatactggctctgggaccgggacgatatcatggcggcaatctactataacgagaatgaggagccggacgggtatatcatctactggatcgaaaatgaagtcttctatatcaaggacatgatcttcaaccatgaggaggcccgcacggggctgtggaactttgtttccgcccacttctccatgatcgaccgggtggagggcagcacctatacggacgagccgctggccttcctgctggaggacgccagcatcaaggagtccatctccccctactatatggcgaggattgtggatttccccgcgttcgtcgcggactatcccttcaaggcggacggtacggagcgggagtggcgcttctccatgacggacccgatcatggagtgcaaccagggctcgttcctgctgaagatatcaaaggacggcagggggacggctgtgaagatctccgagccgtgcgccgacagcatcagcatccagaccatgacgaccatgctgatgggctataagcgcccggactacctcgccaaaatcgggagaatccacgccggcggggagacgattgacatgctggaggacgcgattgagcagcagccaccctatatatccgactatttctaagggccggaatatcattttttcagactacttccacaaaggcaggtgatcccccgctatgcagaaagttgatttgctggagggctccattgttcggagcctgaccagtttagccctgcccatcatggccacgtctttgatccagatggcctacaatatgacggacatgatatggatcggccgcgtatcagccaatgcggtggcggcggtgggcgccgcgggaatgtatctgtggctcgccaacggccttgccatgatcccgcgcctgggcgggcaggtcaaagtggcgcatgagctgggcgcgcaaaatatagaacgtgcggcctcttatgggcaggcggcattccatctcggggccttgctggtggttctgtttacaacgctttgtatcacactcaacgggccgctgatcgcatttttcaggctgaacacgccctctgtgatcgcggacgcacgcacctatctggtaattgtggcggccggatttttcttctcattcttcaatcagatttttacggggatgttcaccgctatggggggaagcgtggtggttctgcgctccacggccatcgggctggtggggaacatcattctggacccgcttatgatctttgggatcggcccattcccgcagatgggcgtggccggagccgccacagccaccgttctggcccaggccatcgtaacagccatgttccttctggcagcccgccgcgagatgaccgtttttccgcaaatccatatattccaggccagtcagtggagggcctgggcggagattttgaaaatcggtttgcctgtctccatccagagcatgtttttctccggcctctccatgatcctcgccaggctcgtcgcgggctggggggacgccgctatcgcggctcagaaggtcggttcgcagatcgagtccatctcctataccacggcggagggatttgccacggcggtcaacgcatttatcgcacaaaacttcggcgcgggccggatggagcgcatccgtaaggggtattggacagccatcggtatgatcgttgtctggagcggcttcaccacacttatgctggtggtctttcctgttccgctgttccggatattcattccggatgaccacgtgctgcagaccggcgtgagctatctgcggatcatgggttactcccagatcttgatgtgcctggagatcacctcctccggcgcgttccagggactgggccgcccaatgccgcccacgctggccggtatcatcgggaacgccgcccgcatccctctggctgtattcctcagcgccacggtactggggctggatggggtctggtggagcatcagcatctccagcattgcaaaaggcatcgtcgtgttcacctggtttgtggtgatcctgcgccgttatacacaccggcaggcgcagggagttgacggactggagtgactgtccgcaggctgattttgggtattgtgccaggatacaatgcctcgaaaatccaccggcaggaggttgtacggttgcgggatattgcataccaagcgtttcaaaaaggaaattgaccttgcgctgctggggatcgagaaatgggcggatgaccgtgcctatttctgcacacccagaaaagccgggatcataggcaggaacggagtatccggagcactgtgccgccatgagttataccgttacgctggaactgcaggacggcgctatgacccttgcggaccgcggcgacggggatcgccccagacaggcgccctgcgccccggatcagccgaagactacttcgtatgtagcagggagcgggtttatcggcggtgcggatggcccggcatccgcttttgttggagaggagcagggaaaacttcggatggcctgttccttgcttcgtttcggcggagaatgtggaatagcggatgattttccacgaaaagcagtttgaggacatgaccctggagtggactccgtcaaatgaggccaagcattccatatctggaagatagaatacggctgaggtgcctgcgctgttagcgccgacgtgacttgaccaaaagagaggtggaaaaatcctagaccaaaatgagtaactaagtatgggacagggcaggtttctatatattttcatcctctggtcaacaattcaagacagccgctgtggaggttcccacagcggctgttcgttatgattgtcaactccgtcccgttctggcattggcaaaccggtcgactataaagttatatacataatagaaaaggacgccgaaacaacacccgatgatgttatttataatacggaggataattgctgattttaccccaaagatatttgtagccataagaagcgcgccaaaacagttcagaagggttttccaatgataggcggcgcagaggccgagcagcaatcctgaatagattcccagatacgagtgggcggaagccggaagcagttggtatacgatcccaaataaaacactcccagccacgacgccgcccaggcgttgaaatgcccgtttgtttgggcgctcgccatattgcgataggaccgtcaggcaggcacagcccacccacatgatccggtctacctgaagtagttctccgacaaggattccaagcgataatccaagcgtcacctgaaactgccattttccgaggggatcaaagagggaaaagtctttcacgatctgcgagaacgttttgccgtaatctttcttcctgtgattgatgtagaaaatgattccgcacagcaggcatcccagcagcatttcgaatacccggagcacgagcagatgtccgccaaccggattcccgtataggaacatataggcaaacaggtacaggcccgcccctccgtataacggctcgtggcaggcggagatcacgataaagccgatgctcaagaagttgatcagaaacccccacgccggatttacggactgcgcaatgcaagggctgaaggtcagcagcacaaagacaataaagaagtttatcagggagcttttgaggcagtagccgaagtcaacaaaccggaccgtcagcagaatgcagaagattaccacggcggcagagctgttttcatctccaaacagaaagtttagaatagaaataaaaacgactgcaaagagaacacagaggatatccttcacaatcaaggccgcaatcaatttgtgccgttcagacggattcgctgcgtttctgattttccccttacatacagagacatctaattgcatcgcctgataaaagttcatctggaccttcctttctcagagcataatcctatcatatccggcggggaaatcaagaacgtagcctttgtaaaaaaactgtaaacagttccggccattgggactgttaaagccgatccgaattgatgaaaacaggcggcgccttcccttagccggaacaaatcagaaaatttggggagtcactgtcaacggcgtgggtgcaagggagcgggacagggtacttacagcttcagcttcatccggtccgtctgaatgcccctgcctgattagaacagagagttgtcgttgttctgatcggcaggggcgttttgtgtccgaagccatttctgcgcaatggctttggacttttctgaataggagtcctatgttgcctgctaaatacaaacggagcaaaatgaaagcgcaaaatatgaaacggatgcggcggccggactgtcgctccctcgcaccggacatccttcgcagcaacgcatcagccatggagtacaggccagctccggcccactcttttaaaaaatgtttgatctgccgggaccttcctcttaaagcggcagaaaaccgacgctggcaggctgcttgaagttacgactgcttttcaaatagaggatagttctgcgcatctcctgaaaaacggcaggaccttattttcctgctgcatgaatacctgccggaagccatttccaccagttgtacatttccgggcgaatgcggcgcagggtcattccggtcactgccccatcgaacatggggaagttcctgtatagaaaggagtatcagccgccgcaggcggctgattacacacgtacagcgaaactcaccaaaagactcgaatgacaccgcaggtcacggtggtggtaatgattccggcgatgaggacgccaagcgcgatggcggggagggctgtccggagccggaggtccagcacatcggccaccagggcgccggtccaggccccggtccccggcagcgggattgccacgaggatgatcaggccgatggtgcgatactttttcacgattcggcccttgaggtgtgcccggcgctccagccagtcgattttcggtccaacccagctggatttgcgcagccagtcaaaaatacggcggagcaaaagaatgagaaaggggattggaacgagattgccgaggatggcggcagccgccgctgcggctggcggcagaccggcggctataccggccggaattgcaccgcgcagttccagcacaggcaccatggcaatgaggaatgtcatgaggagctcaccgaaaaaagtatcaaacaaatccatagactacaccttttgtataacaaatgtaacgattgcattctaccatagagcgccagatgcagcaatgtttatttttatctgtacaaatcgaaacatgtatgtgggcggtaagcaatagagggcagacggtacagccttaccctaaaagaagaacggcccaaaccgggaggggggtcgggaggaacatctggcaagccatacattatatatattgggacagagcgtatcaaagtgcatggatcgcagacgatctgccggaatgttacggttatattacaagagctgcaaatctattgcaaacagaaaattgatctgatatgatgcgtctagaacaaatgaggaatcgctcttggctgcccggtacagatacaggaatggctagccacggtatgtgtaccgtgtaaaaaagaggcttcactcaggcgttctgaacttctaaagccgaacgctcaccgaggtagttttggggggggccgcgtttgcggagtgtatctctccaatttgccaaaatgagggaacggcggaaatttaaaggaggtaaacacccaatgaagaagttcctttctctggtactggctctggtgatgaccatgtctctggtcaccgtcagcgccggtgctaaggacttcagtgatgacgacagcatcacctatcaggaagctgttgacgtcatctccgagattggtgttgtcgacggttacaccggcggcgacttcaagcccactgatgtcctgacccgcggtgccgccgccaagatcatctgcaacctgatcctggggcccaccaccgcttccgctctgagcgccagcagcgctccctttaaggatgtgcccgtgagcaacaccttcgcaggctacatcacctactgcgcccaggagaagatcatcaacggctatcccgacggcaccttccgtcccaccggcaccctgaccggcaacgcgttcatgaagatgctgctgggcgccctgggctatgacagcgctgtcgagaactacactggtcccaactggtccgtggccgtcatcaagcaggccgccggtatcggcctggacgacggcaacgacgagttcgtcggctccaaggccgtgacccgtgaggaggctgccctgtacgccttcaacatgctgcaggccaccatggtcgagtacgacgccaagacttctgtcgacatcaacggcgctaccgtgaccatcgccggcgacaaggccaaggaagtcgagaacacctctcgtaccgacggctacatcgacgacgacaacaagatgcagttcgctgagagatacttcaccgacctgcgcctgaccaccgacaccaccgatgacttcggccgtcccgccaacacctggcgcttcaagggcgttgaggttggcaccttcgccaagaccgctgacgccacctacaccgccgacgtgaagctgggccagatctactctgacctgggcatgtccgacaaggacgaggctgctcccgtcttcgtggacggcgttgaggccagcgagtccgccaaggtctccaagggcaacgacctgaaggtcagcgagctgaagttcaccaactctcccgctgcgaagtgcaacgtcggcaacggcactctggtcgaggcctatctggatgaggataccaacgatgtcaccatcgtggctatcaacacctacgtggctgaggtcaacaaggttgtggccaagaccaactccaaggatgcttacatcaccctgtccgagctggctgctgagaacggcgccacctccggcctgcgtgccaacgacgagttcgagaccactggtttcgagaacgaccagatcgtcctcttcacctatgccaacaacgagatccagtctgtcaaggctgctgagtccgctgagggcactctgaccagaaaggtttccggcaagtccatcaacctgggtgagaccaagtatgacttctccaagatgtattctgtggacggcggcgagagcagcctgggcatcgacagcgagtatgtcgtgtacctggatgccaacggctatgccatctacgtcgaggagactgagtacaacatcgctgactacgcctatctgcgcgctctgcagggttccagcgttgctttcgcctctgacaaggctgctctgatcacctatgacggcaagatgaagaccgtcgacaccaaggaggactacaccaacgacttcgctggctatggttctgagctgcagattggtaatgccaactctgagattgtcctggtgaaggagacctccaacggcgagtatcgcctgaaggatctcgacaccaagaatcccagcattgctaaggccgaggactccttcgagctgcggaacggcgtggcccggatcaacctgactaacaagggcgtgaccaacgcctccgatgccaagcagggcaccgactacatctatgccgacagcaagacggtgttcgtggtgggcacctatgacagcggtgctcgcgagaattggaagaatgctacctatcgcgcctacaccggcatcaacaacgctcccaccatcgtggacgacaacgacagcagcccggctaccaatgccatcggcatgagctactactgccgcaacaacggcgttgccaccatcgtgtacctgagcgtggacgaggctgactacaaggtcaccggcggcaacaacgacgtgatcttcttcgccttcgagtccggcagcaagaagatcgaggactccgacaacgagtactacacctacaacgcagttgtggatggcaagatcgttgagggcgtcaaggtcgatgccagcgtgaagatcaacaacagaacttccaacggctccttcagcagcaacgtggtcttcactggcgccgattatgacgacggtgtgatcaccggcctggattctctgagcaactccggcaccgtcaccggcatcaacaaggtgaacaatgagaacgtcgtgctcggctacggcaacggctctgagtccacctatgtggtcgccgacgatgcgaagatcttcttcatcgacgatgacggcaccattaccgagggtgcggtgagcaacatccgccgctccgacgaggatgtcgtgacctacgtcctggaggatggccagatcagctatctgttcgtccagcagtacttcgaggataacgaccagtcctcttccggcggcagacaggagctgaccagcatcactggtgtgacctattctgctcccaacctgaccctgactctgaacggcaccaacgccggccagaactacaaggtcaccctgaagatgatcgttgccggtgtgaccactgagctgggcacctacacggtcaccggcgccaccggcgctaccagcaccaccgctgtcctgtccgtgggcactctggccagcatcgctgccagcggcggtatctacatggtctcctgcggcggtcagaacgcaacgttcactgcctaaggaactgtgttaacgtgctgatgcactaagacaaaaaggattcccggacttctgtccgggaatcctttttatgtgtcaggcatagtcaaagccggtcggcacaccctctgatagcttctccctgcacgaacacacagcttgcgaggatttgcacaggctttggcccagctggcagaggaaacgaactggtgaatgagccgttccttcgccgccagcaccggaagagtcgaaggccccccggacttttgtccgggggcgttcctttgggttacagtttccagccccagaggatgattttcccttccccgttgatggttccggcgtccgccacaaaattcagcgtcttcaggtccttcggcgcgatggaggggatggtgctgtaatagggcgggttcgatgtatcgtagatattctcgcagatgcaggcaacgggggagagataagccgccagacggatttttgctttgctttgacccagacggccgttcgcctccaggcggcacagatagttttggtgcgagcccggatggaagtagctgtctgacgcaatattgttgcagcgcagatagatatagtgataggctgtggagaggatggggacgatccacacctccgtgtactgcgtgaagtcgatctgtgatacatccacatccacctgcgccgcttcctgcgtgacaggcacttccagaagttttaccagtgggacggcctcggcggctgcggctgcctcccggcggatggcggcatcctgagccgttctcgcctgctgctccgccgcgtccgcggctgccagggaggccagggctgtctccagcttctgattgtccccgttgaaatcctccatccggatgcggtccgtcagctcccactggttgagatgaaattgactggtctgctgcaaattcttcaccctttcccgaaaatcgtggcgggaaaactcccgctatccaatcccccctgaccggaagaaattgcagaatttcgtgcaacaaaaaattcccccggacttcggtccgggggaattttcaaccgcgggtacaatcacccttctggcgggtaatcagacacccaacacaaagctctggtcgccgcaggtcaccatgtaggtggagcccgcagacagagcggcagagatggtggcggtcgtcgttgtcgcggcgccagtcacgttggcggtcgtcagcttcaccagggtgccgccgttgaccagggagatggtcacggggtagacctgtccggcgttcgtgccggtcagagtgacagtgacggtgccgctgctgtagcttgcgctgatcccgctcaggaccacgccgctgctaccggcgccctcctgcttgccgttgtcaacttcctggatgaacaggtaggcgatgtcaccgtcagtcatatcgaggaggccgatgtaggtagcagtggagtcggagctgatgttcttcacatcgtcgatcttggtgataacaccgtcggtatcgatgtagtacatcttggcgtcagaggcgaccgtgtagcgggtgctggcggaagccgtcgtaccgcccaggccgatgctgtaagagccggaaagcttccacacaccagtaccatggtcgctcacatcgatgcgatcgtaatcagtactagaaatattgtcagcggaggtcagcagacccttgttgttgtagtcagcattggtcacaacctggttgaccgtgtcgttgccggccagaaccacagagccagcatcctgggcggccttgaccttcacggtggtgatctcgtcgtccacaaccgcgttgtacaggtagtactggttgttgtcgccatcggtgatcatcttggtggcggactcagcagccaggaacaccacatcgcgcttgccgttggtgacataggcgccggtggcgtcgatgaaggcgaaggtcaccacatcgctggagccgctggtggtgtagaccatctcaacatccttggaggagacaacgggagtcacaccggcggggctgttggacatgatggtgggagcgttcttgatgcccttgtagacggaatagtcagtcttgccgcgggcattgctctcagccaccacgaacacggtctcactattgccatacaccgtagtgccggttttggtggtgatagccgcgcgggtgttcttcatctcgaaggtgttagcgccatttctcaaaacgccgttagtagagatcggataggttccgtcatcctcggttgtaacaatggaaccgttcttgtgaacattggcggcctgacgcagagcgtactcgcccttgtcgtcagcgcggtagtagacgatggtgccctccagagaggtgtaatcgtcgtcagtatccaccgtcttcacggagccgtcggacatgaccagctgaacctgatccttgccgaagcggctgttgctgctctgggtgtagagcacatacgcgtactgagaggcgtcgaactcctgctcatccacatagatgaccatgccgttggtatccagatagatgacatagtcgctcttggtggtcatgctggtctcagagccgaaggagaacgcaatgttcttggagtacttgtactcggtatcggccagagtcaggttcttgcccagggtgtacttgtcgagggtgccctccacggactcggccttcacaacggacttgatctcgtccgcgctctgggagtaggtgaacaggaccacatcgtcttcctcgaagttgtcggtattggtctcaaagcgggccttgctgccggagatggacacagaggtagaagcgtccttctcggtcacgaggctctcggagttcacgacaacatagggatcggagaccttctcttccttggaggagatggtgcccacataggtgtcgatgatgcagatggtgacatcgttgttgtcctcatcgtagaagacctcaacggtgctgccgtcagccaccagcttgttgttggcgctggagctggagaccttgacggtgttgcccttggacacggcaacatcatcggcctcgacgccgttgtaatagacctcggcgttcttgtccttctcgctcatgtcgagatcgctgtagatatcacccagcttcacgttgctggtgtaagtcacatcagcggcgtccgcataggtgccgatcttgtcgcccttgaaagtccacttggtggcgggacgggcgaagtcgtcggtggtctcggtcttgtccagcttgtcgaagtagcgctcggcaaactgcaggttgggcttgtgcatgttgttgtcgtaggagccctgcgcaacttccttggccttgtcgccggcgatggtcacggtagcgccgttgatgtcaacagaggtcttggcgtcgtactcgaccatggtggcctgcagcatgttgaaggcgtacagggcagcctcctcacgggtcacggccttggagccgacgaactcgtcgttgccgtcgtccaggccgataccggcagcctgcttgatgacggccacggtccagttggcaccggtgtagccctcaatggcgctgtcatagcccagagcgcccagcagcatcttcatgaacgcattgccgctcagggtggcggtgggacggaaggtgccgtcggcgtagccgttgatgatgccctgctgagagcagtaggtgatgtagcctgcgaacacgttagtcacgggcacatccttgaagggagcggtgtcagcgctcaggtaggaagcggtggtgggccccaggatcaggttgcagatgatcttggcggcggcaccgcgggtcaggacttcagtgggcttgaagtcgccgccggaataaccgtcgacaacgccgatgccgctgatgacgtcgacagcttccttgtaggtgatgctgccgtcatcactgaagtccttggcgccggcgctgacggtgaccagagacatggtcatcaccagagccagtaccagagaaaggaacttcttcattggg

SEQ ID NO: 4971 - DNA, 36246 bp, Unknown
  gut microbiota DNA sequence
gcattttgagttttcatgctaccaaacggctgcaaagcttggaaaccctggaaagtctggtagcaaaattaaagatttggtagcagccaattatggaaattttttgatgcatcagatcagccgaggattgtgatgacatccaatgcgctttccggtaccgctctttctctgaatgatttggtctgaaaggcgggcccgcgctttcttgaaacggatgtcacatcgttgaaaaataaaaatacacaggcattccgcccctcgcagaggtggattccctttgtccggactgcggactgaaaagcgaaggatgattaaaaatgagtgacaaatataatctgctaatttgatacataaatgaaaccattggaatagacaatgaacaagaaatctgatataattttgcgcggtaaaagactattctcgcgagaggagcaatttcatgaagcgaaaaaaaaccgtgccggcagaggtggttccaaaaccggtgaatgatgcggcgcctgtgccggagaaagaccatccgctgtatgaccgcctgtttgttgtgggatttgcggtgctgctgttttttgccatgacggtgcagacggttcccatgagcctgattctggcggctgtggcattggcgctgtcctttggcagggggggctatgcacggtttcgcggccgcctgggaatcccggtcctggggtttctggcctttttgatcctctgcggggccgccagcctgtatacgagcttcggcgcctacgcttacggagaatatgccaagctgctggcgtccggagccctgggcctgctgctgttggcacgcggacgggaacagaacgccggcggactcctgttcagcttctctgccgtgtgcggagtgattgggcttctatgtatcgatgccgggtgccggggaccgctctttcgcggctttgcctcttttatggaggggcttggggatgcagcttatcagagcctggatcaagcgacctatacgggcgcccggtttgacggcatctataacgacgcaaacctgaccggcagcctgatggcgctggcggtcttggtgggactctacctgatccgtacaggacggaaaccgtgggagcgatttgcggcctgctttctgaccggactgtccgcagtggccttttttaccgcgatgagccgtggtgccattctctgctttggcgcgacagtcctctgctatctgttgtttgtgggaaaagggcagcggggccagctgttcctgctcctgtttttcacggcgttatccatgggcgcattcggtctgctgtctatgacgctgctctcctccggctctgttcttgggacattggccgcgttgccatgcggacttgtgctctggggcctgtatgaaggtttgggccagaaggcggcagaggttctcaatggacacccccgcctgatcgcggggattgctaccggtctggtggtgctctgcgctgcgggaacggtggccgcttttacgctgacggagcccttcgtctgcacggaggaaaatgttctttaccggggcgcggacgtcacctccggggagacctataccatcaccggcgactgggacaacggcgatgagatcactctgatggcctatggctccacccaggcgcaggagatggaaaaccggacggagacttattacagcggaccgctgtccgaggcctcctttaccgtgccggaggggattacccgggtactcttccagttccggggaccggaggggactcagatccgctctctgtccctctccgacggtacgaagatccccacatcctatacgctgctgccggaaaacctggtgagccggttccagaagaatctgtttcaggaccgcagcttcctgctgcgggtgcagtatctcaaggacggctggaccctgtttacgcaatcaccgttgacggggcacggcctgggcgctacggagggtctgctgacctcggtgcagcccttcttctaccagtccctctatctgcataaccatatcctgcaggtgatggacgagacgggtctgctgggtcttgcggcgttcctggcgctgatgctgggtgcggcatggctgctggtgcggcggctgcggacacagcaggatggtatggctgcggtattgcttgcctgctgggtgatgatgaatctccacgggttgatggagatctccttctccgtgcggatgttccagtgtgccgcgtttttcctggtccttatgagtgttgtctcctgtggggagcccgcggaggggagaagcggcgtgcggatcctccgggtcgtagggaccctggccgccgcactctggctggtcgtttcctttgcgatgcttttgggcagccagatggcacaggcgcaattcagggacttcgatacgacggatatgacccggtcggaattcctggacagcatggaaaagctggatcggatggacgcctataccgatcaggattataaggtcaaccggatggtcaatgcactgcaggaggggggcagcctcaatctgggtgtggcgtcccgctgtgcccgggaactgcgggagaccggggactttgacgcttgttataaagtcgccgcttactattatctgcccctgcaggatctctccggcttctttgagatcatgcaggagggactggctcaggagcggtctaatgccgatgcgtggaacagtgcctttgatctgtacggacaggcctttgcgcaactggacgagtcgcagatggatgcgtttgtggcaggcgtcttggcaaccatggaacagatggagcaggccaacgagtatttgctggttccggtggcgctggatgaggccaatcaggctctcgcggatagtgtgaccaccgtggagacggaggacctggatgcctctgccgcgtatgcgctgctctctgcggtatttgccgggcagcaggaataagtggaaaagaaaacagaatggtcctgaatccatcggaactatcctgcttttacagaattatggcaaaaaggaaaaagaataagccggaaaacttatcaaaagttacccaaaaacttgagctgcgtcgaaaaatgtgctaaaatataagctgattaactaggaaaaatgacgagaagatgttttctcattcagaagtttatctgtgggtagcatctagaatctgggaagtaccgccggactggcgtgcgatacggacccagccggtcaaatcaaaagcaggatgtgttgtttatatggaaaagatcccgttttccccgccggatattacccaggcggagatcgatgaagtggtggataccttgcggtccggctggatcaccaccggtcccaagagcaaacagtttgagcgggagatcgcggcctattgcggaacggataccgcggtgtgtctcaactccgctaccgccagcctggagctgacgctgcgtgtactggggatcggccccggggacgaggtgatcgtaccggcttatacgtatacagccacagccagcccggtatgtcatgtaggcgccacgctggtgatggtggacagccagccggactgttatgagatggattatgcacagcttgaaaaagccattacgccgcgcaccaaggccatcatcccggtggatgtgggggggatcctgtgtgattacacccgtattttttccatcgtggaagatcgccggggagacttttcaccggcatctcctctgcaggcgcagctggggcggatcgcggtgatcgcggatggcgcgcacagcttcggtgcggtccgcggcggcatccgcagcggtgcatgggcggatttcaccaccttttctttccatgcggtgaagaatctcaccaccgcagagggcggcgcagtgacctggcgcagggatctgggtctggatgatgcggcgctctatcgtcgctatatgctgctgagccttcacggccaggacaaggatgccctggctaagaccaaggccggcgcgtgggaatatgacattgtggcgcctctttacaagtgcaacatgacggacatcatggccgccattggcctggcccagctgcaccggtatgaggaactgctggccaagcggtatgccctggtggagcagtatcatgagctgctggcgagtacggccattcgccccgcccggcacctgacggaggatggccgctccagctgccacctgtatctgacggagctggaggggaagaccctttcccagcgcaatgccgtcattgatgctctggcccagcagggaatcgcctctaatgtccactataaaccactgcctctgctgacggcataccgggatctgggattccggatggaggattatcccaacgcctatggcttgtatgagcgggagctgacgctgccgctgtattccacactgacccaggcccaggcagagcggatctgcggggcactgcgggagatcctgtaggaggaatcatggcaaatacccaaacgttccagcgccttgccccgcccggacggggtgcaatggccgccaagcggctctttgatatcgtctgtgcggcctgcgggctggtggtcctcagtccgttgttcctgatcacggcgttggctgtaggactgacgtctccgggcggtatcctgttctgtcaggaacggatcgggctgggaggcaaaccgtttatcatctataagttccgtaccatgcggaaggaaaattccggattgaagatcacggcttccggggatgaccggatcacaccggtgggccgaatcctgcgcaagaccaagctggacgagttgccccagctgttcaacgtgctgcggggggatatgagttttgtaggcccccggccggaggtacaggagtataccgatttgtacacagaggagcagaggcaggtgtttctggtccgtccggggatcacgggggtggcatccatccgctatcgtaatgaaaacgacctgcttgccgccagcgacgatcccaaccgtacgtatattcaggagatcctgccggaaaagctgcgtctggatctctcgtacatccctcgggccggtgttgttcaggatatcgccctgatttttgaaacattggcggttgtgatccggggataagcaaaagaaaggacaatcgttgctccatggatatttggctcatcaaccactacgcggtgcctccgaaatattatcccctggcccggcagacctgctttgccaggtatctgatggccatgggccacacggtgacgatcttcgccgccagtaccgttcacaactccaacatgaatctcattaccgacggagctccctggcgggatgaggtagtggacggcgtgcactatgtctacatccggtgcatggattaccagggcaacgggctcaagcggatttacaacatctgcgagttcgcctggaagctgcccggtgtgtgccggaagttccccagacccgatgccattgtggccacctctatgccccccacgtcctgtgccatggggattcatctggcccggaaatacggctgccggggcgtggcggagatcgcagatctctggccggagtccattgtggcctatgggatcgccggaccccggaatcccgcggtgctggcccttcggcggctggagaagtggatctatgaaaaggcggatgacgtggtgttcacctgcgagggcggatatgactatatcgtcgagcagggctgggaggggaggatcccccgtgccaagatccactatatcaataacggcgtggatctggcagtctttgatgagaaccgggcgcgctatacggtgcaggacccggacctggaggatccctccgtgttcaaggtcgtctacaccggctccatccggaaggtaaatcatctgggtctgctgctggacgccgccaaagaggttacagaccccagggtaaaatttttgatctggggagacggagatcagcgggcagcgctggagcagcgggtccgggaggaagagatctcaaatgtggtgttcaagggaaaggtggagaagaagtatatccccagcatcgtcagccgggccgatatcaacttgatccatggcggagatcagggaaaggaattgttccggtttggtattagccccaacaagatgttcgactgctttgcggccgggcggcccatcctgatggatctccctgcaaaatataatccagtggagcaatttcaagccgggatttgtctttcgagtgtatcggagattcctgccgccatccggcagattcaggtgctttcgccccaggcctatgagagcctttgcggcaatgccaggaaagctgccgcacggtttgatttccgagttttaacacaggaactgatggagattttggaaaaaaggggatgagccgtgtggaatttacctattcggcatacaaaaacctgatacacctgcttcagacgggcggatatcgggtctgttcctatcacaactggcaggatacagctcgctgtgtgatcctgcggcatgatattgacagcagcttgggccaagcgatggcactagcccgggtggagcgggagctgggtgtgagcagtacttatttcgtgctgcttacaagcgatttctataacccggcctccaaagggagcgtggaaaagctccggtccatccaatccatggggcacgaagttgggctgcactttgacgaaaaggcctatctggaagggacaccggaggagacagtgtcccgcatcctccatgagcgtgatatcctggcttccattctggagacgccggtgactaccgtctctatgcaccggccttcccaagccacgctggagtcggaccttcagattcccggcatgatcaattcctatgggcagacgtttttccatgatttcaaatacctctcggacagccgccggagatggcgggaaccagtggaggaaatcatccgttccggaacatatgaccgcctgcacattctgacccatgccttctggtaccacaaagcagacgaatccatcacagaaaccgtgagtgcgtttatccgttccgcaaatgcggaacgctatggacagatgcaggaaaatatcacagacttggcgagcattgtgatgagggatcggtgtttatgaaaattaaggaaattctggattttctgcagacggcccggatcccgttttcttttacaggtgacccggagagggaagtggaccgattttcttctctctcccactaccgggaggggtccttcacctggatcaaaaagcaggagaacatcccgctgggaatggatctgacgggtctggctctggtattcgttgcggaggatgtcgatggcggtaacgctcccaatgtgatccggacaccggaaagcaagcacgcatttttttcttcgattgagcatttttatgcccaaccagaggagcggcccgccgtggggcagtttacctatatcggtccgcgggtcaagctgggaagaaacgtccggatcggccacaactgcacgctggatggggacatcaccatcggggatgatacggtcatctggaatagtgtggtgctgttgaaccgggtgacggtgggaagccggtgtgatattcactccggtgctgtgattggtcacgatggatatgcctataccgaggatgccgggcatcacaaggtcatggtgaagcattttggcggcgtcagtatcggcaacgatgttctgatcggtgaaaacgtctgtatcagccgtggaaccattgatgacaccgttctggaggacggagtcaagatcgatgcgctggggcatatcgcgcataattgctggtttggaagaaatgcggcaatgccagttccgtgcagtgtcagcggcagcgtgcatgtgggagagaatgcctatctcgccggcgatattatccgcaatcagtgcaccatcggagagaatgcgtttgtaggcttgggtgccgttgttgtgaaagatgttgcccccggtcagaccgtggtgggaaaccctgcaaagccctttatcaaaaagaaagcgtgaagaatatgcaatttattgatctaaaagcacagtatcgtgcactaaaagatgagattgatgccaatatccggggcgtgctggactctgcccagtttatcggcggcccttatgtgaaggagctggaggcgcagctggcggccttcaccgaccggaagcactgcatcacctgcgccaacggtacggatgccctacagatcgcctatatggtggcaggtgtgggtgccggggacgcggtgttttgcccggacatgaccttcatctcctccacggagccggccaaaatgtttggggccactgctgtattctgtgacatcacgccggacacctactgcctgagcccggcgggcctggagcggcagatccaggccgtgctgacggagggaaagctgacccccaaggctgcggtggcagtggatattttgggaaatccctgtgactatgatgccatcggggccatctgcgagaaatacggtctgttcctcatcgaggacgcggcccagagtttcggcgcctcctaccatgggaaaaaggcctgcgccttcggccatatcgccaccacgtccttcttcccggcaaagcctttgggctgctatggtgacggcggcgctatctttacggatgacgacgcggtggatcagctgtgccggtctttgtgcgtccacggcaagggccccggcggcaagtacgacaatgtgcgggtaggcatgaactcccggctggatgctatgcaggccgccgtgctgctgcccaaactcagggccctgggcacctatgagatggacgcccgacagatggtggcccaccggtacaacgaggcgtttgccggccggtttgtgacgccctttgtggcggagggctgcgtcagcgcctgggcccagtatgccctgctggcgaaggacaccgcccagcgagacgccatcgtggcctacctgaaggaggccgggatccccaatatgatctactatcccacgccccagcacgcgctgccggtgttccgggacgagcctcattacggagagaccttccacaacgcggacgactactgtgcccggaccttctccctgcccatgcatccctatctggaagaggcggagcagcgcaaggttatcgacgcggttttggagggtctgtgatgaaattatctgaagctgtccggggcgtttccggtacgctggctgcagatggggagttcagctgcatcgcatttgccacggaacaggagcagtcccagtttctgacgtttctggaaaaggaaaaattcctcccggctctggataattccaagatttcctgtgtgctgaccacctccgcattggcggaaaagatcccgccccatatcaaaggtgtgttcctctgtgaccggcccaaggctgcactctttgagattcacaaccgcttggctcgccatccggattatgtgggcgcttctgcggctactgtggtgggggaggggtgctccatcagtcccctggcagccattgactgtgaaaacgtcgtcatcggagaccgcgtgacaattgaaccctttgtggtcatcaagggacgcgtgatcatcggaaatgatgtgaccatccgcagcggtgcggtgatcggttgcaagggattctctttttcaaaggatgcacagggtcaaaatgtctctgtggaggatactgcccggatcatcatcgaagaccatgtggaaatttttgaacaggtagccatcagtaccgggatttttccctgggaagagacccggattggagaaaatacaaaagtggatgcccagtgtcacattgggcacggcgcccatatcggtcggaattgcctgctggcggaaggcagccgctgctgcgggaacagccgggtgggagatcacgtctgggtcggcgtcggggcgattgtgtccaaccgcgtgcgcgtgggcgacggcgcccgggtatccctcgggtctgtcgtgacgaaagaagttcccgccgggcagacagtctccggcaactttgcaattgaccatcagaaatttttatccaacttgaaaaagtctttggaggaataattgatatgtccatgaaagaagaactgatcgaaaagatccaaaataagaccctgaccatgggtgtctgcggtctgggatacgtgggactgcccctggcggtggataaggcgaaacacgggttccgcaccatcggctttgatgtccagcaggaaaaggtgaacatggtgaacgccgggaaaaactacatcggcgacgtggtggacgcggatctggaaaagctggtgaaggccggaatgctcagcgccaccacggatttctcccgggtgtgtgatgtggatttcatcgccatctgcgtgcccacgccgctggacaagcaccagcagccggacatcagctacgtccgggattccaccatcgccatctccaagcacctcagacgggggtccatggtggtgctggagtccaccacctatcccggcaccacggaggagctgattcgccccatcctggaggagggcaacggcctcaagtgcggggaggacttttacctgggcttctccccggagcgggtggatccgggcaacctcatctataagaccagcaacacccccaaggttgtgggtgccatcggtgctgacgccacggaggtgatctccatggtgtaccactccattctggatggggacgtgaccaccgtatcttctcccgctgtggcagagatggagaagatcctggagaacacctatcgaaacgtcaacatcggcctgatcaatgagctggccattttgtgcaataaaatgggcattgacatctgggaagtggtggacgccgccaaaaccaagccttacggcttccaggcattctatcccggtcccggcctgggcggccactgcatccccctggatccctattacctcagctggaaggcccgggagtacggcttccacacctccatgatcgaagcgtccatgatggtcaacgaccggatgcctgagtacacggtggagcgggccggaaagatcctcaaccgctataagaaggctctgaacggctccaaggtcctggtgctgggcgtggcctacaagcaggatatcgacgactaccgggagagccccgccatccgggtcatcgaggagttccataaaacgggggccatgacggatttctatgatccctttatccccaagtaccgtcatgaaggccagtggtatcagggcctggaggcgctgacgccggagaccgtcaaagcctatgatctggtcatcatcaccacggcccacaccaaggtggactaccagatggtggccgagtgcggcgtgccggtctttgactgcaagaatgtgaccaagcacattcaaaaccgggagaacatcgaggttctgtaaagccggcagcttctcttttgggaacgcgtccgtatgaaggagtttcaggaatgatcaaagtatgccatatgaccagtgcccatcagccgggagacacgcgtatttttcaaaaggagtgcgtctctctggcaaaggccggttaccaggtttttctggtgcagcggggagagagcggggagaactccggtgtccggatcatcggtgtgggacagccctccggcgggcggcttacccggatgacctcctttgcccgcaaagtgtatgaggcggcactggccgtagacgcagacctttatcaccttcatgatccggagctgcttccctacggaatcaagctcaagcgccgggggaaaaaggtgattttcgacagtcacgagctctatgccgtgcagctgcggcaaaaaccctatctgccgggctggtgcacgcggatcattgcgtttggatatgcgcggtatgagcgttacgtcctccggcgcctggacggggccatctttccctgcaccgtgaacggagaggacccctttgcgggaaggtgtccccacacagcgctggtagacaacagcgtcaagctggaggatttttatgagcggtatgatccggaagccgtacggaaccaggatcagatctgcctgacaggttctttgacggaggcccggggcatcaccagtgcgatccgggctgcggcgtcggcaaagtgtacacttgcgctggctggcccgatctctccggcggactatgaggcccagctccggaagatgccggaattttccagcgtagattaccggggcgtcctggccaaggaccaggtggcagcgcttctgcagaccagccgggtgggcctttctccgcttttgaaccagggccagtattggaaggctgagaatctggccaccaagatctgtgagtatctggccatggggctgccggtggtgatgaacgggtctgcctacaaccgggcattcgtagagcgctggcactgcggcatctgtgtggactcggagaacgtggaggagatcgcctccgctatccggtatctgctggatcatccggaggaggcccggcagatgggagagaatggccgtcaggccgtgcgggaagaattcaactggggcgtggaggaaaaaaagcttctggccctgtacgaggaaattttcaaggaataaaaggggaccatcaacatgaaatacgtgctcatcggctgcggccggatcgccgtcaaccacatcaaagccgtgctgaacaaccacctggaactggccgctgtgtgcgacgtcaagccggaggccatggagaccctcctggccaagcacggcctggagaaggacacttccatccgccgctataccgactatcgggagatgatcgaggcggagcagcccactctggcggccattgccacggagagcggaatccacgcggagatcgccctctactgcatcgcccacggcgtcaacgtcatcatcgaaaagcccatggccatgtccatggcggatgccgacgccattgtggaggctgcccaggcccaccatgtcaaggtgtgcgcctgccaccagaaccggttcaatccggcggtccaggccacccggaaggccctggaggagggccggttcggcaagctctcccacggctccatccatgtgcgctggaaccggaacaagggctattacgaccaggccccctggcgcggcacttgggcccaggacggaggctgcatgatgaaccagtgcatccatggcgtggatcttctgcgctggatgatgggggatgatgtggtggaggtctatgcccagacggctcagcagttccatcactatctggaatgtgaggacgtgggcatggcggtggtgaaattcgccaacggcgccatcggcaccatcgagggcaccaccaacgtctaccccaaaaacctggaagagacgctgtatctcttcggtgagacgggaacggtgaagatcggcggtacctccaccaataacatcgacgtctggcagtttgccgaccaacgggaggaggacgcagccctgcaggggcttcaggaggccaccagcaatgtctacggcaacggccataccgccgtttacgcggatatgatggacgccatcgtccatgaccgggccccgtatatcgacgctcaggccggccgccgggcgctggagatgatccttgccatgtatcagtccgcggccaccggaatgccggtgaaactgccgctcaaggacgtggcctccctggacttcacaggccggtttgacaaaaaagaggagacaaacgggtaaatgaagctgccatctgtcacagaaaaactgcgtgggagccgggcggcccaatccctggagaagctctcccgcgtaagccggaggcatcagtttttgttccagtgcggactgatcctcctctaccggctggtgctggacttcatgtaccttacgcagctctctcccatctacgcctacagcggctttaccacggatctggtgtggatcaaatacgccctttcctggctgctggtattggtgtgtctgcccctggtggtggggctccagggacaggaggaacgtccctcctccatcctggtgacgctgatgaactatgtttactttctcccgatgacgtcctatctgggatgcaagggaagtgatctgggcttcttctgcgcagtggcggtgtactggctggtgctgctggcggtgcagctgcgtatgcccaccatcttggtgcccaaactgccccaccggcatacctccttgttattttttctcgtgagtgtgggggcgtgcctgttcgttatggggatctcggggatctataccggattccggctgaagttgaacctttcagatgtctatgggatccgggcagaggcagcagcctacgatattcccggtctttttgcctacgttctctcctggatgacggtcattttgtccgtgctgatcctgtactggctgcaaaagcgccggtacgtggcggtaggcgtgctggtggtagtctatctgttctattactccatcagcgcacagaagtccgtgtttttgtttctctttttactgctgttctgctacctgctgtaccggaaatggatgtaccgctggtgcgccgggctgttgtcactgggagtcatgggctgctgggtgctggaggccggggcccagtttctcacccccatgtccctgtttgtgcgcaggctcatgtacgtgcctgtccagctcagcgaggtgtacgcccaatttttccgggagcacccgctgaatctgttccgggacgggattttggggaagctgtcctatgacccggtctattccattaagatccccaaggtgatcggagaatatatggggaccggatccagcgccaacaacggtctggtgggtgatatgtatgccaatctgccggtcgtgctgggggttttcctgatgccgctgatcctggtgatcctgttccggctgctggatgcggcagccagagacatcccccaaaagatctatatcgggctgtgtgtgttttttgctatgagtttctgcaacggttcctggagtaccgtcctgctgtccggaggattcctgatggcctgtatcttcctgtatctatttcctgtacaaaaagaggagcacgtaaagaatgaacaatcgtgaactgcgcgttcaggaccttatttccgggttccggcgcgattggaaactatttttggtcattgtggccgggttcctcctgctgggtcttgctgctggattcttcttttccggccgggcctcggcggaagggtccggcagcgcccaggcatgggagccggtggactttgcggaggtccccatgggtatcacctattatgtggactgttacgactacatcaaggagcagcgcaaggtcctctgttcgtacattgacggtgtgcggaacgattcctctattacggaatcgcagcaagagcagctcctagagatgaaagaagaaatcctgatctttgatgaggacgagcttgttcctatctactgggatctgaacgccccggatgcgttttacctgcccgatgagctacgtcagagcactctggctcagtatcggcgggagcgggagacgctgctgcaaaatatcagcaaatccgagtatgccagatctctgctggataccgtgggcggcctgagtaccagcgacgccgccgtcaatgagatctacgcctccattctttcccaggcagcggaataccgccagctgcagctggatctggaacagctggatacccggctgaatctgctggaaaacgagtatcccgcgctgcgccaggccagtgaagaaatggcgcagcgcctcgatgacgccgcccgggcgctggatgcgcgggcggaagaggcagtggccctgctggaggagattgcgcaggaaaaccatctgaatatcaccttctcggcggagcaggaggacgtgacggtccagatcggccacactacccggcccgccacccgacaggaggcatttacggcctttgtgatcttctttggacttgtgggtatctgtgctggcggcttttttgtcctatgccgggagacttcttcctacaaaaaggagtctctgcagcagtgatttgaagatttgaaaggatactctgggatgcagtctcgtttgctgaaaaatattctctctgtcagtggcgtgctgattttggtcaaggcgctgggttttttcaagcagatggtaatcgccggcatttttggcgccaatgccgagactgacctgatcaatctgtcctatggatttatcggcgacatccaatatctgctggttcaagtgatgcttaccgcagtggtatctgtttatattcatgtgaaggaagagacccagaatgaagccgggcagtttgccagcgacaccctttgcgcaggcaccatcgttgtagcggcgatttcagcgaccatttttatgctttccccctggatctcaaaattgctggccccaagctattcccaggaattgagtagccagctcgggggctatattcgcctattttccccgatcctcattccattggtttggatggcggtttttcatgcacttctcaactccaacaaacgctttatcccaggtcaactggagggattgtaccaaagcgtgatcctggttatcgtgattattttgggagcgccctatctgggcgtggactccctagtcattggatattggttgtatgcaaccttcagcgccgggtttctgggttatcaggcgcggacttatttgaggaagagcagtagaaatccgttccgtaatccgcaggtccgttcgcttctcgcaatggttggaccactttctatcggctatggtgcagtttatatcaaccaaatggtagacaaaatcctggtatccggactggcggatgggacggtcactgccatgagctatgccgctacactttccaatctggtagggacactgatttgctccctctgctccgtgctttatgcccatgtaacagaatatatttcgcaggaaaaggaacaggctgtggcccaactgacagaacgggcgattttggttctggtgattctgctgctgcctgtcactgtgatcgcagtaagccaggcggaagacatagtcctgctcatatatggccgcggcgcatttgacgcggaagcggcggctatgacagcccaggcattgatgggctacagcctgagttttatccctttggcgttacgtgaggtatatagccgggtccaatacggatatcaggactctaagcaccccgcggtaaacagtgtcatcggcatcgcctgcaatgttacattgagcattttgctttgtcgaaagttcggtgtatttggagtgacccttgccagcagcgtagccaccctagtaatcggcatgctgaatgtgcagtctgctcgccggaccgcatcattcctgtcgttgaaatctctttggaacttaacaccgaacatattgataggtggaatcctgtccatccttttgacgtggggctgcaagcaatggcttgcagaactgccgctgctgattcggctgtgcttgaccactttctttgtgttctctggatatagtgttttggtcatccctgcggtatggaaaaccgggcttatcaagccatgtcatttttcgcgcaaacaaagatgagcaggaaaaatatcgctactgaagaggagccttctattagcggctggtaatttttatagtccgaggaaggacgctctgcagagatcagaaagaaagcggcgcgtcccatatgcagagtagcctcttttttgagtggtctgctagcgcgctcacgctatgattctttgcctgtccccactcagcttttttggagccgtgcaggcattctgcctcgaatgctggcctcaatttggggctatcttcgcagaaagcagttgtatctctgtgtgcattgccacgggcaacgaatatcaaatgaagggaattattttatgtgtggcatcagtggttatctggatctagaccgtggagtggatattggaatcttgcggcgtatgacggatgtcatccgtcaccgggggccggatgacgagggatatgctttgattggccccggtgggacatcttttttcggggggaacgatacagtaaaagggctggaggtccctccgctggaaactgccgtggggaccgcttcctttttgggatttggtcatcgccgcctgagcatcttggatctgagcgttggtggtcatcagccgatgtatttgccggaacgggatatcaccctcatctacaatggggagttatataactacatggaacttcgcgcccaactggaagctctggggtataccttccacaccaccagcgacacggaagttttactgtatgcctactgcgaatggggtgaagattgtctcacacagttcaacggcatgtgggggtttgctttgtgggatggacaggaaaataagctgttttgcgccagagatcggctgggagccaaaccgttccattactggcgccagggaaaccgtatcatgtttggatcagaactgaagcagctttgtcaggatggtgccgtacaacggcggtttgacacctcttatttggcagctaacctgatatatcatatcagtgattataacgatcagactctgattgaaggcatgaagaccctccgacctggccataagcttgttgtgcagctgggggccggtcataacaccatcgactcctttaccatttcttcctattggacgttgcatgttcattatgataacagtaaaaccgaggcggagtgggtgcggttggtgacagaggagttttccaggtcttgccgctggcgtatgcgtagcgacgcccccctgggggcgcttttgtccggagggctggattcctcctgcatggttactgagatgtgttcgcagatggaagacccctcacggttgcaaacgtttactaccagttatcctggtaacaactcctgtgacgagtggttctttgccgatcttatcaaccgttcctgcggctgtacaggtaaccagatcctaccggatgccgaggacattgaaaagcgttttgagaatttggtgtggcatgtagaagggagctgtggactctctcttttaggcagcaaatttttgttggatgaaatcaatcgccgcggctataaggtgattctcaatggccagtgtggtgatgaattgatgcttggctacgagcgttattatgcattctttttcgcatccctgatcaagagaaagcagtggaagactctggtgtcagaatttcgtcaggccagtcgccattccaaattatctgtgagagatctggccgcttatgcgctctactttaatcagccagtggtgcgggactcacggcagcttcatcgtgccggccggttcatcaaccccgacctgttagaccagcgcaatcgtgtggagttgcgggagttgctgtatccaaaaatactggaaaatctccaatacacggagttgacggcaacccagttgacacatattgtacgctatgacgaccggttgtatatgtcggcttcaattgaaagccggattccttttatggactatcagttcgtggaactgtgctgtcggattccacctgagtacaagatcaaaaatggttacaccaagtatctgatgcggcaggcatttgacagaagaatgcctcgggaagttacctggcgcacgaataaaatgggctttggagcgcctgtgacacagtggggcaggaggttttcgcgggattatctgttggcgtacattgaggattgccgtacagagaagtacttcaaaaaagaggcgcttgcacagatggtaacccgcaatcaagcggaaccgtctatctatgaatttctcgcggttgaactttttgcacggcagtttgatgtgtcataagtatgggacattacaggggaaaactgctttgatatagtttttcgggtggtggaggctatttcgctttttggtgcgaatattgatatatattcgcatccggacaaacaagaggggagatccgcatgacctgtgttaaaagtaaaaataagttactgactacagaagtgtagaaacagaattacaggatgtccttagcggtaaaaaagcaaaaaatgagtggcgcctaggaacttttgttaattgaaaatggatatgaaaagttccacgctggggcgctaaacaaactcacgtcctcctgtgcgcactccgatagcaggagttgcttacacttgattttttgcgccattttatccatttttctatgacaaacacaaaattaaaaaaatctagccgaaaaatggatttgaaaaaatagatggcagaaagatatatttgccactttaaatttcggccataacgctgtataatttgttatatgatcgtaacctaaattaagcggggaacgacacataatgcaattaggagcgtatgggcaagatgaatcatctgcgaaaacagattctctttttgtgtgacagtctgattttaattgttttttcgacttttttctcgtggttttctctgcgatataatctgacggatgcagttggacaatccgttcagctgattcaaaattttgcgttgctttatgcctgcacagtgcttttccaacttttattccgcacgtatgacagcctttggcggtacgctgagagtaaggaatacctgtcgctgctcatggctgcattttgcggatttttcctctacgaggtcttgagccgcatttttctacagagcataatttcctttatgctcctgacttgtgtggccagcctctgggtcttgggaatgctgttgctgcgctttgcctaccgtgtttaccgcagtcgggtactatttagtaagggcagccatcaaatccctgtggccattgtcggtgcaggagcagctggcgttcagctgctggatgagctccagagcaatccagacagccgatacagtgtgcaatgcttttttgatgacgaccttggcaagctgggaaaacgaatccatggcgtggaagtgaaggggacgatcagccaagtgcaggagcgcctgcgcgcgatggatattcaggagatcattgtggcgattccatctgcgggggaaaaccgccgccacgagattttacagaaactgtccggcctcgagcggatcaaaatttctgttttgcccagtacactggacatgatccgccaaaagccgatgcgctctcaactgcgcgaggtccgcattgaggacttattgggccgtgagccggtgtacttggacccagcgcctgtggatgcatatctctctggaaaaaccgtattggtcactggaggcggcggctctatcggttcagagctgtgccgacagattgtcaagcacgatcccaaagagctggtgatcgtggatatctatgagaataacgcctatgatattcagcaggaactgctgtaccagtatggtgggcggctcaatctgaaagtggagatcgcttctatacgggacaggaggcggatgcggcagatcttcgctacataccggccggatgtggtttttcatgccgctgcgcacaaacacgtgccgcttatggaaaacagccctcaggaggcgatccgcaacaatgtatttggcacactaaacctcgtgcgggccgcggatgagttctgtgttcagaagttcctgctgatctccacagacaaagcggtcaatcccacctctgtaatgggcgccagcaaacggctttgcgagatgattcttcagtccatgaaaggacacagcggcacagatttcgtggcggttcgattcggaaatgtcctgggctccaacggctccgtagtaccgctgttccagcggcagatcgccgcggggggaccgatcacggtaacagacaagcgcattatccgttattttatgacaattccggaagctgcgcagttggtgctgcagaccggtgccatggcccggaagaacgagctgtttgttctgaatatgggacaacctgtaaaaatcctggatttggcggaaaatatgatcagactctccgggtatgtgccgtatcgggacattgacattgtggagacggggctgcggcccggcgaaaagctgtacgaggagctgttgattgccagccgggacattgagcagacggagaacagccagatttttatcgagcggcagccggcgattactcccggtgagctgagagagaagctggagattctccaggaggccctggagaaggatgattcctcctgcattcgggaggcgctgcacagggttgtgccaactttccatgagccggaagaggtgaactgcgggcaaggcgccgaggtccgcattccgcaacaggctgctttcagataaagatcagaattttcaaaaaaccgccatgcgaaatgtcagcgcatggcggttttttcaggacagatttcctacacgatataaggagagttctatgaccaatcatttttcccttgccagattcctgctctggattcctccattgctctggtatcgaatcatttggggattttccgcccagacagcgtctgcctccgggaaagtatctgatggacttctgcatcgcatcttaattgtgctgtcgcctgcgtatgcccggtccgaggccgatattcagggggcagctgttgaggtgctctcgttttttgagagaaaagccgcccacatgtttttgtatttccttttggtcatcctgttgttagcggcgcttgcgccctttgtccggaacatcctgcgccggtctgctgccgcgggagttttctgtgccgtcctggcagccctggatgagattcatcagacgtttgttccagggcgcagtggagctgcacgagatgtggcggtcgatttggcgggagccgcaatcgcgtatggtatttggtttctactgcgatgggtaggagccgcgcgaagagaccggcgccggctgtctgcaatccgaacatggatgcccgcagggattggccttctcagtgcctgtattctgccgcaccttacacaatccgccttcagccatccggtttttgagcgcctctgtcagcggttcctggaaaattgggaaacgcttgacgcagccggaaagatcgctgtattagaggggatctctcctgttatgaaggagatgttatatgcgggaacagcggggctgttggggctgatgactatcctgacgctggcaatgcggggatggccgctgctgcgctcgatcacggtatcggtgtcaactgctgcgctggcagcggtcttctttgcggggctgcatagttgctgcttgatcccgggacttttatctatagccatgagtgtccttctgggaagcatggtttgggccagctgcattttaattgtgaaaagcaaagcgctgcttctccataaagaattccagatgtaagcacgaagccccaacgggcttcgtgctctttcaaataagcttatagtgcggccagggaccgccagatcggaatccgatcatatcaaacagaatcaagagcgggccggccaacagcagccataaaagcgcatatctgagacaaatctgccccaaaaaattgccgaaaagagaagtgtaatcccaaagccccaaaccaagccagacattgaaaaccagcccggcggtcaactgggaaacaatcagcacgatccctcccaaaactgcctggagccacagcggaaatgtccagggcattcgttcgttgacagcgtccaaagggatacacaggagggagaatacggcaagatcggtccaatggcagtttccggtcaaaagaagctgtaaagcgcagaaaacgactccgccgcagaaccatcggaatatatgccaaagcagctgcatgatacgtccccctcaaaaaaattatccgtttcccatcctccctgattaggcatgcacaatgctgaacgccggaaacaacagttcccatccggtatgcggatgacggagctccttgccaaggtattcgtgaagaacctcgtgcgcgtggccacaaactcaaggccagtggccaatcggaactgcagtatggaggatttttcgggcagctccgtttgatttctccagtatgcggactggcaacgtgatgtcggaaaccttgcgggaaagcgtctttagatgagctgcatggctatattttggcagcggcaaatgacaagaggccattgttagtttatgcacattaccgcaaaatagaagtcatttccgattttagaaaaatttattactccatagagaaaacgtagattctgctgaacagagaaaggctccggacgggtggccttcattcactgttttccgtgcctgtcgtactcttggggacagcaatctttcgggggtatggcgcgaatgtgccgccgactatcgggtgacattccggttttcagagtgtcgatttcgccgatgcctttttccgggagcgtacagccagctgcaatttctccatgatgttttgggggccggatttccggcggacggagtcttttgtggacgaaacgagggagaaatcgggcacatccgctgcgggggttggagacagtacggttatatctacgaaaaagagaggagccgtttggctaaaatagaaaaaatggcggaggccctggaaaagaagttgatttttctccctaaaaatgatagtttgtaagagagcacgcagagaggcgtgtgattgctttccgtatttctgtgaacgaacacagaatggagagaagtgtgcaaaacatgcggccccgctcttacgggaccgctggaaaaattctgaggcttcacaagggggaaattccaatgtttgattccaaccacgtattcctgggcattgcacctatcggctggtgcaacgacgatatgccggagctgggcggggagaacaccttccagcagaccgtcagcgagatggcactggcgggcttcaccggctgcgagatcggcaacaagtatcccaaggatcctgccgagctgaagaaggccctggacctgcgcggcatgcgcatcgccagccgctggtactcatccttcctcctgacccgcccctttgaagaggaggagaaggactttatcgccaacctggacttcctggctgctgtgggcgccaaccgcatcaacgtcagcgagcagagctactccatccagggcaagatggacgtacccgtgctcaccggcggccacaagcatgtgatggacgacgccgagtggaagctcctgtgcgacggcctgaacaagctgggcaagatcgctgcggaccggggcttcaagctgtgcttccaccaccacatgggcaccgtggtccagaccagcgaggagacggaccgcatgatggccaacaccgatccccggtatgtgttcctgtgctatgacaccggccacttcaccttcgccggcgaggaccccctggctatgctgaagaagtacgtggaccgggtgggccacgtccacctgaaggatatgcggctgcccgtggtggaagaggcccggaagaatgactggtccttcctgcaggccgtccgcaatggcgccttcaccgtccccggtgacggcgacgtggacttcgatcctgtgttcaaggtgctggcggatgccggctaccagggctggctgctggtggaggcggaacaggatcctgccaaggccaatccgctggagtatgccatgaaggcacggaagtacatccgggagcatacgggactctaattcgaagggggactgcgtcccccctcgaccgcccccctccccagtgacgtcggtcactggggacgccgcccagggcggctaagtcaatgtattttcggcaggcgcatgtcctgccgaaaatggttgaaatgcatcgcgccgctggcgcgaatggaatttgagcaacaatctttatttaggagatgactccaatggcctatatgaacaagaacgccgagctgaagaacgggtacaatgcctatattgactcctctgtggacgacatgggcacccagatggacgtgggcctgctgctgatggaggcgggggatacctacgtctatgaggatgccaaaaaagaggtggcaatcctcctgttttccggctctgtcacctatgagtgggacggcaagaaggtggaggccgaccggccggactgcttccaccacgatgcctactgcctgctggccggctgcggcacgaaggtgaccatcaccgccaaggcccacagtgagctgtatatccaggccactgtcaacgagacgccctatgaggccgtcatgtacaccccggacaaggtccaggtggagcacaagggctttggcggcgagctgatgggctgcatgtcccgggagatcaagaccttcttcgacctggacaacgcccccttctccaagatggtcctgggcgaggtgctgaatctgcccggcaagtggagctcctatccgccccaccaccatccccagccggaggtgtacttctaccgcttcgactatcccgacggcttcggcgcgggctttgccaacggcgagatcttcaagacgcagcacaatggctgcgccgtcatcaaccatggcttccactcccagaccgccgcgccgggctatgccatgtgctacgcctggggcatccggcacctggagggggatccctgggacaagacccgcatcgacgatccggagcacgcttggctgtggaaggccgatgccaacgaccacatctatcccaatcactgacaggaggtaatcaccccatgaaaaccgttcgtttgaccatggcgcaggctttggtccgtttccttgagaaccagtatatcgaagtggacggcgaacagagccgcttcgtccgcggtgtattcatcatccccggccacggcaacgtggtgggcctgggccaggccctgagccaggaggccaagcacctggagatctggcacggccagaatgagcagggcatggcccaggcagccgtggccttcgccaagcagatgaagcgcaagcagatttgcgtggccacctcctccgtgggccccggcgcggccaacatggtcaccgcctgcggcaccgccaccgccaataacatccccctgttggtgctgcccggcgacgtgtacgcctgccgccagccggaccccgtgctccagcaggtggagcagaccaacaacctctccatctccaccaacgacgccttcaaggccgtctgccgctactgggaccgcatcgtccggccggagcagctgatgagcgccatgatctccgctttccgggtgctgacggaccccgccaacaccggcgccgtctgcatcgccatgcctcaggacgtggagggcgaggcctatgactatcccgagagcttcttcaagaagcgcgtctggcgtctggagcgccgtcccgccaccgaggccgctctggccgacgcggcggaggtcatcaagaaggccaagcggcccattctggtctgcggtggcggcgtccgttactctgaggcccacgaggagttccgggccttcgcagaggccaccggcatccccttcggcgaaacccaggccggcaagagcgccatcgagtggacccaccccctgaacctgggcggcctgggcgtcaccggctgctccgccgccaacgatattgccaagaaggcggacgtggtcatcggcgtgggcacccgctacaccgacttcaccaccgcctccaagtggctgttcaaggacacctgcaagttcgtcaacatcaatgtgtccgagttccaggccctgaagatggacgccgtgcccgtggtggccgacgccaaggatgccctgccccgcctgctggcgaagctggacggctacaaggctccctacaccactgaggtgtccgccgcccgcgagaagtgggccaaggagctggagcgcctggatcatatcacctttgaggacaagaagagctggaaacccatcatcaacgacgccaacgccgactccgccaagcggttcgccaaggacctggacgcaggcctgtgccagaccaccgtgctgggcgccatcaacgccatgatgagcgagggcgacgtggctatcggcgccgccggctccctgcccggcgacatgcagcggatgtggcggcccaccggcatcgactgctataacatggagtacggctactccaccatgggctatgagatcgccggtgccctgggcgtgaagctggccattggcgacaagcgggaagtctacgccatgtgcggtgacggcagcttcaacatgctccacggcgagctggtcaccgctgttatggagcgcaagaagatcaacatctgcctgttcgataacgcctccttcggctgcatcaacaacctgcaggtgggccacggcaacgtgacgctctgcacggagctgcggtaccgcagcaaggacggcctgttcggtgacttcctgaacatcgattacgccaaggtagcggagggctacggctgcaagagctactccatccgcaccatggaggagctggcggcggccttcgaggacgccaagaaggtgaaggaccgcccggtgctgttcgacatcaaggtgctgcccaagaccatgaccgacggctacggctcctggtggcgcgtgggcgacacggaggtgtccgagcggccggagaacctggcggcctatcaggatcacctggaccacgtgagggacgcccggaagtattgatcctctcaagggggagcttgctccccctcgacctcccctaccaccagtgacatcggtcactggtgaacggcgccccaggcgcctggggcggggaattttcggcaggcgcatgtcctgccgaaaatgattgaaagatcttctttcgccgctggcgaaagaactgggaaaacacttggtttccccaagtccctttcctgcgggtatcgaaagaggaggagattcgtttgaattgtcctttttgcggcgcggaaatggggagcggcgctttgcaaagcaactatggaatctattggctgccaaagcctcggaaagccggaccaccggacttgtctaaggatgcagagcatttgagcaggcaggataccccgcttattacgccaccttatatcccagcctcccgctgtaccaagtgccggaagattattcttgattactgagctgccgccccggtcggcacgtctatgaccgtccgggccacggtgcggcgggcggttgataaccgcccctacaggaagatctccgggctttcccgaactgccaggagagcggcagcgaaaagcggcgcaggatgtatccctgacttccccgggctggtggtttccccaagggtagcgcgtttccgtccctgactgccgcaagggaccgtcaaccatcccccgccggcggcaggaggtctgcgcctgcgcagaccgacccgccgaacatgttttcttttccaccgggcgcggcgcattttctttttgatgtctcaaaaagaaaatggggggcgcatctgccagacatcatcatagctgcctttccccgctgaaacgggcggccttacaactgcatatcctcattttcaaataaaggaaggtacacaatcatggataaggttctgaaaatcggcatcatcggctgcggcgccatcggcaaggatcactgccgccgcattatcgagacggtccccggcgccacggtcgtggccgtcagcgactatgtggctgctgccgccgacgagactgccgccaagtacggcatcaagtcctatggcaacgactgcgacggcatgatcaaggaccctgaggtggaggccgtggtcatcacctccatcgatcctacccatcacgactacgtcatgaagactctggcagaggagaagtggtgcttctgtgagaagcccctgagccagaacgccaaggactgcgaggagatcatccgccgggagcaggagatcggcaagcggctggtgcaggtgggcttcatgcgccactatgatcggggctacgctgagatgaagcggatcatcgcctccggcgagctgggcaagcccctcatcatcaaggcctgccaccgcaacgtctcccagggcccgggcttcaagaccgagaacggtgtcaccaacgtcgccattcacgagctggacatctgccgctggctgctggatgacgagtatgaggacgtgcagtgcgtgaaggtccgccagtcctccaactccgacaagggctatgataacccccaggtgatgctgatgcgcaccaagaagggctgcttcatcgatgtggaggtccaggtggccgacggctacggctatgacatccagtgcgaggtggtctgcgagaacggcaccgtcaagctgcccgatccctacgccgtggtgtgccgctcccgtcccgccggctgggacagcgtgaagcccgccgagtccatgcccatcatgaccgactggaaggagcgcttcatcgaggcttatgacattgagttctgcaagtgggtggagtccgtccatgccggcaagctcaccggcccctcctcctgggacggctacgtggcctgcgtggctggcgacgctctgaacgcctcccgcggaacctctcagttcctgaaggtggagaccatggaaaagccggaaatgtacaagtaatctgcaaaatcaagcgcaaaaaggccgccctcccgggcggcctttttgcggggatcccctgggaagcgtgaagggtcgagagttgagaacgaagagcgctgctgtttggatagaagctgcctcttcgtatctctgatttccacccctcacgttttgctctgttggaggacttgtttctttttgtttccaatcgttcacaaaatctcccttgttttcgcggtcggaaggctgtaccataaaaacagaacaaagaagatcagacggccgtccgcggccggaaaggaacgatatgaacatacgaaagaaaatcctgactcgctgcggcgccctgctgacggcggttctggtgctggccccaaccgccctggcggcggaggctgagataccgtacatcccccagactgtcccggcggcccagcttgctccggcagaccagagggggcaggaggactggcagctgctgctggtgaacccttggcacacggtgccggagggatatgagatcaagctggccacgttatccaatggactccaggtggacgaacggatctatgatgatctggatgacatgctctccgactgccgggaggcgggcctgaaccccatcgtctgctccgcttaccggacagaggccacccagacccggctgtaccggaacaaggtggcgcgggtccgggcctccggtgtgccggaggaccgggtggaggcggaggccgcccggtgggtggccaagcccggcaccagcgagcaccagaccggcctggctctggacattgtagccgccggctatcagatcctggacgaggaacaggaggacacggcggagcagaagtggctgatggagaacagctggaagtacggcttcatcctccgttatccttcggagaagagcgacatcacaggcatcgggtacgagccctggcactaccgttacgtgggcaaggcggcggcagcggacatctaccgcaccggcgtctgcctggaggagtatctgagccaggaggggccggaggcggagctggcgcctgcgcagacaatccggcaggcggccccggcatccggctctatggagaccgcgccgcagggggcggcggccatctgaaactgcatccacatacacggcggggaaacccgccgtgtatattttccctgaattcctacttgacaaataggattttttgtgagataactataccatagtaattaactgggaaaaggagtgaaccagatgaagatttacgcggacaacgcggccaccactcgggtgagcgacacggcgctggcggccatgacgccctgctttcaggagatctacggcaatccttccagccttcatacgccgggacagcgggcggcggagaagctggcggccgcccgggcgatctttgcacggaacctgcatgcggatccccgggagatcaccttcacctccggcggcagcgaggcggacaaccaggccctccgtaccgcggcggccttgggggagaagcggggcaaacgtcatatcgtctcaacgaaattcgagcaccatgccgtgctccataccctccaggccctggagcgggagggctttgaagtaaccctgctggacattccgccggacggcgtggtgacggcggagcaggtccgggatgccatccggccggacacttgtctggtgagcgtcatgtttgccaacaacgagatcggcaccatccagcccattgctgagatcggcgccgtctgccgccaggcgggggtcctgtttcacacggacgcggtccaggcggcaggccacctgcccatcgatgtggaggcgatgcaggtggacctgctgtccctctccgcccataagttccatgggcccaagggcgtgggagtgctgtacgcccggcgcagtattcctctggctacgctgatccatggcggtgcccaggagcgggggaagcggggcggcacggaggacatccccggcatctgcggcgctgcggccgcctttgacgaggcctgtgccaccatagaacagaacgccgcctacctcacgcctctgcgggacaggctgatcgccggccttaccgccatcccccacaccgcgctgaacggcgattcggcccggcggctgccggggaatgtgaacgtgtgcttcgaggggatcgaaggggagtccctgctgttgctgctggatgaaaagggcatcgccgcctcctccggcagcgcctgtacctccggctccctggaccccagccatgtgctgctggccctggggcggccccacgaggtggctcacggctccctccggctgagcctgagccatgagaaccggccggaggagatcgactatatcctggaggtcctgccggggatcgtgtcctatctgcggggcatgtcccctgtgtgggacgagctggagaccggcctgcggccgcatctgatctgaaaggagacaatgactatggccttatatagtgataaagtgatggaccacttccagcatccccggaacgtggggaagctgcccgacgccgacggcgtgggcgaggtgggcaacgccaagtgcggggatatcatgcggatgtatatccaggtggacccggagacccaagtgattaccgatgtaaagttcaacaccttcggctgcggcagtgccatcgccaccagctctatggctacggagatgatcaagggcaagcctgtttccgaggccctgcagctcaccaaccgggcagtggtggaggctctggacggccttccggcccataagctccactgctctgtccttgcggaagaggcggtgcgggctgctatccgggattactacgaccggaacagcatcccctacggagaggaactgcgggcttgcgaaggacattgcgatacctgcggacattaagaaaacgcctcggagcaatgctccggggcgttgtttctcccaatcaaaaatcatcgtccccgtctagctcgtcctcgtacgggtagcagtccgcgaacatcttctcaaaccggcgctgattcttccggtcgttgggcgtcatccgattcagattcttcagaaaggacaaaatcataccgaagagatatccaaaggtgccgggggcggcggtgagccagatcatcagcgcggaaatcacggccacgcccagaaagccgatcaccgtgcgccaggcgatccggcggagtgccagcgccagatcaaaggccgggacctggtgcttccggcgtctggccagggagatggaggagcaaagcgccaccagggcctgaacgccgaagatgctcatgataagaaaaccggcgacagccgcgcacagaaaatggagggcgattgaggcgatatccatgcagggttctcctcccatgtccaactgagtacgatcattatacaggaaaaccgccggtttgacaaggggtgttcacgcgagccaccatgtccggccgtccaactgtccgtcctggatggtcactacgccataggaggggcgggtgggggcaccgatgctgccgggattcaggaacagtgtccggccccgccggtccaccagaggtctgtgggtgtggccgaagaggaagaggtccagctgttgttcctccgcggcaaaccccgcggtcaccagggactgcttcacgccgtaggtgtggccgtggcacaggagaatacgcttgccccgcagctccagcagccgttccgccggctctgtgggacggaagtcacagttgcccggaacctgttccagggggatggagggaaacctgtcgtggagccgttccccgtcccgccagcagtcccccagatgcagaatcaggtccggggaggtctgctccacggcctgctccatgggactgacggcgccatgggaatccgagagtaccagaattttcataggcatttcctttccggagaggtcttttggttcagtatagaggacggcggcagattttgcaaattttttgcgtggatccccggcgcgctttcccggatgcggaaaaattgaaaaaggggcttgacagagcagagcggctatggtatattctacctgtggttagttaaaactaactaacggcgcgggccgggagcggcccatactttcaacgccggggtttgctaaaactaacttcggcggcaggaacggagggcagtcatggaacggagctttgaagcggtgctggtggaacaatgtgccaccacgctggcgggtgtgaagccggccagcctgttccggtatcagggcgctgacaagcggcagccccgggaggccgcggcccgctgggccaaagagctggccccttacggcatcaccatccgggtcctgaaatactgtccgcagacgggtgcttgtctgatctacctgtaccgggccggatggcttcggtcgatcctctcggagccatccacccgcgcctttctggcggggcaggggtatggggcggatcagagctgtcaggagctgctgaggcagctttccaggcggctgtgcctggagcgggaattcccccatgagatcggcgtctttctgggctaccccctggaggatgtggtgggcttcatccggaaccggggcaggaactacacctgctgcggatactggaaggcctacggcgacccggaggcggcacaaaagcgtttcgatcaataccgccgctgcactgccgcctgctgtgagcagttccggaagggcacggccatcacgcagctgatcgcagcgtgagctccaacacaagctggaaaggaagcaatgctatgaacaaattagccatcgtatactggagcggtaccggcaacacggagaccatggccaactgcatcgcagacggcgccagggagtccggtgcggaggtcgccatgctgccccctggggagttctctgccgcccggttttctgaatttggtgtcgtggccttcggctgccccgccatgggcgccgagcagctggaggaggacgaagtggaacccatgttcgccggattggaggactctctgggcggaaagaagatcgccctgttcggctcctacggctggggcgacggccaatggatgcgggagtggtgcagccgctgcgaggcggcgggcgccaacctgtatgacgaagcgggcctgatcgccaatgattctcccaatgaagaggcccgagaggcctgccgggagttgggccgcaagctggcggcctggtaacatttgctcatcaaagatctttctttgatacttatctccttttttcccctcaacatggccctcgcgcggtgtgcctgccgcgcgggggccgactcctttttcacggctttcaaatttttccgaaaaagggcttgacagccatggttagccatgataaactacaaaaccgaaagaaggttagcaaaagctaaccacagaacagatccaagtggaagaagtgtcttgcagaggagggaggttttatgatgcctctgacaatggcccggccgggagagactgttacgatccgcaagatcaccggcagggatgaggtccggcagcatctggcggagctgggattcgtggtgaacagtgatgtcacggtggtcagccagctggccggcaatctgatcctgcaggtgaaggacagccgggtggcattggacaagaccatggcgaaccggatcatgatttgagagcagagtaggaggaagaatatgaagagcctgaaagatgtcaaggtgggggagaccgccacagtggtcaaactccacggagagggcgctaccaagcgccggatcatggatatgggcattaccaagggcgtggagatccacgtccgcaaggttgcgcctctgggcgatccgatggagctgaatgtgcggggctatgagctcagtgtgcggaaggccgacgcggagaagatcgaggtctcttaaagaggggactgcgtccccctttacgctccggcagacctgcggtctgcctccactattccccctcaccagtgacgttggtcactggtgtgtgcgccccagggacgcacgggtcgggggattttcggcaggtacac

SEQ ID NO: 4972 - DNA, 54363 bp, Unknown
  gut microbiota DNA sequence
ggcccccctttcccggatgatgcggggacggtggaaatatcaatggcggctgttgccgctgtttttcaggatgaaagttagcctaaactaacactttggaaggagagaacgatggacatgaagatcgcactggccggcaatccgaactgcggcaagactacgctgttcaacgacttgaccggctccaaccagtacgtgggcaactggcccggcgtcacagtggaaaagaaggagggccggctgaagggacgcaaggatatcgtcatccaggacctgcccggcatttactccctgtccccctatacactggaggaagtggtggcccggaactatctggtgaaggagaagcccgacgccattttgaacatcgtggacggcaccaatatcgagcggaacctgtacctgaccacccagctgatcgaactgggcctgcccgtggtggtggcggtgaacatgatggacctggtccgcagaaacggcgaccagatcgacgccaggaagctgagtgacgccctgggctgccaggtggtggagatcagcgccctgaagggcgagggcggcgtggaggctgcggagctggctgccaagatggcccagcagaagcgcgccgctgaactgccccacgtgttcacgggcagcgtggagcacgccatcgcccacatcgaggagtccatccagggtatggtggacgaccgatatctccgctggtacgcggtgaaggtctttgagcgggatgagaaggtcctggcggacctgaacctgagcacagacctccgggcccacctggaggaccacatcgtggactgcgagaaggagctggatgacgacgcggagagcatcatcaccaaccagcggtatgcgtacatcaacgatctggtgacgaaggccgtcaagaagaagggcgagaaacatcgcctctccacctccgacaagatcgaccagatcgtcaccaaccggatcctggccctgcccatcttcgccgtggtgatgttcgcggtgtattggatcgccatgggtcccttcggcaccttcctgacggactggaccaacgatgtgctgggcactgcctggctggtggagatcccccgtgccgccctggagggctggggcgtcaacgaagtggtcgtgggcctgatctgcgacggcgccctggccggtgtcggcgcggtgctgggcttcgtgccccagatgctggtgctgttcctgatgctggccattctggaggacatcggctacatggcgcgaatcgccttcatcatggaccggatcttccggaagttcggcctctccggcaagagcttcatccccatgctggtgggcaccggctgcggtgtccccggcgtcatggcctctcggaccattgagaacgagcgggaccgccgcatgacggtcatgaccacctgcttcatcccctgcggcgctaagatgcccatcatcggcctgatcgccggcgccctgttcggtggctccggcctggtggccgcatccgcttacttcatcggtgtggcggccatcgtcatctccggtatcatcctgaaaaagaccaagatgttcgccggcgacccggcgcccttcgtcatggagctgcctgcttaccacatcccctccgtgggcaacgtactgcgggccacctgggagcggggctggtccttcatcaagcgggccggcacggtgatcctggcctcctctatcatcctgtggttcctccagggcttcggctgggagaacggcgccttcggcctggtggaggacatgaataactccgtcttggccgctatcggcagtgccgtggccttcattttcgcgcccctgggcttcggcaactggcgggccactgtggccgtggtcacgggcctgatcgccaaggagaacgtagtggccaccttcggcgtgctgtacaacttcgctggggagctcagtgagaacggcgacgagatttgggctctagtggcacaggactacaccgccatttccgcctactcctttatgatcttcaacctgctgtgcgccccctgtttcgcggccatgggcgccatcaagcgggagatgaacaacgccaagtggaccgcctttgccatcggctatatgtgcgtgttcgcctatgtggtctccctgattgtctatcagatcggcggcctcatcaccggcgaggtctccttcggcatcggcactgtggtggccgtggtcctggttgtgggcattgtgtacctgctgttccgtaagaacaagtacgaggacgagcggctgaccatccgctcggtggatgccgccggacgccgcgccgccctgaaataagaaaggaagcagccaatgaacgcacccactatcatcgcggccctcatcgtcctggtggtctttgcggccatcgtaggcaagggcatctacaaccggcgtcacggaaagggcggctgctcctgcggcggcgactgcggggcctgcggcggatgccactgcggaaatacccgtcattcctgacgagcggaagcccggccccaccgggcggaaggaggcgttccatttcatggaactgagccaagcgcatctgcggtatctgttggccattggcgagctgtcccagggaaaggcggcggtcagctccacccaggtggcccgggtcctccaggtgtcccgcccctccgtcacccggatgctggctgtcctggcggaaaaggacctggtgaccaaggaacgctacggcaagatcaccctgacggagacgggggcggccctggcccatcagctgcaagcgggcctccgggacctggagcggcggctgccggccctgggcctggacctggaccgggaagagaccgccgccgtggcgggggccctggcctcagtcctgccggagcactgtctccgaaagctctgcacgaccgaatccggcgggacaatgggatgtgccacgccttaaaaaagcagtcctgcggcttttgccgcaggactgcctcttttcttgagcatagaactataaaagagatatgatatattttgagaagacccggggccattgggccgccaggtccttttgtttccgatcctttatcttcacgctctattccagtctctgtaccgcggctcccagcacgccgtcgccgatgtagacgctcaacgtaccatccagctcgccgctccagatgtggtcgtagtttggcagggcggtggtgagcttgccctgcagaatctccatctccgccggagcgccgccgttggccaccgccagattgtaccgcgccgcgccgttgtgggactgcgtcaccagctcgatgagcttgcggatcaccaggttccggccccggaccttggcaatggactggagctgcccgtcggcggcgaaggtgatgaggggcttgatctggagcatggtgcccgccatggccgtcaccttgccgatgcggccgcctttctgcagatactccagcgtgtccacggagaaaaaggggaaggtgttctggatcaaccagggcacccggcgctctgtcagtgtctgccagtccatcccctgccgcagctcctctgccagctggaggatcatcataccggtgcccagagacccgctgacggagtcatacacccgaatggtcaggtccctccgctcctccgccagcagccgcaccatgttgtaggtgccggataggccgccggagagcatcagggcgatgaccccgtcataccccgccgcggcgatggcgtcaaaggagtccgaaatgtcctgagcggcgggcagggaggtctgaggcagctctccggaccgcagccgggcatagatgtcggcggcgtggatgtccacgccgtcccggtactctccgtctttgcacaggatccgcaggggcacgacaaagacctggttttccgccgccagttgaggggagaggtccgcacaggaatccgtgagcagggcgattttttggggtgtcatggtcacatctccaaacctttctctcatgcagggccggcagacctgtccgccggatcggatgatatggtgtgcccattccgtcacaccatatcaatataacctagtatatggaatgctaccgtaaaaatcaagaggaaaatccccgtagggggaacaggaagcccgttcctgtctactggtgaaattttgtagcgagaggacttgccaaaggcggcggatttccggtatgataaaacacaggatctgaaagggaggaaagaccgtgccgctggatgtgaaggccgctgtggcggatgcactgctggagctcattcgccggaaggatgcagacaagatcaccgtgaaggacctggtggaggtctgtgggatctcccgtcagacgttttactaccacttcaaggacattgtggatgtggtggagtgggcggctcagcagggagtccagcgactggtgcgcgagagcctgaacgccgccaccccccaggaggccctgggcgtcttcgtggattttgccgtagaatcccagcccctggttcagcggctgctgaactcccagcggcgggaggccatagagcggatcatggtggacgccacccgtacatacctggcggacagcctgcgggagcggcggggaacgcccgccctccgggccggggactggaagattgccctggatttctatgcctatgggatgaccggactgctgctggagaactgccgccagcgggatctggaccggcaggagctggcggatcagctgttccgcctgctgtccggcgagatggtccgccctccggaaacctgacagatgtgcccgcgtgtcaaagagcttgacacgcgggcatttttgtcaggacagacagcctcctctgccagtggcgcgcacggagcggacgtggtataaccacagcatgagagcggagacagcgcagtgaccggaaaggagtgcgcgcatggaattgagagatggaatgtttgccgtgaagctctgcgagctggagcatcagtacggcctgctgagaagccgcctggagctgtgccagggggcggaccacgagaagatccggcacctgctggcggacgtgctggatgactatcgggaaaacgccctgctgctggagcagagcgcggagggctgccgctccccggcagtggcggagctggcgggcgtccagcgggactactccaaacggatggaggagctgctgcgggacaggctgccccgcctgatgcacggggaagaggacccgcaggaggagcgggcggaggcagcggcccttttcgcggagtacgccatcgacttcgcggcccagggcgtgcgcagcgccctgctggcggccctggccgccatggaccaacagatgaactgtgaggaacaacaaggaaaggaacatcccgtatgaaagaagtcagacccccgaaacggcccttgattttttactactgcgtggccatgctgattctgctgctgttcaacttcctggccatgccctggatggcccgccagcagatccaggaggtggattacggcaccttcatggacatggcggaaaaccaggatctgggccaagtggagatccaggagcaggagaaccagatcgtctttaccaacaaggatgagaccgccgtctactccaccggcatgatcccggatccggacctgaaacagatgctgaaggactccggcgcggagttctccggccaagtcatccagcagacggatcccatcctcagctttctgctgacctggatcctgcccatcgtcatctttgttgccctggggcagtatctctcccggcgcatgatgaagaacatgggcggccccaacgccatggccttcggcaagtccaacgccaaggtgtatgtcaagtcctctgagggcatcaaattctccgacgtggccggagaggacgaggccaaggacaatctcaaggagatcgtggagtacctccacgacccaaagaagtatcaggagatcggcgccaccatgcccaagggcatcctgctggtaggccctcccggcaccggcaagaccatgctggccaaggccgtggcaggcgaggccaacgtgcccttcttctccatctccggctccgacttcgtggaaatgttcgtgggcatgggcgccagcaaggtgcgggacctgttcaagcaggccaaggagaaggccccctgcatcgtgttcatcgacgagatcgacgccatcggccagaagcggaattccggcgcctatggcggaaacgacgagcgggagcagaccctgaaccagctgctgaccgagatggacggctttgagggcaataccggcgtcatcatcctggcggccaccaaccggccggagtccctggaccccgccctgacccggcccggccggtttgaccggcgggtgccggtggagctgccggacctacagggccgggaggatattctgaaggtccacgccaagaagatcaaggtggcggaggacgtggattggggcaaggtggcccgaatggcatccggcgccagcggcgcagagctggccaacatcgtcaacgaggcggcgctgcgggctgtccgggacggccgccgctttgctgcccaggcagatctggaagagagcatcgaggtggtcatcgcaggctaccagaagaagaacgccatcctgacagaccaggagaagaaggtggtggcctaccacgagatcggccacgctttggtcgcggccaagcagaccaattccgcccctgtacagaagatcaccatcgtgccccggacctccggcgccctgggctacaccatgcaggtggaggagggcaaccactacctgatgagccaggaggagctggagaacaagatcgccacgcttaccggcggccgggcggcggaagagctggtcttccactccgcctccaccggcgcctccaatgacatcgagcaggccaccaagctggcccgggccatgattacccggtacggcatgagccctgactttgacatggtggccctggagacagtgcaaaatcagtacttggggggcgacgcctccctggcctgctccgccgagactgcggcggagatcgaccggcaggtggtggagctggtgaagcgccagcacgaaaaggccaaccgaatcctctcggagaaccgggagaagctggacgagctggcccggtatctgtacgaaaaggagacgattaccggtgacgagttcatggagatcctgaatcagtgagcatccgatccgtaaatcagaaaagaggaggcgcccttcggcgcctcctcttttgctgccgtctcacagccccaggccgtagatgcggttggcgttgtcaaagaacaccggctcccagtgtgtctccggcaccagccggcggataaagccgatatattctcccaggttgacaatgggccagtcggtcccgaacatcaccttgtcccagcactggatggccgtcagccaggtgcgcagcaggaacacgtagcccgcctgctcccggaaataggcgtccaggtccacccgcccctccagaaggccggacaggtcggcggccacattgggatttttctccaccactgccgccgcggcctccagaaaggggttgccgaagtggcacatgacgaactgggtatccggatggtctgccgccacctcatccagggccagggggtggcagtatttcagatgggcccgggagaaggcggtcagccccatgtgaacggccaccggcttaccgtaacgggctgccaggcggtagatgggctggtacatggggtccgacagagcgatcttgttgtacccggggtacagcttcacgccgcagcagttgtcccgccgcaggtgcgcctccacccggtccgccaggtccgggatcacccggctcccgtcctccagcaggctgctgtccaggcccacgcagtagtggaacaggtctgtggggtagtcgtgccgccggagctccagactgtgatttcccatcaccacgccgtgggcaatgtgcagttctccatagacctcccgcagatggtctacgttgttgtgatggcccacctgccgggccatctcctcggcagaatcttccgaaaacaggtgcaggtgggcgtcgatgatcttcatacccgcagttctccttccagttcgccccggtatccagcggagcggcgatttttcaacaccgctattataacagagtttgccgccttcgcaacccccgtatgaaaacggttcccgaaaaaagcacagaggtcagtgacctctgtgcttttcctttcgacgcgcctgccgcagctggaacttccgcgcttcctccgcctcccgctgttggcgggtgcgggcgagacgggcctgcttcccctgctcctgttggagcttcagggcctgctgggccttggtgccgatccctgcggcctgggtcatccgccgggcctcccgctggcgccgcttggggcttttgggagggggcagatgctctgtccctggccggggcgggctgaatcgcagcgtccgccagtgttccagaagataggcgtagacctcctggtcccggggctccgcgccgaagacgatccggcagacggagtactccgtgtcgtcctcccgctcgtacaggccgatccagaagggatcgtcgaacaggatggtgagcctgcttgtgcccatgcgtgtgtcctcctttaaaggtctcgcacaaagaacggacaaccaaggaggcaggttactgacggcacatgggccgctcccggactaccaaccgggacgtgtttttatctttgcgctatcagcataccacagcgggcgcgggatggcaaggccgggagacaaagcgtcccttttcccatcagccgcggcggtcgtatgatatgataaaagggaccgaaacaagctgtaagatttgatcgcaaaccttgtgtatatcagtgaaggggtaaataagaagcgaggtgaaagccgatggatgacacaacaatcgtccagttatactgggatcgagatgagcgggccatccccgccacatccggcaaatatggaaactactgtaactcgatcgcctggaacatcctgggcaatcgggaagacgccgaagaatgcgtcaatgatacctatctgtgtgcatggacctctatgccgccccacaggcccagggttctgtccgcattcctggggaagctcacgagaaacttgtccctgaaccgatacaagcatcatatcgcggagaaacgaggcggcggagaggccccggctgtgctggatgaaattgcggagctcgtatccgacacggacaacgtggagcgggcagtggaccgcagggaacttgtaagggcgatcgacacttttttggagaggcttccagcggataagaggcgcatttttgtctgccggtactggtatttcgatccggtttccaagatcgcgtcccggtttggaatgacggagaaccatgtatccgtaacactgaatcgcctccggctgaaattacacaactatcttcaggaaaggggctttgacctgtgaaaagagaggaattttgcgaagtcctcggtgacatcaatgagaactatgtgaaagaggccggagcaaatcccaaagccgagaagcggaggcggtttaagtggaaagtgatcgcggcctgtttatgcctgctgcttgcggcgccgctgaccgtattcgccatggataccattcagtatcatgcggcagtggattatctgcgttccctcgggatccccgttgaagatctgagcgactactcccgcacggaaatcaaagaggccgtgaaaacgatggatgcgggagaaagcagcctgctgacggaagaaattctgaacctgctgccagatagcggagaaccgatacaaaggccaacacaggtgacatcagaacaggtcagggaattgacaccgaccatgacgcgagaagaggtcctttcatttttgggcgatacccaggacatcggttccggcatttacatatatatttataaagtagacggagaagcactgctgcggatcccgtttgcaagtgatgaagcgcagctgggggtcacaggagaagaactattaaagaccttatccccgtaagggcgcaggaagggctgatgcggaaacgtcccgttatttccctcccaaaaagggcggcccctacgaccgccaggggagcgcgcagcgactgcgcatccgttgacggctgtgccgccttacggttgcggcgtgcccgatgcgggcaagcggagcgcgcagaaggagggaaaccagcggaacactggtgtcgcaaatactgagagcgccgcagcgcgagacagaaaaacagaggcagatcgaaggcgtccttacaccctgattttggtcggcacttcgccgcgggaatcaactgccaagtctctgcggcactccgccgcgcccgccgggatgccatcgtaaacccgcaggcaccctctcatgccgcccccatacagcaactttgcatgcacgtgccggagcgcgacaaaaggcgttcttttggaatgtgcattgggacaagccgtcatcgcggctgaatccccctatgtgggacccataaaaaagcggctggccttccgtccagccgcctcgtattttctggcaggaaaaatctctcagctccgctgattccccgaattggtggtgtccttcagcagcacgtcatgggctccgccctccacaatggagacggaggacaccagggtcaacttggccttctcccgcagttccgggatggtcagcgcgccgcagttgcacatggtggaccgcaccttggaaagggtggtggccatgccgtccgacagcttgccggcatagggcacgtaggagtccacgccctcctcgaaggagagcttggccgctccgcccaggtcgtaccgctgccagttcctggcccgggcgctgccctcgccccagtactccttcatatagctgccgccgatcagcaccttgctggtgggggactcgtcgaaccgggagaaataccgccccagcatacagaagtccgcgcccatggccagggccagggtgatgtggtagtcctggacaatgccgccgtcggcacagatgggcacgtagacgccggtctcggcaaaataccggtcccgctctgccgccacatcgatgaccgccgtggcctggccccggccgatgcctttggtctcccgggtgatgcagatggagccgccgccgatgcccaccttcacgaagtcggcaccgcaatccgccaggaagcggaagccctcgccatccaccacgttgccggcgcccaccttcacggtgtcgccatagcgggagcgaatccaggccagggtccgcttctgccactcggagtagccctcggaggagtcgatcaccagcacgtccgcgccggcctccaccagggcgggcacccgttcctcatagtcccgggagttgatgccggcgcccaccacataccgcttctgactgtccagcagctccagggggttgcccttgtgggagtcgtagtccttccggaacacgaagctcaccagatgcccgccggcggagacgatgggcagggcgttgagcttgtggtcccagatgatatcattggcggccttcaggctggtgccctccggggcggagacgattttctccgccggggtcatgaattcgctgaccggggtggccgggtccatgcggctcacccggtagtcccggctggtgacgaggcccagcagctttccggtgccggtgccgtcatccgtgaccgccatggtggagtggccggtccgttccttcaaggccagcacgtccgccagcgtgtcccccaggcggagattggagtcgctgatgacaaagcccgccttgtagttcttcaccctccgtaccatctccgcctgctgctcgatgggctgggagacatagatgaaggcgatgccgccctccttcgccagggcgatgcccatctgctctccggataccgcctgcatgacggcggagaccatgggcacgttcatggtgagagcgggctcctccccccgccggtacttcaccaccggggtcttgagggagacgtttgcgggaatgcactccgcggaggagtagccgggcaccagcaggtactcactgaaggtacgggagggctcggagaaaaaataagccatagggccacctcatttcatcagatttcaagtggaagctggatttacaggtccagctggaaaaacagtgtggactccacaggactgtcgttgtagcaggggatctcgtaaaatcccagctgccggtagaggcggacggcatcctccagaaccggcagggtgtccagcagcatacagcggtagccgatctgccgcgcgtcctctgtgatccggcggatcagctgccgggcaagcccccggccccggtactgcggctggacgtacaggcgcttcatttcgcatcgctcgccgtccagccgccgcagggcgatacagcccgccgcccgcccgtccacccgggccaggtacagccgtccgtccggcggggcgtacttggcggcgggggcgcgcagctcgtccgcatagtgctggatgtccagatagatttgaaaagctgggtcgtgcgtcaccagcatggcggtgtacgcctcaaacagggcccgaacgtctgagagggcattataggccggttcgatcacaacggttgaatccatattcaagcacctcccggcggatgtttcagatatgatacccggttccggccggtctgtcaaccgttagagagaaaaatagtcctttgcggcatcgaacaggccaagatcgtaattccccgggatatttcggtacaggcagggccccacccgctcggcgtgccccatcttgccgaagacccggccgtcgggtgaggtgatgccctctaccgaccagacggagccgttggggttgccgtcgatatccatggtgggatggccgtccagatccacgtactgggtggcgatctggccgttttccgccaactgtgccaagagatccggcgggcagaggaaccgcccttccccgtgggagatggggacgctgacgatgtcccccacctggaccttggtcagccagggggaccggttggaggccacccgggtccggacgatccgggactggtggcggccgatgacattgtaagtcagcgtggggcaggcggcatctgtgtcccggatttctccgaaggggaccagccccagcttgatgagggcctggaagccgttgcagatgcccaggacgaggccatcccggttttgcagcaggtccatcaccgcgtctgcggcctggggggaccggagaaaggcggtgatgaacttgccggagccgtcgggctcgtcgccgccggagaagccgccgggcaggaagaggatctgactgctccgggctgcctgggcaaaccgggcggcggatgccgccacatggtccggtgtctgattattcagcaccaggatctgcggctccaggccagcccgtagcgccgcccgggcgctgtcgtactcgcagttggtgccgggaaacacaggaatcagcacctttggctttgccgtgcctgtccggggagcggcgcgggagaaggccggggcctccagtaccggcaccagcgcaggatcggcagggactcggctggggtatacatcctccagcacggactcgttcagggagagcagctcgtcgatggagacgctgtcagcgccggtggtgaggaccggctccgccgtggtggtgcccagcctgacggcgcagaggaggtctgtgtcctccgtcagctccgccacaatggcgccagggcacggcaggtcccaggcgatctcacgcccctcggcctgaaagccgatggagttaccgaaggacatctgcataatcccctcggcgatgccgtgctccaccgcccaggcggagcacaccctgcccgcccggcaaagctggtggaaggtctcccaggcttccctctggctctgggcgccgccgttggcgggagcaaagaggtacaccggatgtcccgcctccttgaactcgggggagagcacctccccggcccggatgggggcgatggcaaaggagatgagggtagggggcacgtccagatcgttgaaggtgccggacatggagtccttgccgccgatggccgccgcgccgaagtccagctgggcgtccagagcccccagcagggcggcgaagggcttgccccagcgtgcggggtcctcccggagcttttcaaagaactcctggagggtgaggtaggcccttcgatagtctgccccggcggccaccagcttggcaagggaggtgaccacaccgttataggccccccggtaggggtccgccgccatagcctccgggtcgaagccccaggccataacgctggcctggtccgtctcctgccccggcagcaccggcagaagggcggccatcacctgggcgggggttctctgatttctgccgccgaagggcatcaacacgctgccacagccgatggtggaatcgaaccgctccgccagccctctgcgggaggcggacgccagactggaggctatggagcggagggaggagttttcggcatcctgggagaccggggacgcgggaatgggggcaggaaccgccgcccgggcgtgcttcacggcgccgttggtgttcaggaagtcccggctcaggtccacgatggtcctgccccgccagcgcatcaccatccggggggacgccgtcaccaccgccacggggtacgcttccagattctccgcctccgcggcggcgatgaatcggtctgcgtttgaccgggccaccaccactgccattcgctcctgggactcggagatggccagctctgtgccgtccaggccgtcgtacttcttccgcactgcgtccagatcgatatccaggccgtccgccagctcacccacggccacggatacgccgcctgcgccgaagtcgttgcaccgcttgatgagccgggtgacattcccatcccggaacagccgctggatcttccgctcctccggggcgttgcccttctggacctcgctggccatggtggtgagagactgcctgttgtggctcttggaggagccggtggcgccgccgatgccgtcccggccggtgcgcccccccagcaggatcaccacgtccccgggctggggccgttcgcggaccacattctccgccggggcggcggccaccaccacgccgcactccaaatgcttggcgatgtagccggggtgatatacctcgctgaccagccctgtggccaggccgatctggttgccgtaggaggagtagcccgccgcggcggtctgggcgagcttgcgctggggcagcttgccggacagggtctccgccaccggcgtccgggggtcgccgcagccggtgagccgcatggcctggtggacgtaggcccggccggacaggggatcccggatgcagccgccgatgcaggtggccgcgccgccgaagggctcgatctccgtggggtggttgtgggtttcgttcttgaacatcagcagccagtcctggggcttgtcgttcacctgggcggcgacatggatggagcaggcgttgatctcctcactctcgtcaatttccggcagaagcccccgtcgcttcagcaccttggcgccgatggtggcgatatccatgagggtctgtggccgctgggcagctttctctgtcccatagacctcctcccgggcggccagataccggttataggcggcctggaccgccggatcgttgatctccacgtggtccagatgggtggagaacgtggtgtggcggcagtggtcggaccagtaggtgtccaccacccggatctccgtcagggtggggtcccggcgctccgagtcccggaagtatgcctggaggaacgacaggtcctccaggtccatggcgagacccagccgcgccagcagggtatccaggcccgcccggtccagggcagtgaagcccgtgaccgtttccacgtctgccgggacggcggtctctgccgccagccgctccggcaggtccaaagacgcctcccggcactccacggggttgaggacataccgcttcaccgcgtccacatccgccgccgtcaggggaccgaagagcagatagatcctggcggtgcggaccgtgggccgctcctcctgagtcatcagctgaatacactgggcggcggagtccgcccgctggtcgaactgtcccggcaggggctccacgccgaaggcgatgcagtccccggcgggcagggctgcggcagtatcgtccacctgaggctcagagaacactgtccccaccgcccggcggaaggcggcctcgtccaggccctccacgtcatagcggttcagcaggcgcaggtcctccaaggcggagacgcccaccacggtctgcagctcgtgcagcaggccccgggcctcctgccggagccccggcttcttttccacatagatccgtcttaccatcgtatgacctcccggcgccggttgggcgctcatcaaaatatgcgtttcagtccgccagagccgccagagcccgctggccgatgtcatggcgcaggtatttgccgtcaaagtccaccgccctggcggcggcgtaggcgtcgtgcaaagcctgccgcaaagtgggaccggtggcggtgacgcccagtacccggccgccgctggtgaccagctgcccattctcgtccagtctgtccccggcgtggtagatggtcacgtttcccggtgccgacgcgggcagagagatgggcttacccttttcgtagtgccctggatacccgccggaggccaagatcacacaggcggcggaggcgtgccgccattccacggtgagcgatcccagggtctcgctttccaccgcctgcatgaccgtcagcaggtctgttttcagcaggggcagcaccacctgggtctccgggtccccgaagcggcagttgtactcgatgaccttgggcccgtccggggtcagcatcaaaccgaagtacaggcagcccttgaaggggcagctttccgcccgcatggcggccagagtgggcaggaagatggtgtccatgcacactcgggcgatgtcctcggtgtagcaggggttgggagccacggtgcccatgccgccggtgttggggccagtatctccgtcccccacccgcttgtggtccatggaggacaccatgggggcgatggcggtgccgtcggtgaaagccaggacgctgacctccgggccagtcaaaaactcctcgatcaccacccggctgccggagtccccgaaggcccggtcctccatcatggtcctgacggcatcctctgcctcttcataggaccgggagatcagcacgcccttgcccagggccagaccgtccgccttgatgacgatggggaaggaggcggttttcaaataggcgagcgccgcagcgggcgtatcgaacacctcatatcgggcggtggggatgtgatattttttcatcaggtccttggcaaagaccttgctggactcgatccgggcggctctggcgtccggcccgaagcaggggatgcccgcggcgtggagggcgtccacacaccccagagccagaggatcgtccggcgccaccaccgcgaaccccacggcgtgggagacggcgaagtccacaatagcgccgatgtctgtggcgctgatctgcggcacacaaacggcgtcagcggcgatgccgccgttgcccggcagggcgtaaatcgtctccaccaccggattttctttcagttttttgatgatggcgtgctcccggccgccgccgcctactacgagaagatccatcgaatcgtcctccttgcttcgtgtataaaacagtgtgaagagagaccggggaaaaccggacaggctttcccggttgatttgccatcgcaaatcagaaaaggaaacttcattgcccctatccgggcccagactcggcagacccggcggcaggatgccggacaggcccgcttctcttcaaagacgctcagtggtggaacagccgcatccctgtaaacgctatcaccatgccgtatttgttggctgtttcaatgacatggtcatcccggatggaaccgccgggctcaacgatgtactggacgccggattttctcgcccgctccacattatcgccgaaggggaagaaggcgtcggagccgcatgtgacgccggtgagggctgcgatccaggtttttttctcctccgccgtcagaggatcggggcgcacggcgaaggtcttctgccagatgccctccgccagcacgtcctcatactcgtcggagagatatacatcgatggcgttatcccggtccgggcggcgaatgttctccacgaattgcaggcccagcaccttgggatggtggcggagccaccaggtgtccgccttggtgcccgccaggcgggtgcagtggatgcggctctgctggcccgctcccacgccgatggcctgtccgtccttcacgtagcagacggagttggactgggtgtatttcagggtgatgagggccacgatcatgtcccgcttggccgcttccggcaggtccttgttctccgtgacaaggttggtgaggagcgcctcattgatctcaaagttgttccgcccctgttggaaggtgacgccgaacgcgtccttgtactcctggggggcggggacgtagtccgggtcgatctgcacgacgttgtaattgcccttcttcttggttttcaatatctccagggcttcgtcggtgtagccgggggcgatgatgccgtcggacacctcatatttcagataccgggcggtggcggcgtcgcacacgtcggagagggccgcccagtccccgtaggagcacagccggtccgcaccccgggcccggatgtaggcacaggcgatgggggaaaggtctgcgccctcctccacaaagtacatctgccgctccacatccctgagggggttgcccacggcggccccggcgggggacacgtgcttgaaggacgcggcggcgggcaggccggtggcttctttcagttcccgcaccagctgccaggcgttcagcgcgtccagaaagttgatgtatcccggcttgccgttcagcaccgtgaggggcaggtcggacccgtcccgcatgaagatgcgggcgggcttctggttgggattgcagccgtatttcagttccagttcgttcatgcctgggtctcctttccggaatacttgttgacgatgcgctgctggaagtcccgggtctccaggtctgtgaagcggacgaagagggagatcctgttggcctcgtccagagcgtcccaaacggcgctggcgaggctgtcaatgtccccttccacggccacctgctccggctctccggcaaaggagggcaggggatcgccgtctccggcgtaggtgtggaggaagtggccggtccccggctggccgggatactcgaaggtctgccgcaggcagcgtctgccggtcccgtcggcggctttcaggatggacagcttgtaactgccgttgggccccagcagcccggaaatccgcggggtccagttgggaccgtccggctcgaattcccgcgtgcggagggcctgctccatgggaaggccctgctttaaaaactccaggatggtgtccgtctggtccccgttggtgacgatgagtccccggcccatctgccgtaccgggtggtagatgatgaggctggggtcctccatcctggcggggtccgccgcctgggtacggatgccgtccggctcctccgcgaagacgcggttgcggctgttggcgctgcggcccatgatgaaatagacggccacggacgacttgccgtccggcgtcatgcccagcacgatcccacggccgggatagggattgccccgcagcagggcacataaatcctgtttcacagatgctcctccttttccgtggcgatgtgggcggccagctgttctgcggcctggggcagcagcacccactccgcctgttccatgacccggcgctgcaaggtttccggcgtgtcgccgggcagaatgtccaccgctttctgcagcaggatgcgccccccgtccgggatctcgttcaccagatggacggtagcgccggtgaccctgacgccacggcggagggctgcctcatggaccttcagcccgtaatacccctttccacagaaggcggggatcagggagggatggacgttgacgatccggtccggccagcgacggacgaagtccgcggacaggatggacaggaacccggccagcacgaccagatccacccggtactgcgtcagcgcctccatcagcgccgcctcaaacggctcctgccccagctgcttccgagacaggggaatggcaggcacgccgcggcgctttgcccgctccagagcgtaggcttcgggattgctggagaggaccagcacgatctccccgtggggcagggcgcctgtttcctgagcgttcagcagcgcctccaggttggtgccgccgccggagaccagcacagcgatacgggccttgttcagcataggatcacccgttcctctccggagatcacctcacctatcacatagccggggcagccgtgctgggccagggcggagagggcctggtccgccgtgtcccgggagacgatcaccgccatgccgacccccatgttgaaggtgttgaacatgtcccgctccgggatgtggccggtctcccggagcattttgaagatgggtggcgtccggacggcagccttctcaattttcaccgtcatcccatccggcaggcaccgggggatgttctcataaaagcccccgccggtgatgtggctgatgccgtggacctctgccgcgtcgatggcggccagcaccggcttcacatagatgcgggtgggggtcagcagggcctcgcccaggctctcccccagatcttcacagtagaccgtcagattggcatgctccacgtgaaagaccttccgcaccagggagaatccgttggagtggaggcccgaggagggcagggccagcaccacgtccccggagcggacccggtccgggtcgatgatatcgcccttgtccacgatgcccacggaaaagcccgccaggtcgtagtcctccggcgccatgatgccggggtgctcggcggtctcgccgccgatgagggcgcagcccgcctggacgcagccctctgccacgccggagacaatggcggccaccttctccggcacattcttgccgatggcgatgtagtccagaaagaacaggggctttgccccgcagcagatgatgtcgttgacgcacatggccacgcagtccacgcccacggtgtcgtgccggtccagcagctgggcgatgcggattttggtgcccaccccatcagtgccggacaccagcaccggctcacgtatgccggtcaggtccggggcgaacaacccgccaaagcccccaatgccggacactaccccggggatcctggtccgggccacgtggggggccatcagcttcacaccggcgtagcctgcggtgatgtccacgccggacttccggtagctctccgaataactctccatatcaggtcctctccctctcactgatcttgcactcgaatcggtctttgccgccgtcctggggcacggcggtagggtagcccccgccgaagcaggcggtgcagaagccgcactgggtattgtccgccagcttcaccacgtcctgcaggctcagataccccagggaatccacaccgatgatctttgcgatctcctccaccgagtggttgttggcgatgagcttgctggggtcatcgatgtccgtgccgtagtagcaggcggccacaaagggcggcgcgctgacccgcatgtggatctccttcgccccggctttccgcagcaggtcgatggtccggcggcaggtggtgccccggacgatggagtcgtcgatcagcaccacccgcttgccctccaccacggagcggatggggttcagcttgatattgacctcgttttcccgcatggcctgagtgggggagatgaaggtgcggccgatgtacttgttcttgatgaaccccatgccgtaggggataccgctctgccgggcgtagcccagggcggcgtccaggccggagtccggcacaccgatgacgatgtccgcctggaccgggtgctccagggccaggaaggccccggcccgctgccgtgccacgtggacgctggacccgtcgatgacggagtccggccgggcgaagtagatgaactcgaacacgcagagccgcttggggaccttgccgcagtggcgggtgtcggacttgacgccggacttgtccgccaccacgatctccccgggcaggatgtcccgctcgaaccgggcgccgatggcgtccagggcgcaggactcggaggcgaacaccacgcccccgtcccgcagtcggcccatgcacagcggccggaagccgtgggggtcccggacggcgatgagcttggtgggggaggagatcaccagggagtaggccccctcgatccggtccatggcggcggagaccgccttctcgatggagggggcgcgcaaacgctcctggacgatgatgtaggcgatgacctcggagtccgtggtggtctggaagatggagccctggctctccagctcctggcgcaatgcgtgggagttggtgaggttgccgttgtgggccagggccatgcggcccttgtagtggttcaccaggatgggctggacgttccgcttgttgtcggacccggtggtgccgtagcgcacgtggcctacggcgatggtgcccgtgcccagggagcggagccgctccgccggaaacacctcgttcaccagccccacatcccggtacgcggtgaacacgccatcatcgttcaccgcgatgccggcgctctcttggccccggtgctggagggcgtacagggcgtaataggccaggggggccacatccgtcgtctccggcgcgtacacgccgaacacgccgcactcctcttggatgtggcgggccgggagcacggcgctcagctcagtcggcatcatgggcaagcagtctctgcatgacctcggcataggcgccctccacgccgcccaggtcccggcggaagcggtccttgtccagcttctcatgggtcttttcgtcccagaggcggcaggtgtcggggctgatctcgtccgccagaacgatcgtgccgtcggtcagtctgccgaactccagcttgaagtccaccagcgtgacgccgcactctgcccagaaggccttgagaatgtcgttgacggcaaaggcgtacttcttgatggtctcgatctcctccgctgtggccagcttcagcgccagggcgtgatagctgttcagcaggggatctcccagttcgtcgttcttgtaggagaactcgatagtgggagcgtcgaatacgatgccctcctctacaccgtaccgcttggcgaaggacccggcagagaggttgcggatgataacctccagcggcacgatggagaccttcttcaccagggtctcccgctcactcagctcctgaacgaagtgggtgggaatgccggccttttcgatccgccgcatcagatggttggtcatctggttgttgatgacgcccttgcccgcaatggtgcccttcttcaggccgttgaaggcggtggcgtcgtccttgtagtccacgatgtaaagttccgggtcgtcggtgcggaagaccttcttggcctttccctcatagagctgttccagcttctgcatggtgcgttcgtcctttctttctgttgagagattagatatttgaataggcaattgataaaccattagaaaaacggaagggaaagagaaaatagaaatgagaaatcagaaatccggccgcgggatggcgcggatacggaactttgagccgtccggtcaggacggactccagactttccgattcctcatttccgatttctcacgatttcaggagttcctcctggagcttggcgtccttctcggcgatctgctccgccatcttccgccgttccgcttccaggcgccgggtcagggcctcgtcctccaccgccaggatctgggcggccagcacagcagcatttttcgcgccgttcagtgctaccgtagccaccgggatgccgccgggcatctggactgtggccagcagggcatccagtccatccaggacgccccccttcatgggaatgccgatgacaggcagggtggtgttggcggcaaaggcccccgccagatgggcagccatgccggcggcgcagatgaccacgccgaatccccgctcccgggcggacttggcgaactcagccgcctgggtcggcgtccggtgggcgctgaggatatgggcctcataggggatgtccagggcgtccagctgggtacaggcccctttgaccacgggccagtcactgtcgctgcccatgatgacggcaacttttttcatcgcaagcgctcctttctgcggctcagagttttttccgcatgacggtgtggcggaagatgccgtccacaaaatactcgctggagcagaacacggggcgtccgtcgatgtcatagtccacctcttccatgttcagcagcggcgtgcccatgggcacctggaagatctccgccagggcggcatccgccgcggcgggccgcacgtctgtcagatccagatagggatagatgccgcagaaccgctggaggaagtggaagatggggagcttgaagtcctggatggtgtaatcccccttggccagggccttttccaccacgtcctcgcagtagatggcgggccggccatccgcggtgcacagccgggcgatgcggatgatgggggtgtcctccggaatgcggagctgagcggccacctgggcatcggcagtcccatcggaaacccggacaaaggccaccgccggctcatgtccgctctggcggatcatgtccaggaactctacctcaatgtccatgcgggtctggacgttcagcacatggcggttgatgatggtgccaactccgtggcggcgggtgatgaagccctcccgctccagagaggccagaatgtcccgcagctgcgtgcggctgatccccagcttctctgccaggatactctcccggggcaggcgctcgcagctggcgtaggcaccgtccttcatgtcggcaagcagctgagagcggatggtcttggtctgggccggctgaccgctcatagtcacacctctttctgatttcaaaataggtaataccataaaagtcatacctattgtaccggattttctccggcgccgcaactggcagatttgacagattccgccctccttttttgccccggcatatccagtctgctgttgacggcaggacgcacgggccggaggcgtttgtacggccggatttcgtgggttttcaccgtggacaaccgccggggggatgttataatggagttgaacgaaagagggaggcgttatccgtgaagattgtgatcctgggtgcggaggcccgttaccgggcctatcagcccgcgatgcccttcatccagcagcaggagctggtatttctggacaaggacagcacggaggcagagattctggccgccggcgctgatgcggaggtgctgttcgtggatgccatcacggtggtgtccgctgctctgatggaacacatgccctgcctgcggctgattcactcggagggggtggcgtttgaccgcattgacctctccgccgcccgggagcggggcatttacgtctgcaacaacaagggctgcaacgccggggccgtggcggagcagacggtcctgctgatactgatgctcctgcgccatgccctggagggggacgaggccgtccgggcgggacggcagatggagatgaaagagcggtgcatggtggaggggatcacggagctctctgcctgcaaggtgggcctggtgggatttggagacattgcgcgagccgcggcggagcggctggtccccttcggctgcgagctgtactactacaccaagcgccgccgcttgccggaagaggagaaaaaataccacgtcacctacctgccgttggaggagctggcggagaagagcgacatcgtcagcctccactgcgctgtcacggaggagacccggaatctggtggatgccgctctgctgcggcggatgaaacccacagcgtacctcatcaacaccgcccggggagaccttgtggacaacgaggccctgcggcaggccctgctggaggggcgaatcgccggagcggggctggacacgctgtccccggagccggtgccggcggggcaccccctgacggcgctgccgccggaggtccagcggaaagtggtcctggcaccccacctgggcggcattacagaggcatccttccgtcgggcccatgcccacatgtggcgaaatgtggagcatttggctgcgggagagcggccggacaacatcgtcaacggcctgtgatgctcgccgacggtaaaaaattctgccggagatgaaacaaaacctatggaaaaatcgtctaattcctataaagacctatggtagaaggaccatgtgcggtttgaaagtcctgcgcgcgagctgtgggtctgtatgcggaaaaccctcatgcgccaaccggcttgcctgttctcatggcccgcacggcgcatggagtcaggaaaaacaaagaaggggagcgtgacgccgaatgagacgtcggatctggagaggttggatattgtgcctgtgcgcctgcttgctgctgtgcggtgccgccagcgggactggaagcacaccgccggacgcggtgagccgcggggcctttgcagacgccctgtatgacgcccatgtggcccacggcggcgctcctgtggtcagcgagggcagctccgcacccttccgggatgtgggctcctggtctccgtatttcgaggcgctctgttgggctaaggccagcggcatcgcagggggctatgcaggcggtgccttccgtcctgcggcaccggtgacccgccagcaggcgacggtgatgctgtaccgctatgccaagaccacggatctgccgctggagaaggggagcgaccgggatctggccggataccgggacgcggataccatcccaacctggagtcgggaggctgtccaatgggccgtgcggaacggcctgtggttctccggcagcgccacggagctgcaggcggcggagaacgtctcctgggaggagctgaccgttctgacccagcggctgttcctgggcgggatgcccgcggctgccttgtctgcggcgccggaggggctgacgatggagctgcagcaatgcactaccaccggcgcggttgtggtactgcaaaatgcggcggaggagaccttctcctatggggcggactacggtctctatcggcaggtgaacggcggctggtatcagatgaacaaggaaatggacaccatcgccattgcctatgagctggccccgggagagagccggaagcttaccctcagctggggagagctggactggggcggcgtcctgcccgccgggacctactgcgtggcgcagggcgggctgctgggagaacagcaggtcaccgtctccgtcacctttgccatcaaataaacgccaggcggccgccgaaaaaccggcggccgcctttccattgggtgaacggtttcttgcgatcccgcccagaccgaaaaatctccccctcttctggaggagtgaagagaacagcacaggccgccgggaacgcccagcggcctgtacggattcttgagaaggtggcccggcgtcaaacacagaagcggcaggccgacagggccgccacagcgccgtccgcgcaggcggtggtcagctggcggacctccttggcgcggagatcccctgccgcaaagatgccgggaatcggcgtcaggcagtcctccccggcggcgataaagcccgcttcgtccaccggcacccccagagaccgggccagccggctctccggcagcagacccaccgcctggaacagcgcagagaccggcaggtgggagacttctcccacagcggtgttccgcagggtcaggccggtgaggcgttccgatccctccagggcctccaccacggtggaccgcagcagcgtgaggttggcggtcttctccgcccgctccaccagaatgggatccgcccggaagtccgaccgccggtggatcaccgtcacatggcggcagatgtctgccagatacagcgcatcctgcagggcggtgctgccgcctccggccactgccacatcctgtccggcgtaaaaggctccgtcgcacacagcgcagaaggagatgccggccagacgatcctcgcccgcaaggcccagggtccggcgccgcatcccggcggccaggattaccgccccggcggtataggcaccgtagtcggtgaccacccggctgggcgtgccgctctggatctccagcgcctcctccagttcgatccgggtccccagggcctcggcctggctgtacagccgctccgccagttcagcgccggacacggcgggcaggcccggaaagttttccaccttgggagaggaggcgatctgcccgccgaagctctcccgttccagcagcagaacggactttcctgcccggcgggcgtagacggcggcggtgagcccggccgggccgccgcccacgataatgatgtcgaaatactggtccatagatgttcctctctgatgactgacagaagataagggagacttcgcagtcccccgcatagtaaccgctgtaccgcgggtgctgctccgcagagacggcattttggagctcggaaaaggagggacgagagtccctcctttttcgttgtttacacgctctgcgaagtggcgaattttttgatggtggaggcgttcaccagcttctccacctgctctccgtggcggacgatcagggtgggggcctgctggataccgtaccgggccaccagctcccgatgctcgttcacgtccatcacctgataggcgatgcccgccttctccagctcccgctcggcgatgctgcagttggggcaggtcttggtggtgaagaggaacaggccgtcctcgccccactccgccggtgtgctgggcgcggtgccggctgcgggctccgtcgcagcatcccggtcgcagaggcggcggccctccagccgggagttctccacctggtactcctgccggtccttgaactcctggaccttgccgtcgttccagttctggacagggcggtaatagccggtgatgcggctccacacctcgcaggtcttcccacacttggggcaggtaaagtgctcgcccgagagatagccgtggtccggacagatggagtaggtgggggacatggtgtagtaggggagcttgaaattctccgcgatcttccgcaccaaattggcagccgccttccagtccggcagcttctcacccaaaaaggcgtggaacacagtgccggaggtgtacagggtctgcaggtcatcctggatggccagggcctcgaagatgtcgttggtgtagcccaccggcaggtgggaggagttggtgtaataaggcgtgtcaccggggttcttggcagcggtgatgatatcgggatacagtgccacgtcatgcttggccagccggtaggtggtggactcggcgggggtggcctccaggttgtagaggtcgccgtactgctcctgatagtccatcagtcgctcccgcatgtggttcagcacgtccttggcaaaggcctgggtctccggatgggtcaggtccttccgcagccacttggcgttcagacccacctcgttcatgccgatgaggccgatggtggagaagtggttgtcaaaggtgcccaggtagtatttggtgtaggggtacaatcccgcatccatcagcttggtgatgacggtgcgcttcaccttcaggctccgggcggcgatgtccatcatgtggtccagccgctcatagaactcctccggcgtctgggagaggtaggcgatccggggcagattgatagtcaccacgcccacggacccggtggactcgccggagccgaagtagccgccggacttcttccgcagctcccgcagatccagccgcaggcggcagcacatgctgcgcacgtcagaaggctccatgtcagagttgatgtagttggagaaatagggggtgccgtacttggcggtcatctcgaacaggaggcggttgttctccgtgtcggaccagtcaaagtcgcgcgtgatggaataggtggggatgggatactggaagccccggccgtcggcgtcgccctcggtcatgatctcgatgaacgccttgttcaccatatccatttccttcttgcagtcgccgtaagtgaaatcctgctccttgccgcctacgatggccggcaggttctccaggtcacgaggcacggtccagtccagggtgatgttggagaacggcgcctgggtaccccagcgggagggagtgttcacgccgaacacaaaggactggatacactgtttaacctctttctgggagaggttgtccactttcacaaagggggccagataggtgtcaaaggagctgaacgcctgggcgccggcccactcgttctgcatgatgcccaggaagttcaccatctggttgcagagagtggagaggtggctggccggggtggagttgatcttgcccgggatacccaggccctgctggatcagctgcttcaaactccagccggcgcagtagccggtgagcatggagaggtcgtggaggtggatggcgccgctcttgtgggcgtcggcaatctcctggtcatagatttcagagagccagtagttggcggtgatggcgccggagttggagaggatcaggccgcccacggagtaggtgacggtggagttctccttcacccgccagtcgttgatatgcaggtagttgtccaccagctccttgtagtccagcatggtggagttcaggttgcggatcttctcccgctgcttgcggtagagaatgtaggccttggccacgtcggcatagcctgccttgctgagaatgtcctccacgctgtcctgaatgtcttccacggtgatcttgccgtcatggatcttatcctggtaatccgccgtgaccctcagggccaggagatcaatgatgtccggattgtactccatgtgggtggcctcaaaggccttggtgatggcggtgctgatcttggagatgtcgaaagaggcgatctttccatcccgcttgacgacctgatacatgaaacccctgctttctctatgataaattcaattccctgctcctgacaagtcaatgggcgctgacgcgccccgtatttcccattctaccacttcctgggggcttgtcaattagaaatgccactatatcttgtatgcattttctgtgaaaacgctgaatttttccatatctagtcaatgccgcgcagctccacagctccaaagaacggccggacccgctccgcaaagccctgcagctgctctgctgtaaagccgtgatatccccggccgatcagattgccggagtccacaaagttctgaagatagtaccggggtgcccctgccagccaggcggcgatggcgtccaggtcctccggcctgtggagctcccgcaccagggtggtgcggaactcatagtccacggtgcttttccgcagcagacggatgctctcctccaccggggcggggttgaagcccggtatgccgacggtttcggcataccgcgccggagcgtttttcacgtccatggccacatagtccacaaggccctggttcaggatctccgccagccgggcaggatcacagccgttggtatccagcttcacggcaaagcccagttcccgcaccttccgcagaaaatccgctgcgtccggctggagcagcggctccccgccggtgaggaccaccccgtccaaaagcccccggcgggaggccaggaagtccagcacctcctgctccgggatctccggcgtctccgccagccgggtcaccagcaatgcgttgtggcagaaggggcaccgcaggttgcagccgccggtgaacaccgtggccgccagctttcccgggtagtccaccatggccagtttctgaagtccgtgaatgtgcatggccggatccctccataagcacaagatgttgctattctaaactgatttttccacaagaacaagtggtggacgcaacaaagacaaaaaagttcccggaggcagagcctccgggaacgggaaagacgggattcaattcttgcggaaccgggagaggaagtcctgcgtctcctgtttctggggattgccgaaaacctgctccggcgtgccctcctcgcagatgacgccctggttcatgtacaccacatggctgctgacgtcccgggcaaaggccatctcatgagtcaccaccagcatggtcatgccctcctgggccaggtcctgcatgacggagaggacttctcccaccatctccgggtccagggcggaggtgggttcgtcgaacagcagcacctccggctccatggccagggcccgggcaatggccacccgctgcttctggccgccggagatctgccggggcttggcttggatgtaaggcgccatgcccaccttttccagatactccatggcccgcttccgggcggtctccttgtcctttttcagtaccttgatctgcccgaccatgcaattttccagcacggtcatgttgttgaacaggttgaaggactggaacaccatgcccacatgggagcggtactggggggcattgaccttgggaccggtgacgttctggccgcggtagaggatctcgccgctggtgggggtctccagcaggttgatgcaccgcagcagggtgctcttgccggagccggaggcaccaatgatgctggtgacatcgccttttttcacggtgaaatcgatgtcccgcagcacttcgtggctgccgaaggacttgctcagatgccggatctctaaaatcatatcgtccatgttgtcagcgatctcctctcgtacggccgtgctgcaattcctgacggacccgatcccggtactctttgctccgctcatcgaagggagtgccccggtccgggtggctgtatgtgccggcggccatggtcagatggtccgtctgtgccagcttgtaatcgctgctgccgtccattcgcttttccaaccagcgcagcaggaaggaggcgatcagcgtcatggtgaggtacccggccatctccaccacggcggaggggaagtacaggtagctggcgcccaccgccgcccggtgggcggagaagaaatcggggaagccgatgatgaacatgacggacgtatccttcacattgatgatgaagttgttgccgatctggggcaggatattccggatggcctgaggcaggatcacatgcagcatggtctgcacatgggtcatgccgatggccttggcgccctcggtctggccggggtcgatggagataatgccgccccggacggactcggccatgtaggcgccggtgttgatggacaccaccagaatggcggccatccagatgctgtcaaaccgcacggcgttgtccgtaaaatagggcaggccgtaatagaggaacaccgcctgcagcaccatgggggtaccccggaagatctccacgtagatccggaccactgcccggatcagcgccagaaagaaccgcttgacgggcggggcgttcttgctgtggggaatggtgttcagaatgccgcagacgaatccgatcaggcagccgatggcggtggccaccagtgccagaatcaaggtattgcggatgccgggcagatagtgggacacgccgtagttcgaccagagcttggcaatgtcggatgccagctggaacagtttctccatggaggcagactcccttcggtaaagagttgatatgcgggaagcaggcgggaggacagactgtcctcccgccgcgggtcattctggaaagtgtttactcgctcaggggctgaatggcgatggcctcgttcatcagggtgttgaaatcgtccgccgtcatagtggagagcacgctgtcaatggcctccttcagctcggtgttgcccttcatcacggagatgccgatgttgatctcgccctcgtcaacctcaaagttgtcgtcggagtctgtgaagtccagaatcttcatgtcgggataggcggccacggcacccatagcggtgggcatatcggtgcagatgaagtccacggcgtcggtctccagggccatcagcatggcgggggcggtctccgcggcagtctggacctgggcgccctcgatctgaggcaggcaggagtcataccagatggtggcgatctgcgcggtgcaggtgccgccggaaaggtcgctgatgccggcggcgttggcataggggctgtccgtcttggtcacacagacgatggaggcgtagtagtaggggccggcgaaatccacctgctcgctgcgctcggcagtcatggactggccggcaatgacggcgtcaaaggtaccggtctgcacgccgggaaccagagagtcccagtcggactgaaccacttccagcttccagccgttggcctcgcagatctgcttggcgatcatcacgtcgtagccgttggcataggtgccgggcacgttggagatgggcacagcgccgttggagtcgtcgctctgactccagttgtaaggggcgtaggcgcactccatggcgatggtcagcacgccgtcctccacgccggaggagccggcggtctccccgccttcagcggtggtgccggaattgccggagtcggcagtgtcgccggagctgccggtgccgccgcaggcggccagggacgctgtcatggccagagccatcagcaaggtcaacaatctcttcatgtttcttcacctttctcatctcaaaaaagattccgcggcggtcacagacctcctccgcgcctgccgccggcggagaggagaaaaaatggaccgctttgtcaagcggtccatggaaaatacggaaagaagcccccggcagggacgatcccgaacagccattgatagcgcttcacaaaggtttgtgacagtccggcaggtattccctgacggcccagcaccagaaggacaggcatcgtcccggcacttcggcggcggacccttccccgtccggcggctgcctggccttgccggagcggtactgatgaacgccgcgcctctatctgagcgatccaattttgaaggtatcctatcacgttctcggggagatgtcaacgccccttcccagaaaaatgccaaaaatcccgcagatttgtgcagatcatagaagaaaatgccaaaaccgttgcgcactgtggggaaaatgtggtatgatgctccctgcacacacggcgcaagcgccgggagaggagtgtggaagtatgatgcaggcggcggaactggcggtgctggactggctccaggcccatctgcgctgcgattttctggacgcggtgatgccgtggatcagccggatctgcgaccacggagagatttggatcctgctggcggcggtgctgctgcttctgtggaagcaccgctggacagggatgtccctgtcctttgcgctgattctggatctgatctgctgcaatatcgttctgaaacccctggtcggccgggtccggcccttcttggtgaataccgcggtggagctgctgacagcacccccggcggacgcatcctttccctcggggcacacggcggcgtcctttgcggcggtgttcgccctccgggcctccggcagccccctgtggaagcctgccctggtactggcggctgggatcgccttctcccggctgtacctgtacgtccactggcccaccgacgtgctggggggcattctggtgggcgccgccgcaggctgggcaggcgcgcggctggcagacgccctccgccgcaggcgggagcggctgggccgcagggcatagcggaaaaaacggaccggacggcttgccgtccggtccgtgcggcttcacgcggcgttctccctggcctgaagatatttcttcacagcgaagatgcccgccaccgctgccacgcccagtagcgtctccgccgcgtcggtgtggctgacgatcatctgccggacgatggtgaacagcagcacgtccaccaccgcgtcggcggtgtgcagggccagcatcttcacgaactcaattcccatcaccagcagcagtgtggcggagaggaaatcccccagggcgaaggcctctggggagaggagcagggtccggccagtctcccggaacaaaaataccgccccgcagacgatcaccagcaggatcacggcggcgatgagcagctccaaagcacgggcggccttcaacaacaggatgtgggcgggatgacggttcatggtgcctccttgcgccgcggggcggcagaatgaagataagaaataaaaagggggataagagatgcccctctccgggaagtatctcttattcttttatctgggccttggacttgcaaaaacgaagagctcgtaaaaatgtaggggcggcaatctgccgcccggcgggaatagtgtgggggcgtcgtgttacccctcgtcgatgtcgaggctgccgacgggagccccggagggcagaaatttttcgccgtcggacactgtcaggtacataaagcctgtggaatccgctgattggtacaccagcgtacggtcctcgacggcaaagcggttgacgaatttttcatcatctgtggtgaggatcacggtgtctccgtccagtttccaggtgccgagcccaaaatagctgctcagggctccttcggaacatcgcatacttccgtcactgttgagggcgatatagaaatcgctcccaaacccctctttttcgtagatgtagacctggtcggcgaggtcgtcggcggttaccgctgccggctggccggaacagcccgccgccatgagagtaaagagcaggagcagggcggaaaacagacggcacttcatcatgatgtagccctcctttccatgatccgaaaacaggaccgcctctccatcaatctatcacagacggcggcccattgcaaggcaaacccgccttgcgtaaacgccggatttgggatatactatatctctatggaaaaatcagcctgcgggcaggaggaactccccatgaagctcatggtcatcgacggcaacagcatcctgaatcgggcctattacggcatccgtcctctcaccacacgggacgggctttacacccacgccatcttcggatttctcaccacgctccttcgactggagggggaggaggcaccggacgcgttgtgcgtcaccttcgacgtccacgctccaaccttccgccatcaggcgtcggaggcctacaaggccacccgcaagcccatgccggaggagctccgggtccaggtgccggtgctgaaagaggtgctggacgccctgaacattccccgttatgagcaggagggctgggaggccgacgacctgatcggcaccatctcccgcaagtgcgaggcggacggctgggactgcgtggtggtcaccggcgacaaggacagcctgcagctcattaccgaccacaccatggtgaagctggtgtccacccgcatggggcagaccaccaccaaggatatgacggagaccgccttccaagagcagtacggcttcgcccccatccacatgatcgacctgaaggccctgatgggggacagctccgacaacatccccggcgtccccggcatcggggagaagaccgccatggccctgatccagcagtacgagagcatcgacaacctgtacgccaaaatgccggacatcgaggccaagcctgccgccatccgcaagctggcggagggggaggagagcgcccgggagtcttactggctggccaccatcgttaccgacgcgcctctggacttccatcccgaggagaacctgtgccggaagcccggcccggacgcctacccgctgtttttgaagctggagttcaccaagctgatcgagaagttcggcctgtccccggcggagcagccagcggcggaaagggcggacttcaccatgaccgtggagcaggtcacagagcctgctcagacggagcggctgctggccctctggcgagcggcggaccatgtatcggtgctggccctgccggacctgacgggcctctctgtggtctgccggaccggggcggacaccggcgtcacggcggagctgttcttcgacaagtatcagggggactggaacgcccttttgaacgccctgttcgcggcggacgtccgcaaggtctcccacaatgtcaaggacctgacgcggacgctgctggaaaacggcctgcgggcggagggcttcgtcttcgacaccgccctggctgcctacctgctggacgccacggcggggagctatgaccttgcccgcctgttcgtcgcctatttcaacgaggagctgccaaaggccctctacctggaaccggacgccttctccctgctgggggacgccgccgcggcggaggccagcttcgacagctacgccgccgccgtggactccctgtacggcgccctggcggaaagactggcggagcggggccagatggacctgctgcatgagatcgagatgcccctctgcgccgtgctggcggagatggagaccgccggatgcagggtagacgccaaggccctcggtgctttcggggatctgctggcccggcggagcgccgagctggaacagcagatctacgccatggcgggggaggaattcaacatcaactcccccaagcagctgggggagatcctcttcggcaagctgggcctgccccatggcaaaaagaccaagaccggctggtccaccaacgccgatgtgctggaaaagctccggtacgaggcccccatcgtgggggcggtgctggagtatcgccagtacgccaagctgaaatccacctatgccgacggccttttgaaggccatggacccggacggccgggtgcggaccagcttccagatgacggtgacggccacgggccgcctctcctccacagagcccaatctccagaacatccccacccgcacggacctgggcagcgagatccggcggatgttcatcccggcggagggctgcgtcctagtggacgccgactactcccagatcgagctgcggctgctggcccacatggctggggacgaggccatgatcgccgccttccgctccggcggggacttccacgcggagacggcggccaaggtgttccacgtggcgccggaccaggtaactcatgagatgcgccgccaggccaaggcagtgaacttcggcatcgtctacggcatctccgccttctccctgagccaggacatcggcgtgagcgtggcggaggccaaggcgtatatggaggcctacttcgccaccttcccaggcgtccggacgtatatggacgccattgtggagcgggccagggagcagggctatgtggagacgctgttccaccggcggcgggacctgccggagctgaagtcctccaacttcaacctccgctccttcggggagcgagtggccctgaacatgcccatccagggcaccgcggcggacatcatgaagctggctatggtggcggtgcggaaacgcctgcggcaggaactgccggaggcccgtctggtgctgcaagtccacgacgagctgatcgtggagtgcccggaggcccaggcggagaccgccgcggcgctgctgaaggaggagatggagaacgtggtgtccctctccgtccccctaacggcggacgcccactggggcagaaactggctggaggccaagggctgatgggatttcagaagatcgactacgccgcgtggccccgccgtccgtattttgagcattaccaccgggacgtgccctgttagtacagcatgacagtggacgtggacatctccgccctgctgccccgcctgcgggggtcgggactccggttctatccgtcggtgatccacggcatctcccggatggtcaacgcggacccggccctccgcatggctatggacgagacgggggccatcggcgtctacgaccgggtggaccccacttatacgatttttcacaaggacgatgagaccttctgcgtcctctggaccgcctaccagccggatctgcgggccttctgccaggactgggaggcggaccggacccgctatggggacatccacacctttgaagcccgcccgccggaggcgggacagggactcttcaacatctccgccgtgccctgggcctccttccgaagtctgcacctggagctgccggaggccaacgactacctgctgcccatcttcaccctgggccgctaccggaaggagaacggccgcaccctgctgcctctggccatgcaggtccaccacggcgtcacggacggctttcacgtggggcggttcttcaaccgcctccaggcctgggcggacagtgcgccggagatgggcgcatgaagcgcctgtatatgatcggcggtcctatgggcgtgggaaagaccgccgcctgccgccagctgcagcagctgctggaccggagcgtgttcctggacagggactggtgctgggatgcccacccctttcaggtgacggaggagacccgggagatggtgttggagaacatctcttttctcctgaacagcttcctccgctgctccgcctatgaccatgtgattttctgctgggtcctgcaccggcgggaaatctgggaagacctgctccgccgcctgacggagccgtatgtcctgcgggccgtctccctggtctgcacaccggagaccctgcggtcccggctggagggagatatcctcgccggaaagcgaataccggatgtgttggaccggagcctggcctacctgccgctgtatgatgccctggacatccggcacctggatgtgacggctttgacgccccgggagacggcggagtgcatccgaagggagggcggcgcatgaagcggctgatcgtcctgctgggcgtggctggggtgtccctgtcggcggtgtttgtccggtggtccacggcgccgtccctgatcctggcgctgtaccggatggccttttcggcggcgctgatggcggtcccggtactggcgggacgaaggcgggagctgaaatccctgacccggcgggacgtgctgctgtgccttgccagcggcttgtttctgggcatccacttcgcggcgtattttggggccctgcgggccacctccatcgcctcggcggtggtgctggtggatacggaggtattctttgtggcagcggcctcggcgttgtttctggggcagcggctgccccgccggacctggcccgcggtcctgcttgcctttgcaggcagcgcggtggtggcgctggcagacagcgccgccgggacgaatgcgctgctgggagatttgattgccctggccggcgccgccgccatggcggtctataccatgatcggaacggtctgccggcagcggctctccacgtcagtgtacacctttctggtgtatacgtccgccgcggccacgctgctggctgcggccctgctgagcggaacgccgctggccggctacggtccggtgaacgggctgacggccctgggcatggcggtatgctgcaccctgctgggacacaatgtgttcagctgggggctgaaatatctgccgccggctttcatcgccacggtcaagctgatggagccggtgttcgcctctgtctggggactcctgctctttggcgagcggccgggctggctgacggttgccggaggcgcggcggtccttctgggcgtggggctgtatgcccgtaccatcggcggggatgccggaaaacgagaggagagagaaccatgagagaacagatgcacgtgcgcatcgtccccatgaccggggaccatctggacgaggtggcggagctggaacggatctgcttcaccaccccctggtcccggaacatgctggtggaggagctgcagaacgactgcgccgccttcctggtggccctggatgacgaggaccacgtggcgggctacgccggcctgctggtggtgctggacgaggggtacatcaccaatgtggccgtgcggccggagtgccgccgcaacggcatcgcccagaagctgctgcaagtgttcctggactttgcccaggcccacaagctggcgtttctgacgctggaggtccgggcctccaactacggggccatcgccctgtacggcagccggggcttccgcagcgtgggcaggcggaaaaactattacgagcatccgaaggaggatgccattatcatgacaaaggagtttaccgatggaactgaggatcccgacactggagcagctgcggacggtctatgaccgggacctgcggacagcatttcccgcagcggagctgaagcccctgaagaatatggaggagatgtgggccgaggggcggtaccgcccctggtgcctctttgacggggacgacatcgccggcgaggcatttttatggctgggccaccccggctgggccctgctggactatctgtgcgtggccgcagaccgccggaacggcggcctgggctccgtgatcctggagaagctccgggaggcggagcggggcaatgtgatcttcggagagagtgagatcccttgctacgccccggacccggccatggcagagcggcggctgggcttctatgcccgcaacggcgcccggaccgccgggtatgacacggagatgttcggcgtaccctacaagaccctgtactgggcggaggggaaagtggacgagtccgccctgatggaggagcaccgctttgtctatgccagtacctttgcgccggataaattccgcagatatgtccgcatcccctttgatccaaatgggacgccgggcgagagagtatcctggcagcagtgacggaaaagagagggacagatcatgaaaattttggcctttgagtcctcctgcgacgagacagcggtggccgtggtggaggacgggcgcacggtcctgtccgatgccatcgcctcccaggcggacctccacgccctgtacggcggcgtggtgccggagatcgcctcccgcaagcatgtggaggccattgccgccctgacggaccaggctctgcggcaggcgggctgtgagaagtccgacatcgacgcggtggcagtgacctatgccccggggctcatcggcgcggtgctggtgggcctcagcttcgccaagtcggtggcctttgccctgggggtgcccctgatcccggtgcaccacatccggggccacatcgccgccaattacctggcctttccggaactggagccgcccttcctggccctggccatctccggaggcaacacaatgatcgtggacgtccgggactacacggatatggagattctgggcgccacccgggatgacgcagcaggggagtgcttcgacaaggcggcccgggtgctgggcctgccctatcccggcggcgcccccatggacgccctggcccggcagtccccgggcggggtgtacaccctgcctcacgcccatgtggacggggcagagctggacatgagcttctccggcctcaagacggcggtggtgaacctggcccaccatgctcagcaggtgggggagtctctggaccgggcagcgctggctcgggacttcgcccaggctgtcagcgatacactggtgccccgggccatggaggcggcaaagcagactggccgcactgtgctttgcgccgccggcggcgtagcggccaactccgtcatccgggaggatcttcgtcgggcctgcgaggcggcagacatccggttatacctgccgccgctgaaactctgcggcgacaacggtgccatgatcggcgcccaggggtattatgaatatctggcagggcatacggctggcatggagctgaacgcctatgctacacgggacattgcagactgaatcaggcggccgcgtcagcggccgcctgatttattggaaaatgcataacgagcttatgcaggctgcatctgtaaagccagataccttgctttttgtgaaggcgcagctcgggtggtcttcatttgccgttcacttttggaaaaacaggcaggagagacggagaagtttttgaaggcaaaacattatgtaaagtttagacgcttttttgggcggtggaaaagcgcaaaaagagaagatggtaaatttatacaatttacaaaaaaatattgaaaataaatagaaaattcgcgtgtggaaaatcatgtggaaaatgtgaataactctttgtaaaaagaaattatcaaataaattatgtaaatgctgaaaagaacggaagactgcaaaaagaagggagtcaacagaaaataatgacagaatttgtcgaagtttcttgggaaaatcacaacagaatttcctgttgtaatgggcggaattcgggggaaaagcgtaggaaataggctaatcgcctgaaaatattttgaaggaattccttcaaaatacaaaatgtaatatacaggaattgccatgcagagagtgtggcaggaaatcaaaagaatctgttgacgtcggtcaaaaaatatgataaaatatatcctgttctggatgtgcctttccaaaaacaccatgtcatgaattgataagctaatgtagctcagtcggtagagcagctgattcgtaatcagcaggtcgtgtgttcgagtcacatcattagctccaaaagaagccctgaggtccaacggccttggggcttctctttttctggaaatgttgtataacggtggtaatgtggtagcaactgtcatttagcttgtgcatctccggctggaggcggcccggatcgttgttattgatgagcgcagaacctgtgctgcctaaggcatctgcgcgcactggcggcaggccggggctggtgaacgagaaccccgaccatgtgcggcctgcatactgccagagggcctctcggagggaggatgcccctgtgagcggctggagcagagaaattcaaaacgcaaagaggagacggaagaccgtgtggcttccttcgagcgaaagagggccccggtgcggaatctgcaccggggcccatgaggttctcaatgtccgtttcgaccggaagctccacggctttgcgcgtgcttcctgccgcgctccgccgggaatccatgcaccttacttataataaattcccaatagcgccttatgaggctctgtgaatgcccccagccggatctccatgctgatctcgaaggcccggtcccaggggaagccgtatcccgtcagctccacgccgccccagccccgctcggcatactcccgggtggcggaaagggaagagatgaagttgctccgctccaggttttcgatcaccggggccacggccgctgccatgccggcctccagccgctccaggatggacacccggtcgatgtccggcatccagaagttgtcggcattgcccgacaggtcgttccggacaaagctcagaatgtcgttgcgcacgatgttcttgtagcagaagtccttcagaatgctgtccgccaaggtccggagaaatgcctgttctgtggcatctgtttgctcaccgtgctggaggaaggcataccgggccacaccatggctcagggccgtgccggtgacgatggccatatccagaaaacccgcatagctcaaaagccagccaagctctgcctgatctgtcagcgccttatggaaggcggtcccgtaggtgccgtttcccgcgtcgatgaggatggtaggcagcccggcagcccggttgtcgttcagacactggaccagtgcgttgatatacgtctcctgggctgccgggtctgccggctgggtcagcaccagcattgccagttcctcgccgccgggttccgccatcgtcaggtcgaaaaagtcgaagtgctctgccacgatggcctccagaggctggtagtcataggcgcaggcaggccggtcctcagtaccgccgaaatactggacggataccgcggcaccctcccagccccactcctccaggcagagcttcgtcaccgccttaaaggccaggtcgtccacaccggagagcagggcgtccccttggcgcagctgcgcccggagataggcgatctcgtttttctggatgctgtcctcctccgaggagtcgtcgatgccgatcaatacccggaactgcccgtccgccgtctcctccagagcttggaacatggcgtcgctaagccgcagcttccgctcccgggaggccagatagttctccacggctccctccggcagcggctcctccgcctccaccgggacgggggttccgtccgcccccagggggtagtccgccacaatgttcccgatggtcagatccgtgccctccaggtggggacggggtgccatgccgtaagtccgcagggcattgtactcgttgaggccgaacccgccgtagccggtggtggccgccagccgcatgactgtgtccagcaaccagatccggttgttctcatccgctgccagcaggtcgatcaccgccgtcagcagctccgcttccaccagtgtctctccggaggaaagcgtcaccgggttctccccagtcatagcccgggagctgaccagcccgccggagagcagctgatccagggacaggatgtaccggtcacacccggcggcctcctgcttagccacccactcgtacagtgctccccggtccccgtactgggtcccgttctcattcgggggctggccgtccagccgggtgcggtacaggtcccgctccggcatggccaactcgtagcccaaggattccgccaggtataccacccgctcggcgttgtctggccggtcatccagaggtacgtaggcgatcaccggcgcaccggcccggggggtctcctgttccacaggctccgtccgcaccggcccgcaccctgccagaagcgtacaggccagcgccgctgccaacatccgtcttctcatggtatgttctcctgtttccaaaagagcggagccatcggctccgctccatctgttctgtcctgccccacactctcgggacgggaaaaggggcaggggaaaaccttcggttttccccagttgatctgcctccggcagctcaagaatctgaaaccattttcggcaggatatgcgcctgccgaaaatacatggactcagccgccttgggcggcgtctccagtgaccgccgtggtggctcggaggggagcctgctcccctccgaattccctcacagtccgaatgctcccaggtccaacccaccggtggcctgctcgatgctcttgtccatggcctccccggcctggcgcagggcctcatttacagcggataccaccaggtcctggagcatctccacatcctccgggtccacggcctccggtttgatggtaacggccagcacttcctttttgccgttgaccttggcctctaccacgccgcctcccacgctggcggtgaactcctgggcctctacggcctcctgggccgcattcacctgctcctgcatctgctggatgcgggcctgcatctccgcctggcgctgagcgccggtcatcttcatgctgccgttggtaaatccacggcgtgcgctgtatcccataactggtctctcctttgtattacttgatctcgatattatcgaactgactgccgaatttcagcaggttctgcagattttcccggggcgtggccttggggggctctcccacctgaaagaccaggcgcaccgtcacgccgccgctggcggcttcctccatcagggcatttcgcacccggtcattgtccagacgtcccaaggtaatgtcatccggggcataaaccgtcagcaggccgccctccagaacacctgtgcacatatccagaaacacccggtacataggcggcaggcggcccttgcaaccctctgccagcgcccgccaccaactgccccccacagcggatgccgcagcaggggagggggcggcgggctgcgcctccggtacgtcgaacacccgcgctccgggctcctccggcagaggcggctcctcgggaagcggagggcgctcctcccgtgccggcggttcttcccgaggcggggcatcctccggcgcaggtgccgggggcggtacggggccggaggacagcttcaccgtgccgccgctttctgcggcggccgcccgcagaagctgcccccgttgggcactgtcttccagccgctggacccgggcctccagggccgtcaggtccccagagagggactcgtcgcacagccgcaggaggcagagctccgcatccgtgcggcggttggagctgtaatagaggtccgccgtggccctttgcagcgtagtggccaggtagatcagccgggtagcgggaatctccctgcccagcctgtccagcgtggcgctgtcatagccgccggagagcagggctgcccccccctccggcgctgtacgtcgcagcagcaggtcccggaccagcgtgctgagctcacccagcaccgcgcctacatccttgccaccctggtacagctggtccagctgcagcagggcgcccttggcgtcccggctcagaataaactccatcagctgggccgtctgcaggtttcccgccaggcccagcgcctccagcacggcccggctgtccacggttccgcctacggcggcacactggtccaaaaggctcaggccgtcccgcagagcgccgtccgccagacggctcaacagctccgcgccatccgccgtcaggtcgatctgctcctgtccggccacatacagcagccgcgccgcgatgtcctgaggcgtgatgcgcttgaaggaaaaccgctggcaccgggagaggatggtggcgggcaccttgtggagctccgtagtggccagaatgaacatcaggtgctccggcggctcctccagaatcttcagcagagcattgaaggccggggtggagagcatgtggacctcgtccacgatgtacacccgcttcttcacattggccggggcgtagatggcttcgtcccgcaaggcccgcacctggtcgacaccgttgttggaggcagcgtccagctccagtacatccagaaaactgccgttttcgatgcccacgcaggaggggcactggcagcagggatcgccgtccatcgggtgctcgcagttgacggccttggccaagattttggcacaggtggtcttgccggtgccccgggtgcctgtgaagaggtacgcatgggaggtgcggccctccgccacctgcttacgcagagtctgggtgatgtgggactggccgatgacatccgaaaacgttttgggccgccatttgcggtacagggcctgatacaagaaatcacctccaagcgaaaaaagtcctccgcatgcagctgcggaaccggcgccctcgcggcacatggaacatcccgcttaatgctgctcggttccccgcctgacatgattcgcgggcatccattgcgcgagaccggctccgcagctgcatgcggaggactgtaacgttatagcttatttattttactatatcctctgcaaattggcaacaaaaaattttccgctttctgaaaaaaatagtctttacaacagagaaaattatggtataatattatctgccgttgcatgacaggaatgatggactcatagttcaacggggagggcgctgcgtttgcagccatataaaactacatcccgcagcgctggttctcttcccattcactagtctggttttccatgattttccctcaaaatcgaatatcctgaaaatccgtttttcataacttttttcgatggaaaatggccaatatgggcccatagctcagctgggagagcgtacggttcgcatccgtaaggtcgtcggttcgatcccgattgggtccaccaaatgaatgaccccacccaatttgaacaaacgcttgtcgttgttcagaacgggtggggtcattttatgcctgaactccttgcattgcaaggggttcaggcctttctgtatttcatgtcttgtgtcacctgaaaaatacaaacagggtaaaatcaaaacacaaaacgtgtaatcgacgagattcgaacccctgttatgtcagtaagttgctctcctcatttgccgttcatgaacaactcttctacctgacaaggtgttcggtttttcaatgtgcgatgtggccgctgtgtgttgtaaaactcgatataagatgcaaggcatcgtttgaaatctgtttcggaagtgtagtccttcctgtaaagctcctcctttttgagtgtagcgaagaacgattcagcaacagcgttgtcatgaggccgccctgaattggagaaagattgtaccacagcgtgctcatgtagtagctgtttgaatcgatgcgaggtgtattgagcacctcggtcactgtgaaagatgagttttgtttctgggtttctttgtgcccatgccattttgaaagtagatgtgatcaactgggtgctgttctttctggatactttgtatgcgacaattttgcgggaaaacaaatccaaaatcacacaggtgtaaagatagaactcccccagcttaaaacaagtaacatcgctgacccagatttggttgggcttgtccgcctgaaactgctgctggaggatgttccgtttcttttccggttcatgaagtttcatgtagtcctgttttgcagtgctgcggatactagctaggcccatctctctcatcagttttgccacatattctgtgctgacttgatggccatgttggacaagtattgtgcggatcttttcagcacccagcacctggcggtactcatcaaatatcttctgaatcagaatacgatattcctcccgccgcttttcgaaccaagcgttgctccgtttatttcggagaatgtggttatagaaagtcccgcggggaacattcagagcttcacaaagtgtatggacatcatattggccgtacagtaattctagctccgtcagtcgctccttcaacggagcatggacggtgcagccgacggtttgcaaaacggcgaccatgttttccaatttagagactttgtgtagaagtgcatcatactctttgacggtgcaggtgcgtctttcatcgggaaccgctgggcagtatagttttgcccagcgatagatcgtccgtacgcagacactgtattctgcgcataattcctggattggcttgccctgcctgtactgtgcgatgatatcggttttctcttgatctgtgtaggtcatgatgtttgcccctttcttgtaatatgctactagtgtagcatgtagaaaaagattaacacgaagagaggccgcctgccctgctaacaatacttgagcctggtattgacaaaggaattattataatcagtctattttataaaaagcaaacttcaagaactggtcaaggaattggactgactgctttggtgtcagggagtgaagttgtgaacctgcaaatcaaggatatcatcaatgaaatacgccctgttgtgataaataaaaagcgtacagaactggatgcccggcacgatataggccgagaaaacaaagtcacggaaatcatggaactcatttctacaaaaaatatcgaccttatggagtatttggaatccatgttatatagggtgattcagcgagtaagcatgctctccaaagaaaaattttcatccgattcgtctgtagttttgaaatcacccatctccttactaagaagcaggcacagaaaaatgtggacagcttgggtgctgcctgtgtctctctgtgcctgcttttttgttgagaagtggaaaaattgtgatataatataaaaataaaagaacattagattggcatgagctgaaaatgaatgcgagatgagaatatgtcatacactgtaaaatcatctgaaagattaaggaaatctggttcagaggcagaaaccaaggcattgctttatttaatgaatttcagacccgatagtgatgacatatactactttgttgtagatttctttaatgacttaactgggatggacaacatggcatccagattgtgggatgtgcaatcaaaaggcgcacatcatgttagtcccaaagctatcgggaaagaacttgtcacattgttcaagaattatatgagcccattaacctttgaggcatatattctatttattggcagtgtgaccggatctcttcgcaaagattcttctcttacaacttttgggattgaaaatgtaaaggatgcagcgatagaacagattaagttaggcttacatgaagaaggttccgcaaaagaatatattgatagcaccgacttgaccgatgagaacattaatggtttcctgagaaaagtgttttttgtcattgatgatggtaaaaaaccaagtgaatatgtaaaagcaattataaggcaacatccgaatattattccagaagaaaaaatacttaacgctatttttaatgagataagagataaacaggcaagcaaaaaaaatatttcttcagtcgaggggattgtgattgaaacgactgatgaagcgttaaactattgcaggcacttaactaataatgaaattcgtttaatgactttacagcgtattatcaatagagatccgctgggtcaaggaataccaccatcttttgtaagtatctataatacttggccaccagaaaggcagagggaaatgctcgaagattgccaaggtgccttatgtagggcattattcaataaaaatgcggcagatggtttttggtatctatttgagaatacatatcaactgattgtcgaacatccagatgactctgtgcagtctctatttacaaaaattcaggcaatacctaattgtattgttcggtgtcctgactttgacgccctatcacttaagtactttatctctgtagtcaaggatggtgttcaacaatgaagatacggaaagtagctgtaggaaatgctgctgaagcatttattgaaggaaatttcacaaatggtgtgaacatcatttcgagcgacgataataataagggaaagacgattgtaatccaatcaatgatgtatgctttaggaaatgaaccaacattccctacatcatttgaatttcagaagtattattactatatcgaatttgaagaagctgggattatattcaaactttgccgatctggcgatggatttgtattaaagcgtgaatctactgtacttatttttgataatgtttctgaacttaaaagatattggaacaggaatatatttccacttccgtcaatagcaaaaaatcaacttttaaggattgtagatccagtactatatgtccagcttttctttattggacaagataagaaggacacgtccaatatcgccaatcacggcttctataataaacaagattttatcgatatgctttacgcatatgctggtttaattggagagcaacttccacaagagaggattgatgagataaagagtcatataataactctttctgacgagaaaaagctattgctacaacaacataaaatacttaaatcgaaaaaaacacctgtttcatatcttagcgcggagagtgaccgcctcgcatttggtaaaaaaatagagagtcttgaaagagtccaaaataaaattgcggaattacggaaggctcgtaatagtgtatctactcgtaagagtaaatgggagcatacgattaacgaacttcgctctttaaatcgcacaatatcgtgtggagaattacgatgcatggattgcaactctacaaatatctcgtttagtactggagagtcagttcaaacatcctactcgtttgatgtgtctacagttgaaatgcgaaatgaaatcattcattctatttcagaaaaaatttctgcttatagcgaagaaattgaacggctttctgcagaaataattatagagcaagaacgtttgcaatctttaatggatgatgaaagcgtctctcttgaatctattgtcgcttacaagaaagatattttttcggcttcagatgcagaagccagaattaaagagatagacatggaagtcgctacattaaagagtcaactgttagccagtgaaaatgcatcgattgaaacgcaagagcaaagagtagctttgttatcagcaattataggcaaaatgaatgaactttaccatcagattgatccggatggtaatataatatattcaagcttatttactcagcgaaatgaggtgtattctggaagcgaggcgactatttttcatgtggtgaaattgtttgccttacaatttgtgttgcggcacagtttcccaatagtaattgactccttccgagcagaagacttatcgactggaaaagaaaatacggtgcttgaaatctcaaaatcaattgataagcaagtaatactgacaacaacattaaagcatgaagagataggaaaatatgacgaccttccagatgtgaatcatataaattatcaatctcatactccaagcaagatccttgatggtgcttttgtagaatcctttgttgcattgttgaatgacctttcgattgagatttaaatggggtataaaaagtattgactcactatattagatcgccccttgcgctagcttttcatatcatattatttttgggggaaaaggtgactacgcctcacttccacaccggccccgctacgctaggccctagtttggagttggtgcagactgcatcttttttgtctacacattccattgtagacaaagcctgcgtttaacgatagttatacgcaggttttgtttttacttgataatgtacaataa

SEQ ID NO: 4973 - DNA, 94529 bp, Unknown
  gut microbiota DNA sequence
gatcgaggagactaccgtacaaatggcagaattggaaggtcaaatacggacagcggaagccgaactgcgcgaggtcctttccggcgctgaacaggtgcggcaggagtacgcccagttaatggattgggcggggttgtatgataattgctccttcgaggcaaagaaaatgattgcggcgcagtttgtgaaagcggtccgggtcaagcgcggctatgaggtggacattgaatttaatgtttcctttgaggaatttcagaccctttatctggagccggagagtgaggaagatcggcgctcccggtctgctacttatctctcccttgtggagaaatccgggcaggctggttgaaaatacgccccatcttcaagacaatcgacattttctcttttatccagtttctttcccggcaaacaaactacataataaaattctttttgctaaaagtgctttatttggtgtaccacaaaaacaacatgatgctctctccttcttttgatctgtctgctcagtagctgctgatctccaggctctcgtcgtcccggcccttctcgatggcccggatctccacccagtatttcacctccggactcacctccacctggatccggtctcccacctgacggcccagcagagcctttcccacaggggactccttgctgatgaggccctttaaggcatcctgccgcaaggtggtgacgatctgcagcgtcatctcctgcttcgccagctcgttgtagatcgtgaccttgtcgaacaatcccgctcggtcaccctggtccttcacctcgatgaccttggcagtgcggatcatccgctccaggtagcggatgcggctgtcgttgcggttcttggcctgcttggcgcacttgtactcgtagttctcgctgaggtcgccgaaggcccgggccgtctgcacctcctcgatcagctgaggacgcaggacccgggtccggtagttgatctcctcctgcatctttttgatgtccacttccgtcagttcgtcgtacatgacacagctccttttcaggctggggtcgcggtccgggtccgtttgctttgcaggtctctcacaggtgtggggaacccggcgcaggtgaaatgcgaaatcgccgctctgcggctattctaccacgtccggcaggaaagcacaaccccggcggctccctgccccggcaccctttcctccgccgggaatagaatgaagtgtatcacgagtcgaggaggcaattgaaatggaaagcacttccagcgcagtcaccatgtgcgccaccgtcctgcgggtctgcccctgcgaactgtgcgtctgcgaccacgagaactgccagcaggtcctggtccatacagacaacgcctgctgcttccgggtgggccagcaggtctgcatcgagttcagcggcgccatgacccggagctgtccgccccagatcaccgccgactgtgtccggccggtgaactgctgctgttgaacatttgaaaaagccgcccgggggcgaatccccgggcggcttcggcttatgggttgcattggccgcagggcgtatagccctgggcgatcagatcctcccggctgccggtatactcctgccggttggcggtgctcatgccggacacgctggaacagtccgggtcgtgaaatttgtggctgttggtattgaggatgtacgtggtctcgccgctttgcggctccgctccctcctgccagctctcgccggtggcgtagtcgatggtgatgccgggctggacgttgtacacatagacattgaagcagacgccttccccctcgtcctccacagaccaagcctccatctggacaccgctggctaccaggttctgaccctcgaacaccggggtcacccggtagaggacgtggttgtccgtctcctttacatagtccgccaccagattttcaaagggcagcatcccgtccacattcatatagcgggtgccggtgatgagattttcctcgttggcgttctctccggtgagctgaaagccgatcaggtgacagcggttgtacaggtactccccgtcgtactcccggttgatccagccggagggtgtgacggaactgatgctctcccggtcctctgtgggcatcagatcctgtcccacgttggcataggctacgccgcaacggcccagagtgtccaactcactgtacgtctcaaaggacacagaggtcatgtcctcctccggaaaatccggctggttgccatcgacggccacgtagggctccccggaccaggcgggaatatcctccagagaaaaggaggtgacggtgccctccgccgggggcatcatgcagccggagaggagcaggcacaaggacagcagcgccgccgtcagggaaatgcgggttcgattcatgggatatagacttcctttgtaatgatctcgtgggagaagccggggaactcctcccgccgggccagagtccagccctccagggacaggtcccagtaaaggtccgccggataggcccggtcccagcggtacagcaccacccgctccacacgcccggcaaagggcgccacagagcggtcctccacaaagcagggctcccctggccccgccttttccaaaaacgactcgtccacacaaaggcggctctgctcctccgccgggaactggcgagccgtggccccactcacccagaggcaggcctccccgacctctgccagcaggtccgcccgcaccgcccggtcccggctctgccggcggcagttgaaggccatgccgttccggccgtccacacaggccatcaggatcatgctgcatcctcccttcgcgctctttctctacgatacccaaattccgctcgaaacgcaaggaaaatttttcggcttccgccgggggaagccgccgtaccgggcggaagcccctcccgcctgggaggggcttccctttggaagatatccttacgccttgtccggacgcttgtactccacatggagcagctgatgggtgcggcccttcatcgctccctccaggagctttgtaacgatggggttccgctcagaccgcttgatgagggcggtgcggtccgcctcatagaggccctctgcccgctgctgcttcaccgggatcagcccgtagggctggccagcgccgcctacgcagccggtcttgcaggtcatgacttccaccaggtcgaagtactcctgaccgctctcgatatcgtccagcagcttctgtgcgttcaccaggccgtggaccaccgcgatccgcagcgcccggtcccccaccggcagcgtcaccgcccggatggtctcgctgccccggatgccggagaactggatggcctgcagggtgttcttggacttgtcctccactacccgccgggccacggcctccgccacgccgccggtggtgccgaagatggtagccgccccggtgcccatgccgaagggcaggtccggggactccccctccagctctgcgaaacggatgccggactccttgatcatcatgatgatctcctgcgtagtcagcaccagatccacatccggttttccgtcatgctggaactccggccgcttggcctccattttcttggcggtacagggcatgatggcgatgtggtaggtggtgcggccgtcctcttcgtccttcctggcgtactgatccttcagcaccgccgcgaacatctccatgggagacttgcaggtggagatgttcttcaggaagtggggccgctcctcctccacatacttcacccatgccgggcagcagctggtgaacatggggaaggggccgccttttttcagccgctccaggaactcgtccgcctcctccatgacggtcaggtctgcgccaaaggtggtgtcgtacacctcgtcggcgcccatcatcttcagggcggacaccagcttgttgatggcattgacgccgggctccaggccgaaggcctcgcccaccgccacccggaccgccggggcgatctggaacaccacccgcttcttcgggtcgtggagggcccgccacccccggccgatctcgttaaagatggtgatggcgccggtggggcaggcggctgcgcactggccgcagctgatgcagttggtctctccgagcttgcggtcaaaggccgggcacaccaccaggtcgctgccccggtgggcgaagttcaggatacccatgccctgcatctcctcgcacacccggatgcagtcgccgcagaggatgcacttgttgggatcccggacgatggccggagaggaggtgtcgatctcatagtggggccgggtgtccttgaagcggacgtgccgcacgccgaagcgcagggccagctcctgcaggcggcagctgccattcttttcgcaggtggtgcagtcccggcagtgagaggacagcatcagctccaggatcatccgccggtgctttaagagccgggcggtattggtgcggatcaccatgccatcccggggctccatggagcaggaggcgtcgatcttgccccgctcgtcctccaccacgcacatccggcaggcgccgtaaacagacagttccgaataatagcagaaggtgggcatatcgatgccggccttccggatcacagccaggacgtttttctccccgtcgaagggcacccgctggccgtcaatgtacataattccctttgccatggtactcccctcctcacttactggccgcgatggcgccgaagggacaattggtcacacaggcgccgcagttgatgcacttctccggatcgatgacgtggacctgcttggccgcgccggtgatggcctccatggggcagttcttccggcacttgccgcagcccttgcatttctccgggtcgatggtggggtggggtttttccttgttgcagatgggacagtggtggtccactacatgggccagatattcatcccggaaatacttcagcgtgctctggacgggcttgcaggcgctctgccccaggccgcacagggctgtcttactgatggtgtccgccagctcctccagcaggtccagatcctccagtgtgcccttgttgtcgatgatccggtccaggatctccagcatccgcttggtgccctcccggcaggggacgcacttgccgcaggactccttctgtgtaaactccatgaagaaccgggccgtctccaccatgcaggtgtcctcgtccatgaccaccaagccgccggagccgatcatggcgccgatgctcttcagactgtcgaagtccaggggcaggtccaggtgctcgcggctggcggtggtggcgccgccggaggggccgccgatctgaacggccttgaacttcttgccgccccggatgccgccgccgatgtcaaacaccacctcccggatagtggttcccatgggtacctcaatgaggccggtattcaccacgttgcctgtcagcgcgaaggccttggtgccggggctggtcttggtgccgatggagcggtaccagtccacgcccttgcggatgatgaggggcacgttggcaaaagtctccacattgttcagcaccgtgggctcggcccagagaccgtgctcgatggtccggggcggcttgacccgaggcatgccccggttgccctcgatggaagctgtcagggcactgccctcgccgcagacgaaggcgccggcgcccatgtttacatggatccggaaggagaagtctgtgcccatgacgtgatcgcccagaagaccgtactcctccgccttggcgatggccgctttcagccggctcacggccagcggatactccgcccggacataaatatacccctcgtcgctgcccacggcgcggccggcgatcatcatgccctccagcacgctgtgggggttaccctccataatggagcggtccatgaacgcaccgggatcgccctcgtcgccgttgcagacgatgtattttttctctgacttctgtttccgggcaccgtcccacttctggcccgcggggaagcctccacctccgcggccccggaggccggagtcgatgatggaccggcagatctcctcatccgtcatctcaaagagggccttttcaaaaccggcgtaaccgcccttggcgatgtactcctcaatgtcctcggcatcgctgctgccgcagttctccagcaccacccgatgctgcttcttgtagaaggggatgtcctcctgccgggggtaggctacgccgtccaggtgatacaccagccggtcgatgatctcgccgcccagcacggtcttctccagaatctcatggcagtcctccggcttcacatggatgtacatgacgcccataggctcgatgtggaccagaggccccatctcgcagaagccgtggcagccgctcatctttacatggaggctcttctccgcgtccgtgtcgtgtttgaggcccacgtagaccggcagaccccgtttttcacactccgtcttcaaattgtcatagatcttcatggcgccgccggcgatgcagccggtgccggcgcagatcaggatagagggcacctgctcgctctgcttcagggcgttgcgggcgttagcctggaacacgtggaagctgtcccgcgtcatctttacctgtctcatgcggtggccgcctcctttctgcggatatcctccaccagcgccagcgcatcttccggcgtcatcttggcgtggacctctccgtcaatggtcatgaccggtgccagtccgcaagcgcccaagcaggccacggtctccagggtaaacaggccgtccgcggaggtcttccgctttccggtcagacccaaagcgtcccgcaggctgtcataaatgggtccggatttgcgcacgtggcaggccgtgccggtgcataccttgatgatgtgccggcccttggcctccaacgagaaattctcatagaaagtggccacgctgtacacctttgccgtgctgatgcccagcttttccgcgatcagggtcagcgctccctcgctcaggtacttatactccccttggatctcctgcatgatcgcgatcaggttcgactgatcgcagccgtaggcgtcgatgatcgcctccgcccggtccagattctgctccataaattctcccctcattgattcggatgataaaaaacacgcgggatccgcacttgccggcggatcccgcgcttgtgtgctctgtttccgatatgtgcttatgcgtctgtatcagaatacgccctgctccatcatggcctcagccacccgcttgaagccggcgatgttggcgcctgccaccaggttgtagcccaagccgtactccgcggccgcgtccacgctcatctggtagatggtgttcatgatccggtgcagctgcgcgtccacctcttccgccgtccacaccagccgctcactgttctgcgccatctccagtgcgctggtggccacgccgcctgcgttcaccgccttgctgggcgccacgatcatcccgggctgctccatcaagaaccgcagcgcgtcgttggtggtgggcatgttcgccacctcaatgtagtacttcacgccgttggccgcgatctgcttcgcctgctccatgtgcacgtcgttctgcatggccgagggcatcaccacatccgccttcacgccccagggcttctcaccggggaagaattccacgccgaacttctccgcatagtcctgtacccggttgcggccgctggagcgcatctccaccagatacgcgatcttctcctccgtggctacgccgtccggatcatagatatatccgtccgggccggacaatgtcaccaccttggcccccagctgcgtggccttcttacagatgccccaggtcacgttgccgaagcccgcgcaggcgatggtcttgcccgcgatccgctctccctcgtgctccagcacgttctggagatagtataccgcgccgtagcccgtggcctccggccggatcaggctgccgccgtaagagaaccccttgcccgtcagcacaccgttctcccaggcccccttcagccgccggtactcgccgaagagatacccgatctcccggccgcccacgcccatgtccccggcaggcacgtccacgtccggcccgatgtaccggtacagcgcctgcatgtacgcctggcagaaccgcatgatctccgcgtccgacttccccgccgggtcgaagtccgcgccgcccttgccgccgccgatgggcaggcccgtcagggagttcttgaagatctgctcaaagcccaggaatttgatgatgccgggatacacgttggcctggaaccgcaggccgcccttgtagggccccagcgcgccgttgaactggcaccggtagccgatgttcgtgtgccactggccccggtcatcctcccaggacacccggaaggtgaacatccgctccggctccaccatccggttcagcaggtccaccttctcatactccgggtgcttctcaatcaccggctccagagaggagaacacctcctccaccgtctgcacgaattccggctcgttgctgtgcttcttcttcacgttctcgatcacgctggtgagatatgcgttcatggctttttcctccaatcaaaattttgaaagccgtgggcacacaggcccgttcatatcaccagacaggaacggaaatacctctccgctcccgcgtctgtcctcataccacctctaacagccgttcacgttccgctgcgtttttttctccccctctccgccggccctctgccggcctccgcagcaatctcgctttcgctgtatccggcggacggcatctttcgatggccgttccgccccatgcgatctttccagtttgattgtagcaaaaaaacatattcttgggaagccctattgtgtaaaaagtacatttttctttattcactcattagtattttacaatattttccataaacgtttcctgtataaaccagaactatctgtagccagccgtggcggaaaataccacatctctcttcccgggtgcccgaggcagcggcaacgaagcggaaaaccaaaaagcctgtggtacaataacttccagatctttacctgtaaaagggctgtaattcagtcctccgcggttgaaagccttgtgccgtcatattcatcgcagtatcagccgcctggggcgatccgcttcaggttgcggctatgcactgccgcccaggtgagcggcggtcagagagctcagggcgtcacagcgaactcacagcatcgctaatcagtgtcaatattgtgggtaataaagcgggccctgaaattgcgctggttgcacatcgcccccaccatgctgccgagcggctgtcagggccagcgtaatcttcagggaaccgccgcagccgatgtgatccatattggccacctttgtaggacgatcttcttctggaggaacgtcccctcggcattctatatgtcgggagcccgttccatgacattccttccgggagcgtaggctaatcgacctgataaaaggaaatgccgcataccagcctcaacaggccgatatgcagcataaaatcggacgaaacacctggttcggtatctccggatgctgaaaacacagcggagtaaggctgaccttccgcaggagcggctttatgtgcggcagcgtgggtacagtttccttgttctttcattgcgcacagcgcgaaaagcattcataggcgcccaaaacagatgtcttaaaattcagcaaacacgctgagagagcaaagaaaacctcggaaccattgcagttccgaggttttctcatctggcagcgggtgaaggattcgaaccctcacatacagagtcagagtctgctgtgctacccttacacaaacccgctatgaagttgtgttcactccgcagcgaacagatattattatacagaaaagcgtgattttgtcaacccccttttttatttttttccacatgttttttcaagcgggcgcggaatcccgatcccgcgcccgccactatgtaagaccgttcactggccccgcaggccgtccagaaagccccggaggaatccgccgccccgtcgcctgctcccatctttctccatacggtccgctgcctcctgggcgcccgcatacccttgcttcgctgcggcctgatagagttctctcgcctgcctcagatcccggggcacgcctttgccgtgctcatagcaccaggccagattatactgggcacggggctcggactcctccactgcctggcggtaccacttcaccgcatctgcccagctctgggccacgccgacaccggtctcgtacagatatcccaggttgcaggcggccacccggtcgccgccctctgcagcctgccggtacaaatcggctgccttggccgggtccttcgccacgccgtggccgaactcccagcagacgcccaggttgcactgggcacgggggtagccctgctccgccgccgcctgataccagcggacagcctcttgccagttctgttctacaccctctccggtctcatacagatatcccaggttgcactgggcggccgcgtcctcccgctccgccgcctgtcggtacagccgggctgcctccgcggcatcccgctccacgccttcgccccgctcgtagcacacgcccaggttgcacatggccgccgcggaaccggcatccaccgccctgcgataccagtggaccgcctcttcccagttctgttccacgccgcggccgtatttgcagcagatgcccatgcagaacatcccccgggggtcctcctggtccgccgcctgtcggtaccagtggacagcccgcttccagttctgctccacgcccttgccgtactcatagcaccaggccaggttgcactgggcacggggcatcccctgctccgcagcagcgcggtaccaccgcaccgcctcctcccagctctgctccacgccctcgccgctctcatacaggaatcccagattgcactgcccggcggcattgcccgcctcggctgcctggcgatacaggctcacagccctgctcaggtcccgctccacgccctcaccgcgttcatagcacacgcccaggtcgcacatggccgccgcggagcccgcgtccgccgctttttgataccaggccactgcctccgtgctgttctgcgtcacaccgcggccatagtcaaagcagcgggccacgcagaaaagtcctctggcatccccctgctcggccgctttccggtacagacggtagctctctcccaaatcctgggggacgcccttgccgtattcatagcaccatgccagattgcactgggcacggggcaggccctgttccgcggcggcacggtaccaccgcaccgcctcctcccagctctgctccaccccctggccgctctcgtacagaaaccccaggcagcactgggcgtcctcgtcctcctgctcggccgccttccggtaccaatccgcggcagccgacggatccagcgggacaccccggccccgctcacagcagaagcccatacacagctgtccccggggatagtcctgctccgcagcgcggagatacagccgggccgcctccgggtagtcctgctccacgcccttgctatgctcatagcaccaagccaggttgcacaaggcccggggatagtcctgctccgcagcagcgcggtaccaccgcaccgcctcctcccagttctgctccacgccctggccgctctcatacaagaaccccaggcagcattggcccggcgcgttgccgttctccgccgcagcgcggtaccatttcaccgcctgctcgatactctggggcaggccggtgccgaactccaggcaacgccccagttctgtctgcgccgcgggataacccagccacgcggcggactgataccagcgggcggcctcctcgtcgctctgctccactcccaggccgcgggaatatgcctcccccagcaggaactgggccctgggaaagccgttttccgccccctttcggaagcactccaccgctttggaatcatcccgcgccacaccgatgccatgggcatagcagtatcccaggttcgtcagggcgggcatatagtcccgggcggcggcctgggcgtacagcaccaccgcctgccgggggtctgcaggcacgccgatccccgcctccaggcaccaccccaggttcgtcacacccagcatatcatccagggccgccgcctgttggtagcaggccagcgcgtccgtcggccgctcctcatccacggcccggttgcccagctgcacccagtcgggccccgtcagctcctcttcgtccacagagaggaaaaaggtgcccccgcactgggggcagacatccggttcctcctctgccagaaacccgcagtccgggttctcacagcgatagtaattcatctgcgcacctcctctgtatcaaagcgccgcttcatcctccgcagaggaggcgccccgcaggttgtaggcctccggaaacgcgaacgccctgccccggaatttgaagcccgggaacgtgtccagctggacgccgtgaatggcccggaacatgctcttctcaatattgggattggtctttttcagctcccgcagcaggagcttcatctcctgccgcttgctctcgcccacaccgtcggccgcaccgtcccgctcctctgtgaagcggcaggcgcactggagaaaccgcaacccattgtagttcttccaggcaatgatggcgtcctcatggacacaatacagcggacggatcaattccatgcctgggaaatttctgctgcggagcttggggggcatggtctggagctgggcaccgtaaaacaggcccagcagcgtggtctccagcacgtcggagagatggtgccccagggcgatcttgttgcagcccagctcctgagccttgctgtacagaaagccccggcgcatccgggcgcataagtagcaggggttcttctccacctgataggcaacgtcgaaaatatcgctccggaacacggtgatggggatgcccaggcgggcagcgttctcctcgatcagcgcccggttggccggggcgtagcccggatccatcaccagaaaaaccagctcaaagggctgttctgtgtggcgctggagctcctgcatcagcttggccagcaccatggagtcctttcccccggagatacagacggcgatccggtctccgggagcgatcagctcataccgcttgacggcggcaatgaaggggttccagagctccttgcggtattttttgatgaggctgcgctccgcagcctcctgtggtgtcaattcgcgggacatggggacctcctaaagcaaaatgagagcggccgcgtcagaaccagatagccaccagccgcagcagagaggcgcacattttgcgcagccaagaccgctgattccactccgccagcgtatagggcgcgctctgggccaccatccggtccatatcctccagcaggtcttccaccgcgggcatgtgatagaggagcacggcgcattcgtagtgcagctggaacgtccggtagtccatgttggtgctgcccaccagggccacctcccggtctaccatgacgctcttggcgtggacgaagccgggggtatagcggtaaatcttgacgccgtgggccagcagctcaccccagtaggtctccgccaccatgtagacatatttcttgtccgggatggcgggtaccaccagccgcacgtccacccctgcgtcggctgcgatgcacagggccttctgcatggactcctccaccgcgtaatagggcgtggtgatatacagcatcttctgggcggaggcgatcagctggaggtaggtgtcctcgatgggattgtccggattgttcagcggaccgtccgtgaagggctggcaccagccggtgccctcgatctccacccggggacggtagtagtcgtcctcattgggcagggagcggccgatcatcttccacatctgaatgaactgggaggcaaagccccaggccccggcaccgtcgatccggacaccggtatccttccagtggccgaaccggacaaagaggttggcgtattcatcggcaatattgatgcctccggtgtaggcgtgcaccccgtcaatgacggcgatcttccggtggtcccggtagttgaagtaaatccgattcacgtagcggtggactggattgaacacctccacctccacgccggcgtcctgcagggcctggagggaggcgtcggaaaagcgggtgaggttgccgaagtcgtcgaagatgatccgcacctccacaccggcggcggcccgctcccgcagcacatggaagatccggtcccagatctggccctccgccaggatgtaatactccaggaagatgtagatctccgctctctggaggtggagcaccaggtcatcgaagaaatcggctccctccgcgaaataccgggcctgtgagccgccgtacagcaggaagtcccgcgactgcaaataggaggccagccgtccccaggccggggagcggcggctcaggtgggccacattggcggcgctggcctggcgggcgctctcccgctccaccggaggggcgaccttccgcagactcaggcttttggcctgatggctcccgccccacagaaggaaaagaatcataccggccaccggcagggccagcagcaggcacatccacaccagcttataggaggggctgccggggcgcagatacacccagatcgccaccacggcgccagccagctccagaatgaaatagacgtagctgatcttttccgccagcaactgggtcagcgccagcgtcagcacgatctgggcaatcaccgtcagtgcgcagatggacaggctggtggcggcggagatccgccgttccgtccgctcttccggctggggcagacttctttttcgcatggtgcggtccacctccttctctctcagcttcgaccgcttatcttattattataccgaaatacccagcactccgcaaccaatattctgtgaacaaacagccccgccggagggcggggctgttgggtcatctgctccggcagagcagatcctgcttgatgtcgaacagcttctgactcagatccacatagtaggtgtgagggttctcgaaccgcttcaccgtgtcccacagggtatccacctgggcacggcagtaggcctggatctccggcagggcgggcagctgatagaccagctctcctccctgaaagaccgggacctgaaggggctttgcggtaaagttcgtataggtcttgcgcttccaggtggccctgggatcgaagagctccagtggggcgctctcgtccaccgtctcgtcccagacggtgatgtagtccgcctccgccttgccggtggcgttgtcaaagatccgataggtcttcttgaagtggggaatggtgatcttgtccaggttttcgctgaccttgatcttggggatgatcttcccgtctccatcttccacagccgccagcttgtacacaccgccgaacaccggctcgctgcgggcagtgatcatccgctcacccacaccgaacacatcgatcttggcgccctgcagcagcaggtcctgaataatatactcgtccagggagttggaggcggagatctggcactcggtccagccggcggcgtccagcttgcggcgggcctcctgggtcagataggccatgtcgccggagtccagacggatgccgcacttgcggatgcccaggggcttcagcacctcatcaaaggcccggatggcatccggcacaccggacttgagcacattgtaggtatccaccaacagcgtggcattgtggggatagatctggcagtaggtcttgaatgcctcatactggctgtcgaacatctggacccaggaatgggccatggtgccgccggcaggtacgccgtacagctggtcggagatcgtgcaggcggtgcctgcgcagccgccgatataagccgcccgggctccggagatggcgccgtccgtgccctgggcccggcgggagccgaactccagcaccgttcgcccctgggccgcccggacgatccggttggccttggtggcgatcaggctctggtggttgatggtcagcagggtgaaggtctcgatcagctgggcctggatggccggcgcccggaccgtcaccaccggctcccgggggaagataggcgtcccctccggcaccgcccagatgtcgcctgtgaaacggaagtcccgcaggtagctcaagaaatcctcggagaacaggtgcttgtcccgcaggaaggcgatgtcctcctcgtcgaagtgcaggttctgaatatactggaccaactgttccagacccgcgcagaccgcgaacccgccgttgtccggcacgttgcggaaaaacacatcgaaataggtgatccgatcctggagccctgcccggaaatagccgttgcccatagtcagctcataaaaatcgcagagcatcgtcagattgagtttctcttccgttttcataaccgtttcccctgtgccgccggcacagatccttccatgaagtttcaggcccccacaccgctggaggcggtctgtccggggttgttattcccttgaattataagcggttcccccaggaaaagcaatgctttttccgaatttgttgtcaatcttttatcaatcgtcttgacaacaactccgccctcccctatgatggggaaagattgaaccgcacattttccggtacacagcggactggagggttttctcgtgaaaaagtttgctctcttcttctccgcggcggccgttctgtgcatcctgaccggcctcactgcataccaccgctcatttcctctggacgcggacctcaatgggctggaaccggctgcgctccaatggttcaaccggggcaggtccgttccctgcgaggcggaccagttggagctgtaccagcctgtgaccgtggggcgtctcacctattatcctctggttctggatggacggttgggatacctgtgtctctcgagaggattcaccgggcggtataaattcgaccactccggtcgcgggaccggctccttccgcaacggagtggtggagtccgacggggagcagatgctgctcttcgaggggcggaacggcgacggccgcatcgcccgggcggtcttttcactggagggcggtgggccttatgcgctggacattccggcctctcccgtctttctggtgagcacctcagtggatgataccgtctccacaggtcctatcagcatagaggagattgtcttttatgacagccaggggcgggatatcaccaagtcgtttgacctcagcggaggcgccatccagtaagcgcccccaccgaaaaccaagcggccgtctgccgctgaaaggaagtcatcacaatggatgtgatcttaggcattgacatcggcggctccaccaccaaaatcgtgggtctgcggacggacggcagtgtgatctccatgctgcgggtccgggcggaggatcaggtgaccagcctgtatggcgcccttggcaactatctcaccagcaaccggctctccctgcgggatgtgcggcgggtagtgctcaccggcgtgggcgcctcttatgtggagggcgacatctacggtctgcccacctgtaaagtgggcgagttctccgccagcggcaccggagccctggccctgtcgggccagtcctccgccgtggtggtcagcatgggcaccggcaccgctttcctctgggcgtcccccgacggcatccgccacctgtgcggcagcggcatcggcggcggcactctgggcgggctctgccacaagctggtgggaatggagcgcttcggccagatcaaaaagctggcggagagcggcaatctggaccatgtagacctgaccatgaaggacatcacggtccactccgctcccactctggacccggatatgactgccgccaacttcggcgatctggcggaggacgccactcctgcggacctggcggccggcgtggtcaatctggtgctccaggccatcggcaccatgacggtgctggcctgccagtgctgtgactccaagactgtggtgctgaccgggtccatgaccaccctgccccaggcggtcacgaatttccagctgtttgaaaagctgtacggcatccactatatcattcccgaaaacgccacgtttgccaccgccatcggcgcgggactgtacagcctgcagaaaaagccggaggcctgattgtgccatgacggaaaattggtccctgtatcatccggagatcccggaatttctccgccgtctggcagagacgccgcccatggcccggctgcggcaggtgggcatgaactgcgggtgcgagtacacgtccttcccccactttgccgggtgggccccctactcccggtttgaccacagcgtgggcgtggggctgatcgtgtggcacttcaccggcgatctccgccaaagcgcggcgggactgctccacgatgcggccacacccgcctttgcccatgtggtggattttctccacggggaccacctgcatcaggagtccaccgaggcacggacggcggaactcatcgagacctcgccggagcttcaggcgctgctgaaagaatacggcctcaccacggaagacgtggcggattaccaccgctatcccatcgcggacaatgactcccctcagctctccgccgaccgtctggagtacacgctgggggacctgcggtgctacggcttcgccggggcggacgccctccgtgtattctacgaagatctcaccgtctggcgggacgagtccggccggccggagctggccttccgcacgcgggagaccgcctgcgccttcacagaggcatcgctccagaccgcccaggtctatgtggcggacgaggaccgcttcgccatgcaggccctggcggacctgctgcgcgatgccgtgaaccggcaggtcttgacagaggatgacctgtatcggacggagtcttttgtcatccaaaagctggaggcagatccggccagcgcccgccggtggcgccggttccggcgcttctgccgggtggagcggagcgcggaaaggccggagaacggactctggttccggattcccgccaagctgcggtacattgatccgctggtggcaggccttggccgcgtctctcgcttggacgccggggtgcggcaggcccaggaggccttcctggccacggactttgcctgctggatcggtgttccggaggaaaccgccggagagaatgattgaaagattgggagaaagagacatggattacagagaaaaagccgtccggtgtgtgcgggagaccgtcctgcctgtccaggcggcgcagttccgggcgtgcggctgcgacctggacgcccagtaccgaaaatacggggacacggagagcttttttgccaaggttctccagcccgggcgcctctatgaggtgggttatcccaaatgcgtctgccctgaggtgctggggggagagacggccgacgccgcccactgcgaatgttcccggcagagtgtgctgtatattctggaacagctgctgcccgaaagacacatcacggtccggaccgtggagacggtgctgggcggcgggacctgctgccggttcgccgttacagtggagtagcagcggaaaatgcaaacaggagcccggtgctgtgcaccgggctcctgcgctcacatatagggattattcctcgtcctggggcttgtcctcgtcctccaggccgttcagatcgaactccagcttctcgccgcagttggggcagatgacctcgccgtcctccaagacggactcgtcgaagtagatggtctcctcgcaggtggggcaggtggtggcgtagcagtcctcgtcctcctccggctcctcatactcgtatacatcctcttcgtcctcgtcatcctcgccgaagacggcgtcctccacatcctccaggtcatcgctgacagcgtccaggccgtcgtacagctcctcctggtccgccttcatatccgcgatctccagggcgatgtcgtccagcacgtcgatgatggcggcaagcagcttgccctccttcttctcggtgtccagttccatgccttcagccaggcccttcagatacgcgaccttctccgtaatctccataacagcagctcctttcctttacaaacagcgttgcagtcattctcaggaacaaaaggggggaatacgcttccccccctttgcctcacttactccttgctgcggccgatatactcgccggtgcgggtgtcgatctggatcttgtcgcccgtgttgatgaacagaggcaccttcacctcagcaccggtctccagcgtcgcgggcttggtcacgttggtggcggtgtcgccccgcaggccgggctcggtctccgtgacctccaggtccatgaagttgggcacttccacggtgaacacgctgcccttgtagctcaccagcttgcagacggtgttctccttcacgaagcggaaggcgtcgcccagcacgtcccggttcagcgggaccatgtcgtaggtctcgggatccataaagtagtacaggtcgccgtcgttgtagctatactcggcatccttgcgctccacagtggcctgctcgaacttggcggtggggttgaaggactcctcgcggatggcgccggtcatcacgttcttgtacttggtgcgcacgaaagccgcacccttgccgggcttcacgtgctggaactccaccacggtgcaaacgctcccgtccttctcaaaagtgacaccattgcggaaatcgccggcagtaatcgttggcataaatgatcctcctctgaaatctcaagaaaagctgaccagccggccgcctctctatctctacaaaaattcctctgctattttatcctatgttgtccggtaatgcaagtatttttcaggactttttttccattttgcggcggcagacagccttaaacggggcctggagagcgtggagcaccttctgccatgccgtcacggcgccgcccaccggctccaccatcagaggcaggactccggcccggttggcggccagcatatccgtcagcagcttgtcccccagcatggcggtgcagacccggtccgccccagcccgtgccatggcggcctccaggcccctgggactaggctttcctgcacggccctgataaggcacccccaggtccgcgcagaactccgtcacccggctgccggagcggttgttggagacgatcatgaaaccgatccccgcattgcggagggcggcgatccagtcccgcagggactgatccggccgacgggtcttcttggcggccaatgtaaagtccaggtcgctgagcagcagggtgatcccctgctgccgcagccagtccggcgtgatctcgctgtaatgctggaacacccagcggggcgtcagggaaaacggcataagcggctccttctctgcatagtctccttttagtataccagtcccaacgggattccacaagggggagttcattttgcagatctatctggccgtgacgccggccgaggcccaggaggcctcccgcttccgctgttccctggcccatgtggcctactgtatcgggccggactccacgctcctgcggcagaacctgctgctccagacccggggcgggctattgtccgtcacagaccggggcgcgccctttatcgccagcccggagcggctgtcggccgccgcgctgcgggagtgcgggcggcggagctacggcggcgtactgctggatttcgagcagcctcctgcgccggaccggctggcctttgcggagacgctggcccggcgcctgtcgccccgccccgtttatgtgccggagtcctacgccgcggcgtcaggcgccattcccctgatctgcaccgccatctccggcgggaactttgtccagcgcctgcaggaggccgctgccggacgggacagggcaggcggtctggccctggatgtccagcggctgcggatggacttcaccctcccggctcaaagcggcgaaggccgccctctcagcggccgggaactccaggacctgctggaccgggagtccccctccgttttcttctcccaggacctgtgcgcccggtatttcacctatgcccgggacggcgagacgcatttcgtcctcttcgacgacgcggacaccctttcccagaagctgcggaccggcgggaacatgggcttcgccgccgccttcctgatgtatccggaggtgcaggatctgctgcccaagctgtttcccgggcggaggacataaaaagtgctgtacctttcggcacagcacttttccttgacagatcaataatagcgcttcttgttcttgcgagcggcctcagacttcttgcggcgcttgacgctggggctctcataatgctctctcttccgcacttccgcgatgacgccggccttggcgcagctgcgcttgaaacgcttcagcgcgctgtcgatggactcgccgtccttcacatggatctcagacatctatatttccctccctccgaggtatccggcttaatccaggatactttaagggccataatctatggctttaacataagcattatacaaaccttccgggccgttgtcaagagattttccggaaaatcagcatttctcccgggagatcagtccgccgctctccggtacacgatgggcacatcgtacccgaacgtccgctttccgttcacctccatggtctccgccacctccagggactcctgagagaatcgctcatacagggtgaacttcagcaccggggagaacatgctgacgctgcccccctcccacacgccgtcgtgcagcgtatagagggcaggcgtgaatttctcggagatctccagatcctcccatttcaggggcggcagcgtctcataggtggccgcgccgccgtccgccgccttgggcagctgataggatgtcagcttcaccgcctccccctcctccgtaaagaggaacagatggggtgaggcgtgggtctttccctccgtggtgtaatagctctcctccagcacaaatgctcccgcaaaatccgcggggaggccgtcaatcttgtcgttgcacacggtgttgacatgctctgccagcggcagggcggggccgccgctccgccgcaactcctccagctgccgggtattgtcaaacctgccgcacagcaggcgcaggaattcatccagacggctcataggttctcctttctcaggcagggcctgaagcgcaggccggacgggatttcccgtccggccttttggtgtgattgggatgaactgggatgctcccaccagatgcatcggccggttcccggtccagcggggctcccgcatcggaatgcagctggacaggcacaggccgtccgccccaaggttgttgtctccggcaaaaacgcttgtacgcaccgctgggcgcagtcttatttcgcgggcttgacgatcagattcaccagccggttcttcaccaggatggtcttgatgatctgcatcccttcggtggccttccggaccttctccaccgccagggcggcatccaccacggccttctcctcactgtcggttggcatggagatggtgcccttcagcttgccgtttacctggacggccagctccactgtggaggccacggtcttgctctcatccgccacgggccactccgcctggcagcacatcttgcccgtctgggcggcgaagcccaggttctcccacagctcctcggtgatgtggggggcgaaggggttcagcagcaggagcagatacttcaggtcgccccgggtgcagccgttggcgttcagctcgttcaccatggtcatcatggcggcgatggcggtgttcatcttcagactgtccacatcctctgtgaccttcttgatggtcttgtggatgacggcctcgttggcgggggtcacatcatagctgtcggaggcgctctccgccagattccacacccggtccaggaaccgcttggagcccttcaccgcgtcgttggaccaggttgcggccttctcaaagtcgccgatgaacatgatatagaggcgcatggtgtcggcgccgtactggtccacgatgtcgttggggttcaccacgttgccccgggacttggacatcttctcgccgccctcgcccaggatcatgccgtggcttgtgcgcttggcatagggctccttggtgggcacggcgccgatgtcatacaggaacttgtgccagaaccgggagtacagcagatgcagggtggtgtgctccatgccgccgttgtaccagtccacgggagaccagtagtccaaggcctccttggaggcgaatgccttgtcgttgtggggatccatataccgcaggaagtaccagctggagccagcccactggggcatggtgtcggtctcccgctgggcggggccgccgcacttggggcaggtggtgttcacccagtcagtcatcttgctgagggggctctcgccggtgtcggtgacctcataggagtccacctccggcagcagcaggggcagctgctcctccggcagggggacccagccgcacttggggcagttcaccagggggatgggctcgccccaataacgctggcggctgaacacccagtcccggagcttgaagttggtcttgggacggccgatgccctgctccgtcacccacttcttcatggtgggaattgcctctttcacggtgaggccgtccaggaagccggagttcaccatgatgccggtgtcgtccttcagggtgaaggcctccttggtgatgtctccgccctggaccacctccacgataggcaggccgaacttggtggcgaactcccagtcacgctggtcgtggcccggcacgcccatgacgatgccggtgccgtagcccatcagcacgtagtcggagacgaacaggggcacgtgcttgccgctggcggggttgacggcctcgatgccctccagccggacgccggtcttctccttgttcagctcgccccgctcaaagtcggacttgcgggcggcctcctcgatataggcggccacagcatcccagttctggatctggtccttccactgctggagatagggatgctccggggagatgaccatataggtcacgccgaacagcgtgtcgcaccgggtagtgtagaccgtcagcttgtcgccgttggtggcggtgaagtccacctccgtgccctcggaccggccgatccaattcttctgctggatcttcacccgctcgatgaagtccaggtcgtccaggtcgtcgatgagccggtcggcgtacttggtgatggccagcatccactggctcttctccttgcggatgacctggccgccgcagcgttcgcacacaccgtccacgacctcctcattggccaggacgatcttgcagctggtgcaccagttgacgggcatggaggccttgtaggccagccccttcttgaacatctgcaggaagatccactgggtccacttgtagtagctggggtcggtggtgttcacctcccggtcccagtcgaaggagtagcccagcatgtggagctgcttgcggaagttctcgatgttgtcgtgggtcaccttggcggggtggatgtggtgctgaacggcgtagttctctgtgggcaggccgaaggcgtcatagccgatggggaacaggacgttgtagccctgcatccgcttcttccggcagatgatgtccatggcggtgaagggccgggcgtggcccacgtggagcccctggccggagggataggggaactcgatcaggccgaagaacttctcccgagtcttgtccccggtgacggcggtgaagggcttctcctccagccacttctgctgccactttttctcaatgctggcaaaatcgtatttcatatccttctcctcattcctgtgaatggatttctctgttcgatttatttttgccgcggcgcgcccccgggcggcctctcttgcttctacggggcaattcaccttctgtacgtggcaaaaatactttgacccaaccgccttgggtggcgtcgccagtgactgatgccgctggtgaaggcactctgctgcgcagccattggcggctctgccgcctgacggatgcggtgtgccccctgcgggcaaggagatgtcaatcccctcttcaagctgtaaaagcgcccccgaccttacggtcaggggcgtaaaagctacgcggtaccaccctggtttcgccagccgttgccggatggcgctcaacggcccggagggcctcggccagtaacggggcctgccgtcccaccctactatgtccgttcaggcgggagactccgggaacagtcatccgcgaaggtcccccaccggctcgcagcagccgccggctctctgaaggcgggacatttcgcctttcttcccatcaatgtcgttaacgggtctattttatgtggctttgcgcgttttgtcaagaggtaagcgggaaaagcgctgtacaatccagtcgacatcttgtttttgcccgtcctgctctgtataatggggaaaatccaacgtatagcagcagaaagaaactctggcaatttggggggaggcgaaaccgtgaagggcaccctgataaacacgcccacattggaaaccgggcgtttgatcttgaggaaattcacagagcgcgatctggaatggctgtttctgattctccatgacaaggaagtcaatcaattcctgccctggtatccgatagacagcatagaagaagccaagaaattctatgaagaaagatacgcttcaaaatatgtccagccgcaggcatacgcttacgcgatctgcttgaaaacggacgatcatcccatcggctacataaaagtggatatggaggaacatcacgatttcggatatgggcttcgcagggaattctggcatcagggacttgtcacagaagcgggcaaagcggtgatcgcccaagtgaaaaaggacggcctgccttatatcacagcaacgcatgaccgaaacaacccaagaagcggcggcgttatgcggaacgttggaatgaagtaccaatattcttacgaagaacagtggcagcccaagaattttctggttacatttcggatgtaccaactgaatcttgatgggaatacagatcgggtttacaaaaaatattgggaccaatctgctgcccattttatagaaccgaacgtgtgaacagatggatattggagaaaagctgggcgcagaggcagccggacttgttaaaaccgaagtgcttgatgcatggacctgcctcacaggaagcaggcccattttcatacaggcgcgcccaatgcgccctcacacttcgcagggaaggcttttcgccccctgatttatatcgctgccccttgattccgattgtttcatactcccccgccggtcgcctggtgcagcagttcttccgccggcacaccgaagagcttcgccagggccagcaggttggaggtgctggggtccgccgtgccggtctcccatttgctgaccgcctgccggctgacccccagggcctccgccacgaactcctgggtcatctggcagcgcatccggtgggccttgaggacctcccccagggtgcggcgggtctccgctttttcccggcgggcctccccgccccgcaggtacttccgcaaagcccggatcagcaggatcagcagataaatgagccctgcccagatggccagaaacaggagcagcagcgggagcatgataatggaactgaatgccattgcagttgcctccttttgttttggtggtctcagcatacccggggcgggcggttgcgtccaccagctatcgcgcaactctgggttgataagcagaaaaaagctccggcggtcagcgccgtcggagctgatgtttccccttttcaccggacacggcgccccacaaaatcttcgttttgcgtggcaccacattggactcaaatgggcaggcagagcctgcccatttcatatttttgcctgcggcaaaacgcttggacacgccacttggcgcgaagggcgatcaattctccgtcagcacaccggagagatccaccggcttgccgtcgtgccaaagccgctccagcgaatagaactcccgggcctcggcggagaacacgtggaccaccacacagccgtagtccagcaggacccaggtgccgtcccggtagccctcccggcggagaggatcctcccccgcctgctccttcatggccttctccactgcgccgcacagggcgttgatctgggtgttggaattgccggtggcaatgacgaaatagtccgccagggtggtctgctccgtgatctcgatggcggcgatgtcgccgccctttttctcgtccagggctttggccgcagtcagggccatctctttgggtgtcatggactcatcctttctgatcgtttgaatctgcggcacacctgccgctcaggttacaataataaacccgtcatccggggccgcggttccgccgtcggacataccggggtctacaggaggcgccgtctcaccatcagacggctgggaatccggcgactccggggcggttccgccgctctcacctgccgccgggtctccgctgccgcccgggagctggccgatcacctgtcctgtaccggggtccaggatctgcccggtgccgggatcgatgataccgccggtctccgggtcgatcaggtctcccgtgtccggatcgatgctccccgtaccgggctccgtggctccgccgggatccgtggtctctccgccgccgggcgtcccggtcgccccgccggtctccggcgctccggcatcagggccggtccctgtgccggtctccccctccggaggcgtctcctcctccggctcctggggcgtccactgggcctgccagtgggaccggggatgggtggcgttgctgtcttccacatgaccggtggaggagctgacggagccgtcgctgttcacggtcatcatatccagatcgctgcgggtaaatacctcggcgtaggggctcaatttggtgttcaccagctccagcagctggctggtgttgggcgttacataggactgttcggaataccggccgttgagcttgctggtggtggagctgtatgcgtaggcgggcgtgttcggcatggtgacgaactccacgttctccggcttcaggccgccggtgaaggccgctttggcaaaccacaaaatattctggagggtcagatccgtctccacgttctcccgaaacacctcggcaaatgcgttgatcttggcgatgttctcgatcttcagcagctgctccaccatggcggtcaaaaatgcctgctgcgtcttgatgcggcccagatcgccgtccttgtagccgttggctccgtcccggaaccgcagtacctgcatggcgtcgtcccccgtgagcaggcggtagcccgctttctggttgatatagaggttttgcagggggtcactgtaatacatgtcccggggcacatcgaaccagacgccgcccatagcgtccacgatctggcccacggcctcccactccacaatcacctgatagtccggctcaaagcccaccagttgggcgatctccttgtagagatactggatgccccggtctccaccgccgtaccagttgtaaacagagttgatcttcttgatatcccaggagacattcaccatagtgtcccggggaatggacatcaccgtggccttctggttggtcacgtcgtagctggccagcagcatcgtgtccgtattgccgccgccccccgtgtcccggcccaggatcagaactgtgtagtagtcctgactcttccgctccccgtcgctgcgggggcgggtcccctcgccccagtcgatctcctccaccggatcggtgggttcttccgtctcctggggctctgtcttgccggtgttgaggtccggccggacgaacaggctctgccaggccaggacccccgccagggccacagccagaactgcggctgcggcgatcagccccttctgccccctggtcagtccggaccgtctctttgggggacgtccttttccatccatctggtccgccatggtgccaccccttttccgtcgttcagctcacgatgataaagccgtcatccggagcctcttctgcggcagcatcgccgcctccatctccggtgccggaggcctggctgtctccagtgcccgaatcggtcgttcctccgcctgcgtcaggcgtgccgccgtccggagtcccgcttgtgcccgtacccggatcggtggtcccgtcggtgccggtgccagtggttccttctccggtgtcaggtcctgtggtcccgccgccggtgccgggatctgtcccgccgtcgggcgttgcccctgttccgggatccgtcgtgccagagcccgggtctgtggtcccgcccgtccccgggtccgtggttccgccatccggcgtcaccggcaggccggtgtccggatcgatgggattaccgttctcatccaccgtgggcgtctcctcctccggcttgctgggcgtggtaggcttcaccggcggccgggccgcccggctgtcttccacatggccggtggacgagctgatgctgccgtcagagttgacggacataatgtccaagtcgctgagggtgaatacctccgtataaggactcagcttggtgttcaccagctccagcagctcattcgcgctgggcaccacgtaggattgatagttgtgataggtgcggctccagcaggatgcggtccggttgggcatggtgacaaactccacgttctccatgctcagcccacccagaatcgcctgctgggcaaaccataggatattctggaagctcaggtctgtctccacattgttctggaacacctggatgaactggttgatctttgtgacgttcttgatctgcagcagctggtccaccatggcggtcagaaacgcctgctgggtcttgatgcggcccagatcgccgtccggatagccgtagcgcatgtcgttgtcgtggcggtagcggagcacctgcatggcgtcgtcccccgtgagcaggcggtagcccttctcctggtggatgtgaaggtcctgataaggatcgtcgtagttcatgttccgtggcacgtcgaaccagacgccgcccatggcgtccacgatctggcccacggcgtcccactccacaaccacctgatagtccggctcaaagcccaccagctgggcgatttccttgtagagatactggatcccccggtctccgccgccatagtagttatacacggagttgatgcgcttgatatcccaggagacattcaccatggtatcccggggaatagacatcaccgtggccttctggttggtcacgtcgtagctggccagcagcatcgtgtccgtgttgccgccgccccccgtgtcccggcccaggatcaggaccgtgtaatagtcctgactcttccgttccccgtcgctgcgggggcgggtcccttcgccccagtcgatctcctcttcctgggtcccgctgtccgcatccgcgttcttctccggcagatccgggcgaacgaacaggctctggcaggccaccaccgcgatcagcacgatggccagtaccacggctaccgcgatcagcagcttctgctgccgcgtcaggcggctcggtttcttcggcttcttgggtctgctctttttcggcgtcccgcccgccggatgctttccgttttctctatccactgtctctctatcctttcaatgcgtcccgcgcctcaatggtggcgtggtgcacagggtttcccatttcggtcatctcttcgatggtcatctccaggcccatcagcaggccctcgtccaggtctttataacacacagcgcggagtttgtctacccccggaaaattccgggagggctcgatataatccgccagatagatcactttttccagcagggtcatgtgggcatggcccgtggtgtgccaccagatggcgttgtagatttcatcgtccacaccgaacacgtcccgggcgatggccgcgccggtcttggcgtggagaagcttcagggccttctgctccagctcgtccagctggatgccgtaccggccgcacagttccagctgctcctccatgttcagcttttttgtgcagtcgtgcagcagtgccgctacccgggccttctccacatcggcgccgtaccgctccgccagacggatggcctcctgctccgtgcccagcacgtgggggatgcgcttgtttttcaaataactcagagctatcggccgcagctcccgcaggggcaggcgcttcaaatccgcccgggtgccgtacagtccctcccgcaggatatagccgtacaccgccggaggcaggagattcacgccctctcccttcgccagcatggttcgcaggtctgtggaggacacatccaccacgccggggatggtgagggtgaagatccgggcctggggatatgtccggtacagatagtcccgctgaacggagaacagctcctccgtgtccgcctccgttcggccgaaggtggcgatccccgccagggacagaatcttctccgcttcgtgccaggtctggatggtgaggaacatgtccgtgcccatcagcagccacagctcgtcctccgggtaccgctccttcagctgggccagggtgtcggaggtatagctccgccccgtccgcttcagctccagatccagtacctggacccggtcccccaggcccagctgctcccccgccaggcgggtcatctcaagccgctgttccggagtggggctgcccgctggcagcgccttgtggggtggctcccggtccgggaccagcagcagcaggtccagcttcagcagctcgaataccgcccgggccgcggtcacatggcccaggtggggcgggttgaacgtcccgccgtaaacgccgatcttcatacgcgattcctctttatggttcagatttttccgccggaagctccaactccatctcgtcatccgtggcggtgaagccataccgctgatacagcgggcggcccatggcggtggtgtggagagaaaccgtcaaacagccccgctcacaggccgctgccgtgaggagatccagcatccgccatgcgatcccccggcctcggaaggcaggatccgtccagatgttcataatatggccggacagacccgcgggattgtgataggagggcatctcccggcggaggtccaggccgccggtggcggccagccgctctcccgccagcgccagaagcgcaatgtggctgccggacgccagggcctggcggtagtaatcccggaccgcatccggcaggccatgcggcagcgccgccgtctccgaaaggtgccggtaggtccggatggcccggaggcggctctccgtcaagagctccagatccccgatcccggcagtgcggaacgtcagttccatcgggcgccttcccgggtcactgggggcgcttctttgccggcttcaccagctggatgcgcttctccctgggcttggagtggctctcccggtacagcacgaacttcgtgccgatgacctgcaccacctcgctgcgggtggccttggccagctcctccgcggcggtgcgggcgtcgtagtcgatattgttgtccagcacccggcccttgataagctcccgggcctccagtgcgtcatccgcctgcttgatgaggtttgccccgataccgtccttgcccacctgcaggatcgtgtcgatgctgtttgccaggccccgcagctgggcccgctgtttgcttgtcagttccatgtatactcctttattccgggaaatggccccggtcttttttatttttcgtcatgccaggtagactgccgcagcttctccatagactcctaggcaatccactcttctgtatagccgcagctgcggcagacatacctctgaatttttgcatttacaaaaaaacgatgggaaaagaattgtacagccccggctccactgccagcaggtccgcgctgccgcatttggggcagcgtccggtcgttttcaccgcagttccctcctcaccaaaggtagacggttattttttcaaataagttgccagtttctccgaaaatgcccgcagagcttttcctctatgggagatggcgcccttctcctctgccgtcagctggccgaaggtcctgcccttctccggcaccaggaacaccgggtcgtagccaaatcccgccgtccccatgggggcaaaggcgatggcaccgtcgcaccggccctccgccgtcagctcgtccccgccgggaaaggcgcaggcgatggcgcaggcgaagtgggccgcccgggtagtctgtccccgcatgttctgcagcagcagggtataccgcccccggtcgtccagctcctccccgccgtaacgggcggaatacacgccgggtcctccgttcagggcgtccacacagagaccggagtcgtccgcgatggcgggcagcccgctggccgcgcagatggccttggccttcagcatggcgttttccgcaaaggtggtgccggtctcctccacgtctatggagattcccacgtctgcggggctcaccacttccacccccagtccggagaggatatccgccatctccttcagcttaccggggttatgggtcgccaacacgaatttcataccgtctcctccttttccgccgcacggtccagacgcttgttccggatggtcagcaccaggtcgatggtgaccatggtgatatccagaatgtaaaaagccgccacataggtgacatttccactgatgaacttccccgccaagccgcagagatagcccacgatgatgcacacctcaaaccataggctcttgccctttgcagtacgggagcgcacggactttgtgatgttgaagggccaggacaggccgaagcagatcagcataatcatctcgaatacctgcgccacggaaaccatctccttctttcaatttgtggttttatcgcttcaaaatctcccgctggagcttcagcagctcccggttgcccttggcgcacaagcgcaccagctcctgttgctcctggggcgtgaaagcccggccctcgccggtgccctggagctcgatgatctcccccagctcattcatcacacagttcaggtccacctgggcacggctgtcctcgctgtactgcaaatccagcataagggtctccccgacgattcccgcagacaccccggtgacgaaatgccggatgggattggaggccagcacgccctcctccaccagcttccggcaggccagagccagcgccacaaagccgccggtgacggaggcggtgcgggttccgccgtcgccctggagcacgtcgcagtcgatggtgatggtatgctcccccagcttcgccaggtccacggcggcccggagggaacggcccaccagccgctggatctctgcgctgcggggcgagagcttcagcttggcgatgtcccgcttgctgcgctcccggttggcccggggcagcatggagtactccgccgtcacccagccggtgccctccggcacatggggcggcacccggtcctccacgctggcgcagcagagaaccatggtgtcgccgcactggatgagacagctgccctccgcgaattttacgaaatcaggggtgattttgatcgggcgcagctcgtcaaatgcccgtccgtcttgtctggtcatggtatgcgctccttttcattttccccgcagagaggactggatcgccgcgaacgcacggtcatagtcatctctgtgaacatagatggtgtaggtcaggacgctgtcctgtacagcagtcggagcggccccctgctgcggcgggcagccgcggcgtataggccccgggtcctggtgccgctggagagcccggcatctgaaagcgccccgcggatccgaaagtacatctgctgcgacgacacagagatcagttctctccgattccaaatggtgatccttgtctctctgctgccgctcaaataatggcctccacatattccttcgcgtcgaagggcttcaggtcgtccaccccctcgcccacaccggccagcttcaccggtacgcccagctccttggcgatggcgatgacgatgccgcccttggccgtgccatccagcttcgtcagcacgatgccggtgagtcctgcggcctccttgaactggcgggcctggatcaggccgttttgtccggtggtggcatccagcaccagcagcgtctcccgtgcggcgccggggcattcccggtcgatgatcttggagagcttggcgagctccgccatcaggttagccttgttgtggaggcggccggcagtgtcgcacagcaccacatccacccctcttgccttggcagcctgcagggcgtcgaacagcaccgcgccggggtcagccccctcgtgctggcgcacaagttcgcagccggcccgctccgcccagatctgcagttggtccgccgctgcggcccggaaggtgtccgccgcgcagaagaggacccgcttgccctcgcttttcagctgatagcccagtttgccgatggacgtggtcttgcctacgccgttgacgccgatgaacagcaccacagcaggccgggtcgagagatccagctccgtgccgcccacgtccatctcctccgccagaatgtcccggagggcggccttgaccgcctcctggtcctggagcttctccttccggaccctcgtgcggagtttttccacggcgtccagcgccgtgtccatgcccaggtccgccaggatcagcgtctcctccaactcctcgaaaaaggcctcgtccgcctcggagaagccggagaagagatttgtggtgatctttttcagcttgtcaaaaaagcccatggtatcctcccaaatcggaaatcagcgccggagaggtttatcccagtccaacctgtttccgcagtatttgcagtattcgccgggaaaaagcggcagatgtgccccgcactccgggcagcggatcacgaacaactggatcgcaaggcccgccgccagcagcagtcccccgatcacgcccgcctccggtacaaatacggtcctgctgaggaactgcagaacaaatcccgggactagcaggataacgctcaggatcgtccatctgcgcagtgtcatgagatcgtcctcccaatcgcttcaaatcctcttgcgccgggtcgccgttcactccactttcttgccgcagtatgggcaggtcttatccggtcggagctcccgaacggactttccgcagtgggggcagcgcagcagccaccacactagccccagatccaaaaggaaaatcagcagccctgcataggtcatccatccgccccggaagataaggaggcctgccagcaggcccacccagatgatcagtatctgtttatgcttgcgcttcatggattccgctccttatttgatcttcagctctttcgccatgtcattcagattgatggtcaggatcttgctcacgccctgctcctgcatggtgacgccatagaggacgtcggcctcctccatggttccccggcggtgggtgatgacgatgaactgagtccggcctgccagcgtccgcatatagcgggcgtagcgggtgacgttggcgtcatccagagccgcctcgatctcgtccatcacgcagaagggcgttggatggactttcagaatggagaaatacagcgcgatggccacaaaggccttctcgccgccggacagcagggagatggtcttgagggtctttcccggcggctgggccttgatctcgatgccgcagcccaggatgtcctcctcgtcctccagttccaatctggccgtccctcccccgaagagctcctggaaggtggtctggaagctctcggacagcagcttgaactgctcggcgaaaatcttggtcatctcctccgtgatctcgccgatgatgttctgcagctcgcccttggccttctccacatcgttgcgctggtccgtcaggtaggtgtagcgggtgttcacccgctggaactcgtcgatggccccgatgtttggggtgcccagggcggtgatgtcccgcttcagctccccgatccgccggttggccttgggcacgctctccagctcgatccgctgtgcctgggcgtcggagtgggagagttcgtagtgttcccacagccggtccaggatctgcttttcctccatggcggaggtggcccgcttctggtccagcttggccaccgcccgctccaggttcagcaggttctcgttcatctcctggcccgcccggttcttggcagtccgctccgcctccagggcgttcttctcctctgtgatggcggccagccgctgccggaaggccgcgccccggcccgccagctcctccagcgccgtctgcaatccggcgatctcttcctccgcggcggcgatgtttcggcggtaggtctccgccatctgttccttctgctcccggtcaccagagagatccgcgcacagcgcccgcaggtccgcggcgctgcggactgtggcctcccgctcggccgccagggcagccagatcgctctttctgccgctgatctcctcggccagggcaccggatttctccagcagctccgattggccggaaagagccgcctccgcctgggcccgcgcgtccgcggcggcggattcctgtcggttgatctccacctgggcggcggcagaccgggcgtcgttgtccgtcagccgtccggccagactctccagctcgccgacgaggttctccacgctctcctccagggagcgcagcaggagatcatattgtcccctgatgccctccagccgcaggacctcgtcctctgcgtggcggcgctgggcctccgcggtctccagctcgtattgggcggcggccagttcccgggcggtatcctcctccgcctgctttgcctccgccagctttgcctgcatggcagcggtccgggcggtgagctgctccaactccgcggaccggctcagtacaccggcggaccggctggtgctgccgccggtcatggagccgccccggttaatgacttggccgtccagcgtcacgatccggaaggcgttgcggtacttccgggccatggcgatgccgcagtccaggtcctccaccaccacagtgcggcccagcaggttgtaaacaatattccggtacgccgggtcaaatgtcaccagccgggaccccaggcccacaaaaccaaattccttctccacgcctttttcatggagctcgtcaccccggatggcggtgaggggcaggaacgtggcccgtccggcgtcccgctgcttcaggtagctgatggcggccttggcatcctcctcccggtccaccacaatgttctgcagtcccgcccccagggcgatctcgatggccaaggagtacctgccatcggtcttcaccagattggccaccgggccatggatgccctgcaggccgctctgtgcgcggcacacgaacttgaccgccttggagaagccctcgtactccttctccatctctgtcagcaggcggcggcggttttccagcgcccccgtgtccatggtcagctggacccgccgctccgcggcggcagcggccttcttcttccgttcctccatccgcaggctgtggccggcgatgatgttggcggcggcctccgcctcgtccctggcatcctccagggcgcggcggttctcccgcgcctcctgccgggcggactgaagctgctcctccgcggcggccctgtctcgctctgcggcctcccgccgctcctggatctgcttcttctccgcggcggcggcggccagttccgcccgcgcgtccgcggcggcggccatggcgagggcctcctgtgcccgcaggcgctccgcctcgttctgggcgccgccggcctgttccgccatggtctgggcggtctccagcagggcggccagcgcaccgttcagctccccgatccggcggtcgatctccgccacccgggcttcctgctcctccgcctgcttcgcaaggccgccggaacggctctccgcctctgccagctccgcctccgcccgctggatgttctcccggttgtgggtgacggtgctctccagcacggcggcggcggactccttctccttgatctgctcctccagaacggcggactctgtccggacacgctcagcctccatgtccttctcccgcatccgctcgctgtaccgctccccctcggcatagagggcgtccagagcggcgcgggcctcgtcccgctgggactctgcggcgtgaaagtccgcctccagcttccgggcgcccgccttcagggtgtccaggttctccagccagacggagatctccagaaggcgcagctcatcccggagcaccagatacttcctggccttctccgcctgctcccgcaggggctccacctgaagctccagctcggcgatcttgtcattgatgcggaccagattctcctccgtccgctccagcttccgctccgcctcctccttccggtggcggaatttggaaatgccggcggcctcctcgaagatctcccgccgctccccgctcttggcggagaggatctcatcaatcttgccctggccgatgatggagtagccctcccggcccatgccggtgtccaggaacagctccgtcaagtccttcagccggacagactggcggttgatgtagtattcgctttcgccgctgcggtaatagcggcgggtgacggacacttcgctctcctccatggtggggaagatgtgctccgtgttgtccagcaccagcgtcacctgggcaaagcccacctggctgcgcttctccgtgccgccgaaaatcacgtcctccatcttggcgccacggaggcccttgacgctctgttcccccatcacccaccggatagcgtcggagatgttggacttgccggagccgttgggacccacgatggcggtgatgtcctcgccgaaattcaggaccgtcttgtctggaaaggacttaaacccctggatttccaatgcgcgcagatacaaactctcacctcattcggcctctcagccagatcacatactataactagtatagtatagcaaagccactcccctatttcaaggaaaaatctccaggttcggcggctccagccggagctgggccgttatcctcgaaacagatctcgctttttccattttttcatgttattcttttgaaaaaataacgagtagaggagggagtccgtgcgagaaaaaagcccccggctgatcgtgacgtttcacaccactgccggggccatcgccacagagcagctctgccgccgcctggggctggagggcaaactgatctccgttccccggtgcatcacatccgactgcggcatggcctggtccgcgccgccggagctgcgggagcacctggagacccggctgcaggaggccgggatcgagacagccggtttctatgagctgcccctgtgacgattttcatcccagcgccgaagagagtgaggagtgtatttatgagagaaaagagttggtttcgggaatacggattgatcttggcggcgggcgtggccgtgggcattgccgccctgatccttaccgcctccggcaaccccaagaacatgggcttctgcatcgcctgcttcctgcgggacatcgccggcgccctggggctccacagcgccgccaatgtgcagtacatccggccggagatcatcggcatcgtggtgggggccgcggcggcagctctggctgccagggagttccgggcaaaggccggggcctctcccgcctgccggtttgtgctggggatgttcgtgatgatcggtgctctggtgtttctgggctgccccctgcggatggtcatccggctgggcggcggcgacctgactgccgttgccgggctggtgggcttcatcgccgggatcctggtgggcgtggtatgtttaaagaagggtttctccctgggccgggcctatcccgtccgcatgggcgaggggttcgtcctgtctgggatcctgatggcgctgttggggctgctgctgttggtgcccaccctgctgaagttctctgaggcgggccccggctccatgcgggccttctgggggatctccctggcggccggtctggttgtgggcgtgctggcccagcggagccggctgtgcatggccggcggcatacgggacgctgtgatgctgcgggacttcaagctcctctccggcttcctggccatctggggcacggtcaccattggcaatctggtcctgggatcctacagcctgtccgcactgtcccagcccatcgcccacagccagtacctctggtccgccctgggcatggccctggcgggctggggttccatcctgctgggaggctgccccctgcgacagttgattctggccggtgagggcaacggcgactccgccgtgaccgtcctgggcatgatcgtgggcgccgccgtctcccacaacttcggtctggccggcgcggcggattccgtggcggaggacggcacctatgtggtcggcggcatcggcactgccggcatggcggcggtggccatcggattcgcggtactgctggccatcacggtgacccatttgccgaaaacggaggctgtatcgcgtgattgagcacacaatgtatgaaaatcgtctatcgccctgtcctgacaggcaaccggcgatggcggaaaattttcccattttgcacagggaaaatccttgaatctgtgccgcatatcgcggcgaaaggggaatttgatatggtagatacccgcggatacatttgccccaccccggtgctgatggtgcagaaggccttgaaggatcggcccgccatggtggaagtcctggcggaggccggcgcagcggtggagaacatcacccgcttcgcccactcccagggctatcaggtcagcaagacggcggacggaccggactggaaactgaccctgacgaaataaaagacaggcggggagcccgtaggctccccgcctgccgtttttcctgtcccgcggtttgaggtcaggatgtctcccgctttcctttggcctcctcgatctggcggtagaggcactggagtccgtcagagaggccgcccacctggtcgatgatgcccagggacactgcctcctctccatagaccacactgccaacgtcggcggccatatcgtcctttttcagcatcagggcctggaacttctgagccgtgatctggctgtggctggagacgaaggccacgatccgatcctgaagccgctggaagtagttgtaggtctggggggcggcgatgaccgtgccgctcatgcggaccgggtggatggtcatggcggcgctggggacggcaaagctccgtcgggcagccactgccaaaggcacgccgatggaatggcttcctcccaggacgatggagaccgtaggctttgtcatgccggcgatcagctccgcgatggcaaggcccgcctccacgtcgccgcccacggtattcagcaggaagaggacgccgttcacctcgtcgctctcctccagcttggccagcaggggcagcacatgctcgtacttggtggtcttggcaccgctggcggcggtgttgtggccctcgatctggccgatgatggtcatgcagtacacggagccgtggggcgttttggtcagggcggagccgaagtccacgatctgctgggcgccgtcctttccgctctcgtcattttcctctgtggtgtccgcaggtttggtgcgttctgtcatggtaaaccctccttttccccggtattctctgcaattttatgaaaagtacgcgctggactttctttttgccggttactgtgatatgataaaatatctaaagtatctaatcttctactctggcccttctcaataaggagattcctatgaaacagcattttcaaatcccctgggctcagatcctgattgtttgcgccgctctagttatggcttttggaatggggacctctgttcaggtggagcaagaagcggtggggcaacgggaagccttccgacggagcctgcaaatgctggaccagtacctttgtgccctatctgaggatctgggtgatccggatattcttgccctggaggctcccttggaggatgatcgcattcaggaaaacctagtccgggtgcggcggacctctgttgccctcaaacaggactatgtctccaacgccgggagagagacttccccgcatccccacgtgtatctctatctcttggcactagaggaaacgctattggagagcaattatctggatctggaggcactttctcagatactgactatctgccgttccctgtgggatattgaaactggactttcctacaaggagatcatggcccagctggaggaaaacgtcacctccggggactaccaggacgccttggaactgctggggatcagcgatatgataccaattaccacccaaggaggaacataactttggaacagaacaaacagcgtattgtggtgaaggtgggcacctccaccctcacccataactccggcgcgttggacctttggagcatggaacatctggtgcggaccctggcggatctccagggcatggggcatgaggtgatcctggtgtcctccggtgccatcgctgtgggcaccgccaagctggggctgtccgagcggccgaaggagctgcggatgaagcaggcagccgctgcggtgggccagtgccggatgatgcacatttacgacaaattcttctccgagtacaaccgctccatggcccagatcctgctgacaggagatgatgtggaggacccggagcgggcggagcacctgtccaacaccttctccgccctgctggagatgggggtcatccctgtggtgaacgagaatgactccgtctcctccgccgagatcgagaccggacgccataaggtcctgggcgataacgacaccctctctgccatcgtggcggagctgtgccgggcggatctgctggtactgctcagcgacatcgatgggctgtacgacgcggaccccaagactcacccggaggcaaagctcctacaccaggtgacggagctgacgccggagatcctggagatggccggcggcgccggcagctggcggggcaccggcggcatggccaccaagctctccgctgcccgcattgccatggaggccgggtgcgatatggtcatcaccaacggcagacggatggaagacctgtatggcatcgcggagggaaaggacattggaacgcgatttgtatcggggaaaactaggaattgatggattgcacccccagcggaatgatttgaaattcgtccggatccgccggacccctaaatttccaactcctaattcctctttcaagaaaggtgtgacgatatgacagcattacagcagcagggacaggcggcaaaggccgccacctacgttctggccaccgccgggacggccaggaaaaacgcggcgctgaatgccattgcggacgttctgacagagcggcagacagagtggctctccgccaacgcagaggacgtggccgccgcgaaggaggcggggatgcgccccgccatgctggaccggctgaccctgacgccggaacgggtggcaggcatcgtggacggcgtgcggcaggtggctgcccttccggatctcatcggcagagtggacaagatggaaacccggcccaacggccttatcatcggccggcggcgggtgcccctgggggtcatcgccatcatctttgaggcccggcccaacgtcaccgtagacgctgcggcgctgtgcctgaagtccggcaatgtgtgtatcctccgaggcggcaaggaggccatccgctccaaccgctgtgtggcggagctgatgcgtcaggccctgcggtccgtaggtctgccggaggactgcatctccctggtacaggacaccagccacgagaccgccaatgagctgatgcacctggacggctatgtggacgtgctgatcccccggggtggcgccgggctgatccgggccgtggccaaggaggccagcgtaccagtgatccgcaccggcgagggcgtgtgccacatctatatcgacgatgaggcagacctggacatgggtgccagcatcctcttcaatgccaagtgctcccgtccctctgtgtgcaacgccgtggagtgcgtgctggtccaccgggacgtggcggcggacttctggaaaaaggcccttccccttctggatgagaagggcgtggagctgcgggcggacccggaggccctggagatcctgggcacccgggcggtaccggcagaagacagcgactgggacgccgagtacgacgactacatcctggctgtcaagacggcaggcggcatggatgaggccatcgatttcatcaatgcccacggcacccagcactccgaggccatcatcacgaagaactacttcaaggcccagcacttcctggaccacgtggatgcggcggcggtgtacgtcaacgcctccacccggttcacagacggcggcgagttcggtctgggggcggagatcggcatttccacccagaagatgcacgcccggggccccatgggactggaggagctgaccagctgcaagtacgtcatttacggtgaaggacaggtgcggtaagcgcctgccggaagttaaaacgccaagaggggatggtctctatggcggcgatcattctctccctgctggctgcagcgcttctgtcgaccgtgctgctcatccccgccggacacctgaagcaggcgctgggcatcccgtcggcggtctgttccgctgcggcgatggggctgtacctgcagatgcgcactgtctccggcgggcctggtaccggaatagcactggtgcagctgtaccttccctgcgctgtttacggactggtgatcctgggcggcgcggccctgggtccgacaggatggtgctgcggaaaaaagcgaagctgaacatctgattctgatttgaaaaaagaggttgatgcacaatggcgacatttggttttatcggcaccggaaatatgggcggcgccctggcccgggcggcccgcaagcggctgtccggcggagagatcctgttggcgaaccgctccgccaccaaagcggaggccctggcccaggagctggactgccgggctgtggacaatgcggcggtggccgctggggcagattacatcttcctgggcgtgaagccctatatggtggcagggctgatggagaagatcggccccgtgctggcggcgcggaaggaccggttcgtgctggtgtccatggcggcggccctcaccatccccgacctgcgggagcggggctgcggggactggcccctgatccgcatcatgcccaataccccctctgccatcggggagggcgtgatcttctacacctgcgacggcgtcacggcggaggaggaagcggcgttcctggagaacatggcaggcgccgggcggctgctgcccctggacgaccatctgatggacgccggcagcgccgtggccggctgcggaccggcctttgtggacctcttcatcgaggccatggcggacggcggcgtggcctgcggcctcacccgtcccatggcgatggagtgcgccgcccagacgctgatcggcgccgcgcggctgatgctggagacgggccgccatcccggtgcgctgaaggatgcggtctgttcccccggcggcgccaccatccagggcgtccgggcgctggaggccggcgggttccgcagcgcagtgatggaggcggtcatcgccgcctatgagaagagtgcggagatgaagtgaacggtccgtggccggaggcagctgcctccggccacggcattttttgtccgcctgcgggacttgccagcagacggcgagatgtggtatgatcgttctcccatctttttgacaggaggacatgtatggcacgggacatcatcttgaatctggcaatcagcctggatggcttcatttgcgatgaggacggcggcttcgcatggatcagcggccagggagatgtccgggccgacacggcggaccacttcgacttcgacggcttcctggcatcctgcgacaccatcgttatgggtcgaaaggcttatgaggactgccttagttctctgcccgaagcggcggaaaagcgattcctggtggcctcccggacacctcgggcgccggagggcagggttgtctttctctccgccgatgtggtggcggaagttctggcgctgaaggaccggcccggcaagcacatctggctgttcggcggtggagagctggcctccgacttcattcgcgccgacgccgtagaccggtatatcgtcggcatcctgccggtgatccggggcaagggccggcggctgtttcaggaggggattccgccggtggaactccatctggaccgctgcacggtctcagacggcatccctattctggagtacagccggcggggccggtaaggcagatagacaacagccgcagggagcgttccctgcggctgttgttttgtgatttgagaagatctgacttctgtcgctcaggcagcagcgttggcggcccggtacaggaaggtcacaatctggccccgctggcagacggtgtcgggagagaacgtgctgccgtcaccggtgccgagggtgacgccctgggccacggcccagttcaccgcggcggcgtagtccgcgtcagcggccacgtcggtgaaggaagcggcagcagcctcggggctgtcggcggcaacccacatgaagtacaccgccatggcgcgggtgcagcccgcatagggatcaaaggtctcgccttccaccaagccctgctcactggcccactggacggccttgaagaagtacaggctggtgtccgtcacatcggtataggcgggttccgtgctagcaggctccggagaaccggcggcgcgccacagataggtgatgatctgggcacgggtgcagttctggtagggagagaaggtggtggcggtggtgccgttggtgatgccctcgtccacggcccactcaatgccgtcatagtagggagaggtcgccgccacgtcggtgaaggccaggccctggtcaacagtgatgcggccagcgggctgaccgtaggcctcttcggtgacggtgccctttagctcgtcggtgatgtagtccatgaccacctcatccatggagaggcccaggtcatagttgacggaggcagccgcgaacgcatagtaggtgtcgccgccggcggccatgaagtcgttggtggcgatggtgtaggtggcgttggcatcaaagggctcgccgcccacagtctcgatggtgacgcgctggatgctcttggggccgtagtaggtggagccgggatactgctcgccctggtcataggccttggtggtgtccacggtgaactcgatgccgctcacctgggggaagccgccgatagaggtgggcgtgcagtaggtggaagcctccagagcctccagcagctcggcgccggtgactttcacgatggagagggtgttgccgaagggcagcacagtgttgatatccttcttggtgatgtcgccggcggcgatggaggcgcggatgccgccgccgttggtgacagccgcgtccacctcagtgccctcacgctcggcgccccagaccagagcgtcgcagatcaggtcgcccaggttggtctcctcggtacggttaccgggctccttctcgccgttcagggccacttcggtctttgcaaacaccgtgccgtattccttgtcgatctccgcctggatcttggcggcgcgggcagccacatcagcgtccgtggcggtcaggtcggcaacgggggtagtggcggtggtgatggtgccgtcggcatcgatggtgaccacgcccacgctctccagcttggtgccggtagaggtcaccagagtgtcgcccaccttcccggtaccgccagcggcggccttcacgtcctcaagggtggagtgagagtggccgtcgatgaacacgtcgatgccctccaccttctccagcaggtcgatggagcggttgccggtggactcggcatcgatgcccaggtggcccaggcagatgatgtactcgcagccctctgcctccagtgcgtccacctgatcctgcgcgcagtcgaacatcttatcgccggccaggaaggtcacgccctggatcttggcggggtgggccttggttgcggtctccggggtgtccaggccgaacacgccgatcttggtgccgtcgggcgcggtgaagaccacgttgtcctcaaaggccacctggccgttgtacaggacattggcgtccacgatggtgaagtcggcgtccgcctccagatccttgaggttctggtagccgtagtcgaactcatggttgcccatgctggccacgtcgtagccggccaggttcatcagctccacggcggtggcgccctcagacgtgctgacggtgggatcgccctggatgaagtcaccggcgtccatcagcaggacgtaggcgccgcgggcctcgtaggcgtccttcagcgcggccactttggcatagccgctgatggcgccatgcacatcattggtgtgcaggatgacgatgtcgccgtccagatcctgtgccgtctcttccgccgcattggcggtgacggccagggagaacgtcatgaccaccgccagcagcagggacaagactttctttttcattctgttacctcctctgaaagcgcgggagatgacctcccgtggtatggatatagtatagcacatctggaaaaaatggacagaggggacttcgcggatttttcgaaaaaaaccaccagaaatatcccacgttttttgtagaagaagcgcaatttttttctacccgcacttctggcattcccttgcggcgggtgttatactgaaaaaaagcgtctgccggagcttcccggcagcctgccgccgggcggccgcatcgtgccgcagacacacaaggaggtatatttatgaccacattgctcaggggcgggaccatcatcaccggtgccggacagcggcgggccgacctgctgctggacggggagaagatcgcctgggtgggccggggacctcaagccgcagaccgggaggtggatgtctccggctgtttcctcttccccggctttatcgacgcccacacccactttgacctggatgtggcgaacaccaccacggcggatgatttctgcaccggctcccgggcggccctgcggggcggcactactacggtcatcgacttcgcctgccccaacaagggcgagtccctgcaccacggcctggacctgtggcatcagaaggcggacggcaggactttctgcgactacggcttccacatgaccatcgacgactggaacgagtccatccgggcagagctgccggacatgttcgcccagggcatctcttctttcaagatgtatctcacctatcccgccatgatgatcggcgaccgggacatctactgggcactgaaggagctgaagcggctggggggcatcgccggcttccactgcgagaacgccggtgtcattgacggcatgatcgccgagcggaaggccgccggagagctctcccccgcctcccacccccgcacccgaccgccctatctggaggctgaggcagtgagccgcctgctgcggatcgcccaggcagcggacgcgccggtggtcatcgtccacctcaccaaccgggaggccctgctggaggtggaccacgcccggaagcggggccagaccgtgtatgtggagacctgtccccagtacctgctgctggacgagagcgtgtatttcaacgaggactactccgccgctgcccggtatgtgtgcgcgccgcccctgcgggacaaggccgagcaggagcacctgtggaagggcctgcggcggggcgctatccagaccgtgtccacagaccactgctccttcaccctggcccagaaggacatgggccgggaggacttcaccaaaatcccaggcggcctgcccggcgtggagacccggggcgagctgctgtactcctacggcgtggccaagcggaagatcagcgccgcccagatgtgccgggtgctcagcgagaatcccgcccggctgtatggtctctatccccggaagggcgtgctgcggcccggcagcgacgcggacatcgtggtctacgaccccggcgccagccatgtgatccgagcggaggactgcgtggccaatgtggactacaacccctatgaaggcttcgtcaccgccggcggcatccggcaggtgtggctgcgggggcagctctccgtggaaaacggaaaggtcctggtggaggcgccggcgggcaagtatatggcccggggcaagaactccctgtgagcattcgtccatgaatctcgtcatcatcgggcgcttccctgcggccacagacacgcagatcagggcattccttcccgctgaccgggaggtttttatcaccgaatcggatctgtccggcccctttttgcagagtgcggatgcgctcatcccggaacacatcccgattccctcttttggggacaaggctctgaagctgcggatgattcaaaccggggccgggtatggcgaagatagagccgtctgcttttctggtcaacatggccaagagggatcgttcacgaagaggtcctgatcgaggctttaagcgaccatcagatcgccggcgcttgcccggatgtctttgaggcagagccattttcccaagcaagctggctgagggcgctcctcaacgtaatcctcgcgccgtacacagcaggggatcctggcggcgtgaaactgcacgaaaaacaggattcctttttcccagtagcatccggcaggcacggagcggagaaatgcccgccaacatgctgaaccgggacacctggaaggcgtggagataagccccttctgcaggtggacagcccatagacgtaaaagagctgtgcgttcaactgaaaaacaggcgtctgcctcatttggaatgaggcggacgcctgttctgcttttcatgcgtttctgttactcttctgccagtccctcccactggacatccacgatggtgccgccggagaactcaatgtactcactcttcaaaatataatccgtcttgccgatccggacctcctggtctcccaccttggtggtcatgacctcgccggcaggcgtctccgtggtggcggtgaagagcagcgtcacatgctccggatcctcgatccactgcccatcggggcccagcacgtagtagggctccatctccacgctctcaatctggccgcccaccagagcgccggaggccatcagcggagagggcagatgggcctggcaggtctcgtacagctccgtgggcacaccctcgcacttaaccacataggtcaccttcaccatgccgccgtcctcggcggcggtgccgccgctgctgcccagcagcttccaggctccaaaagccaccaccgccacgatcaaaatcacggcgatgatgtcgatgatgttgaactttccaacgcgttttgctttctgttccatggtctcctccgtaaaaggcgcggacgcgcctgtatttggcgtttgtcgtctggacaatatctggttcgtattgtataatatttctcgcgatttcacaacccctatttgcggaaagcggaaagaaaggcattccatgaaggtcattcatctcatcagcggcggagactccggcggcgcaaaaacccatgtgctgagcctgctgcaacatctgaatcaaaccatcaccgcccagctggtgtgcttccgggacggcccctttgccgaggaggcccgccagatgggcattcccaccatgatctgcgggggcaacaacgtcttccgcacccggcggaagctggcggcctatatccgggagggcggctacgagatcatccactgccatggctcccgggccaacatgatcggcgccatgctccgcaaggtcacgggactgccggtggtgaccaccgtccacagcgactaccgcctggactacatgggccgccccctcagccatctgaccttcggcaccatcaacgccctggccctgcggcggctggattaccggatcggcgtgtccgacgccatggtggacctgctgatctcccggggcttcccggcggaccggttctacaccatctataacggcatcgacttcacgcccccgcccacccagggggaccggctggagtacctgaggagcctgggcgcagatgtggacgagaactctgtggtggtaggcatcgccgcccggatgaatccggtgaaggacatggccactctggtgcggggcttcgccgcgggccacgccaagtgcccccgactgcggctgctgatcgccggcgacgggccggagaaggacaagctcaccgccttggcggcagagctgggcgtagagcggcaggtgtgcttcgccggatggatctccggcggcatggaccggttttacagcgccctggacatcaacgccctcaccagcctgtccgagaccttcccctatgccctgacggagggggcccggttccatctggctaccgtctccaccgccgtgggaggcatcccctatctcatcgaccaggacgtgaacggctatctcttccagcccggcgactggcaagccctgggcaacgatctggccgccctgggcaatgacgatgaattgcgccgccgcttgggggaaaagctctatgaaaaggcgtccacccagttctctattcagaagaccgtgtccacccagctgcagatatacgcctccatcctccgccgccaccggcggcgctcctccgcccgggacggcgtggtgatctgcggcgcctacggccggggcaacgcaggtgatgacgccattctggaggccatcctccaggagatgcgctccatcgacccggacatgcccatcaccgtgctcagcaaggatcccaggagcacccggctcacctaccgggtgcgggcggtgcaccgttccaacttcctggcctggcacgccgccatgtggaacagccgcctgtacatcaacggcggcggcagcctgatccaggacgtgacctcccgccgctccctgtggttctatctggccaatatccgggcggcaaagcgggcaggcaaccgggtacagatgtacggctgcggcatcggccccgtcacccgggagagccaccggagtctggccgcgaagatcatcaacaaatatgtggatgtcatcaccctgcgggagccggactctttggaagaactgcgggccatgggggtgacggagccggaggtcctgttgactgcggacccggcgctgatcctgcagaaggccccggacgacgagaccgacagcgtgctgctgcgcgccggtatcccgccccacggcaattacctctgctttgccctgcggcggtggaaggggtttgaagagaaggcccccctcttcggcgcggcggcggaatacgcctaccgcacctatggtctgacgccggtgttcgtggcggtggaaaagcatctggaccccggtgcgggccagctggccgcccgcgggctgacgatcccccactatttcctggacgatgccggcggcgccgggaccatcatcggcgccctcagccggatgcaggcggtggtgtccatgcggctccacgcgctgatcttcgccgccgggcaggggatccccctggcgggcgttgtctacgaccccaaggtctccgccttcctgcggtatatcggacaggagcagttcgtggatctggcagagctgaccgggcagaatctctgcgccatgatggaccagtgcgtagcccaggcggcccacccggaggcccaggccgccgccgtgcggaacctgcaggccatggagcagaagaatgtggaggtggcccgccgcctgctgaagggttgacggggccacctgttggaggaatctatgaaaattatggtctatgaggcccgcccggacgaacgggcggacctggagaagcaggcggcgctccacggagtggagctgtctgtcacagacgcggtgcccacactggagaacgcctctctggccgccggctgcatcggcgtgtccatcctgggccaggggtgcatcgacgcggccctgctggatgcctatcacgccctcggcatccggtatctctccacccgcaccatcggatatgaccacattgacctggaccacgcccgatccatcggcctgcgggtgtgcagcgccagctatgcccccaacggcgtggccgacttcaccgtcatgatgatcctcatgtgcctgcggcattacaagcaggctctgtggcgggggcaggtcaacgacttctctctcaccggcctccagggccgcgagatgaaggatctgaccatcggcatcatcggcaccggccggatcggcgcccaggttgcccgaaatctctccggcttcggctgccggattctggcctatgacctgcggcgcaatccggcagtggaaccccaggtcacctatgtggacttcgacacccttctggcccagtcggatgtcatcaccctccacatgcctctgctggactccaaccgccacatcatcaaccgggaatccatcgccaaaatgcgggacggcgtggtaatcgtcaactgttcccgcggcgagctggcggatatcgaggccctgattgaggggatcgagacgggaaaaatcggcgccctgggtatggacaccgtggagggggacgagggcatcatccacgccgaccaccgggtcgacattctgcccaatcggaactggttctatctccaccagttccgcaatgtcatcatgacccagcacatggccttttacaccgatgccgccgtgtccagcatggtggactgcggcatcggcggcatctgtcagatggccgcaggcgagtcctgtcccactgagctgacaggcccggtacagtaagccgctacctcccgccgcgggtccggcggcgctggacggagatcgtctccagcgtctctcccagctgaaccagcagcgccgctgtcagctccaggtcctcgtcgttcagccgggcagccagagagaccgccagggtgttgacagcggtggtcagggccagcggatcacaggaaagttccatcatcgcatcaccgctctcattctatgcctgagcggagccattcatcctgctccgccggtgtgaacacattttagaaagggacggccgccctgtgagcggccgtccctttttccaaaatgcacgtgctcaatccctctccgtctcttccccgcctccctgctggaaggggggcaccggctcaccggcgtgataggcgttggtgcggacattgatatactgggccttcagcttggagtagacgatggtctggctggagtacagcccattgtagccggagagcatgtagctgatgccgcagatcagggcaaaatacagcagcccaccatccccgaacagctccacggacaggaagatggaggccagcgggcagttggtggccccgcagaacacagcggccagccccagcgccgcggcgaagccagccggaatccccagcagcggccccgccacacagccgaaggtggcccccacgaagaaggagggcaccacctcaccgcccttgaaccctgcggagagcgtcaccgcggtgaacagaatcttcagcagaaacgcctccggccgggcagtgccctgctccacggcggcggtaatgagatccatgcccgcgccgttgtaatcccgggtcccgcagaggtatgtcagggcaatgaccgcaccgccaccgacaaggacgcggagccaggcattgggcaggcgcttcttcatctgatgctccgcgaagtgcagggtccggcacagcagaacggacaccagggcgcagcctacgcccagcaccgccacccgcagcagcatcagcttctccagctccggcgccgccacagaaaagcgggtgggcgccacccccaactccacagaaatccagtaggccaccagggaggcggtcagacatggaatgaacgccacgtggtacaccacgccgatgctgatgaccacgatggcgaacaccgtggcggtaaggggtgtgccgaacaaggcggagaaaaacgccgccatgcctgccatggtggcggtgcgcaggtcccggtcatccagattgaaaaggttccccgcatggcggccgatggtgccgcccatctggagagccgcgccctcccgtccggcgctgccgccgcacaggtgggtgagaattgtccccaggaagatggcgggcagcagccagatggacaggggctttccgtggtgtaccgcgtcgatgatgtcgttggtaccctggccctccgtctttgtcagcttgtagaaggccacgatcaccagtcccgccgccggcagacaccacaacagccagggatgttgctcccgcagctctgtggcccgctccacaccgatgtggaacagggagcccaccacgccgcagcagacgccggtgaccagcgccaccgccagccacttggccatggcctggacgtaaaggcccacgcgggtgtggccatgctccttttccaatccgttcacttcccttccccgccgccgaagggcgggccgtgcttgcaatggaaatattatacggcaggccgccgttctttgcaacaggcatggtgcgccacgcgaaaagggccggtccgaaaatcgggccggcccgtattgtcaggcagactcaatcactttgcagcagcctttttcctgccccacatcttgttgccgtccttgtcccatataccaaagccggagaaggcgcagaggatggagaagatgggtacaatgaagatgaaccagcaatacgggatatactccgtgccgcagcccagtacctccatcacatacagcgtggcaacgccccaggggacgatgggtgcactcagggtccccgcatcctccagcgtccgggagaggaccctgcggtggatgcccatgcggtcgaaggcgtcctcgaaggtctgctcggtgacgatgatggccacggtctggccgccggccgtgaggaagttgacgatgtagcagtagatcagagtgacggtcaccaggacgccgcggctcttgatgaacttcagcagcacgtccttggccagcacgtccaggatgccggtggcggtgatgatgccgcccatgacgctggctaccatgaaggtgatcagcagaccggtcatgctggtaatgccgccgcggttgagcatcgggtccacaatgtccacgccggtagacagtgtgaagccgttggccgcatagttcatcagctccacaaagttcactccctgaaataccatggcgaacacgatgctgaccaccacagtgaggcccatacccagcagggccggcagcttgaacaccgacaccagcagcaccaggatggcgggcaggatcaggatgggattgaggttgaagtgctccgccagggtgtcgcagatcaggttggcgcgagtcgtatccatctcgccgccgctatgcatcaggccggcggcggtaaacagcaccagcgccaccagtgcagcgggaatagtggtgtacatcatggacccgatgtggtcatacaggggaaccctgctgacaccggaggccaggttcgtggtgtcggacagaggggacatcttgtcgccgaaccaggcaccgcagaccaccgcagcaatgaccagcggtaccgggatggaagtagtggaggccacgcccaccagggcaatgcccatggtcgccacgctgccgaaggaggttccggtgaactccgccgtcagcccgctgaggacgaaggccaggggcaccaggattttcggggagatcagcttcatgccgtagtacatcagggccgggaccgtgccgccggccatccagatgcccaccagcatgcccaccatgatgacgatcaaaaatgtcgggatgcagtcggacaccactcgcaacagcgtcctttccacatccgcccaagggatatccagcaggagcgcgattaccacggcgatcagggccgcgatgaacacggacatagtggtgtccacgcccaggttgatgagcgccaccagcacggccacgatcaccaggaaggagatcacggcgaaagccggagttggggtcttccgcgtcttgactgtctttgtcttatccattctcgtttctcccttctagattgtacggcggcgcgggaccgcgcccgcggcgccgcaggagtcctccgttcagcccagcagctcccgggtcaggaatgccagagccgagtccatccgggcggcccgaaacgcacaggatttgaatcggtgctccgcgccatggaccaccaggaattccgcccggtctccatagatctccttgtaccgctccgaacagtggatggaggccgtcacgtcctcatccccgtgtaccagattcacgcgcttggtgaatttggccgccacggcgtaaggatccagctccaaggcatcctgatagaagcccaggcccacccgcaggccctcgtagtctgcgtagcccttctcctcgatgtcagacacatccacgccgcagagcatcttgtgcttcatgttgtagaccacgtccggcgccgggcaccacaggctcagggcgcacacgtccgcatcccgcaggcccgccaccatggaggccacacatccccccatgctcaggccgtggatcgcgatccggctctggtccacaaagtccagactcttgacatagtccaagatggcaaggccgtcttccacctcactggagacagtcatgtcctcgaaccgcccgtcgctgtcgccgctgccggcaaagtcgaaccggacactggcgatcccccgctcacacagcctgcgggagagctccgtgtggacgaagttgatctcgttccggtcgtcgcagaagccgtggaacaggatcacaaagggtactttccccggccgctggtctggcacatgcagcatcccccgtagggtcaggccgcggctctcgcactccacataccgttccatctctcttcctcctttctccgcaggcaccgttccgctggccggcccccgcttggtttctgatctatgcaaagccgctccgcggcctcacatctcactcaggcctcctgccggaagcagcgcccctccacccgggcgcccaggcggctgaacagctcgttggtaatggtgccggcgttctccgccagctcctctgcgtagatgacacagtccccctggcggccgatgaacaccgcctcgtcccccacccggacatcttcaatgccggtgacgtccagcatcagctggtccatacagatccggccgatgccctgggcgtactgtccccggacgatggcccgcagctttccgccgctgaggcagcgggggatgccgtcggcgtagccgatggagacggaggccaccttggtgggccgctccgcccggaagatccggccgtagctcaccgtctccccgggtccgatctcccgcacagaggtgatccgggccttcagggtcatgaccggcatgggctgcaggtcctcccgcaggtagtccgccgcgctgctcttgacgccaaacatcaaaatgcccaggcgggcgtagtcataggcgtactccgggtagttcaccgccgcatagctgctcagaaggtgaaccgtccccagctccacgccccgggcctggagggactccaccacgcttttgaaggtctccgcctgccagcgggaaaagtccacatgttcctcctcgtccgtgtccgccacgcagaggtgggagtagatgccggtgacctgcaggatgccgttctcatacacccgccggatggcgtccaggtcctccggcaggaatccgatgcggtgcatacccgtgtccactgcgatatgtaccttgaggcgcacgccgttctcccggcagtaggtctccagctgggcggcgtggtccgggcaggtggcggtctgggtcagcccgtgctctgccagcaggtggaaatacgcaggggcgctgtatcccaggatcaggatctccccctggatgccggcctcccgcagctggaccgcctcgtccagcgtggcagtggcaaagtggcggatgcccagctcccacagctgggcggccaccgcccgcgccccgtgtccgtaagcgtccgccttcaccacgcccatgatccggcagcccgctggcagaaggctctggtagcgccggatgttgtgggccagggcctccctgtccaattcaatccaagtccgattcatctatctccctgccgccgcagtgcggcggcgctcccttcccaaaattcttgatcccgtcaagaggtcataccaatggcaatttttttcagaatacccgaagtctgccaaaaaagcaagttttctgcaagtttttttgtgcccctaaaactttttacgggctgtccgccgtcctctctcacaggcggactcatcccgcttttccggttgattctttccaattctgtgctatactggaagaggaaacagacagatgtctgcgcgccgatgcgaaaccccagaacaaaaagtttggaggaaatgagtatgaaatacggacgtacctataatttctccgccggacccgccatgatgccggaggaggtcttggaggagatcgccgccgagatgatgaattaccggggcagcggcatgtgcgtcatggagatgagccaccgctccaaggtctttcagcagatccgggacgaggccgaggcggacctgcgtcagctgatgggcattcccgacaactacaaggttctgttcgttcagggcggcggcaccgtgcagttcgccatggtgcccatgaatctgatgaagaacggcgtggcctgctatgtggagaccggcaactggtcaaagaaggccatcaaggaggcccagaagtacggtgaggtgaagatcgtcgcctcctccgcggacaagaacttctcctacatccctgactgctccgatctggacatccccgacaacgcagattacgtctatatctgcgagaacgagaccatcaacggcaccacctatttccatctgcccaacaccaagggcaagatcctggtgtcggatcagtcctccatgttcctctcccgtccctgcgatgtcaccaagtacggcctgatctgggcgggcgtacagaagaatgtgggtcccgccggcatggcggtggtcatcatccgggaggacctgttgcgggaggacctgccccagttcgtgcccacttacatgagttacaagacccatgcggacaatgactccctgtacaacactcccaactgctgggccatctactgctgcggcaaggtcttcaagtacctgctggcaaacggcggactggaggccatgaacaagcgcaacgaggaaaaggccgcggtgctgtacgatttcctggaccagagcaagttcttcaccggtgctgtccgcaaggaggaccgttccctgatgaacgtgcccttcgtcacccccagcaaggagcaggatgccgatgtggtggccgcctccaaggccgccggcttcgacaacctgaagggccacaagagcgtgggcggcctgcgggcgtccatctataatgccatgcccaaggagggcgtggaggccctggtggagttcctgaagaagtacgaggcagagcacgcgtaacggctttccatggaggacctgctcccccatggaggccccccgtcagtctgcagactggtgaacgccgcccaaggcggctgagtcggggaattttgggcaggtacacgccctgcggaaaaggattaaaaattcttcttttgcctccggcaaaagaactggggaaaccggcgaagcgccgccagcggtctcgaaagcgagccgatttcgagaccgcggcgcgattggcggcccaaaagggccgggaatcgcaatgccgtaacggtgtagcccccacgatttctaccagcccccttccttttgtgcgggtgggagagcgagtggaacacgccaggcgtatctccactcttcacgctccacatcttcactccggtgaagccagagaggcttcgccttcccccttcctgcgatggagtccggagcgtcaggcagactgccgtacgcgcagctcctatctctgaactccactctcacggaggcgcctgtcccccaatgggcgtttggggtttccgacattggcacccctggggtgtgccggaaatgtatgaaaaggggtattatatatggcattaagagttttggttaccgatgggatggatgctggcgcaatggaacagctgcgcaaggatggatatgaagtcatcgagcagttctatgagcccgatcagctgggcgcagccctgcgggacttcgacgtggttatcatccgcagcgccaccaagatcaaggagccgcagatcgacgccgccgcaggcagccgcctgaagctcatcatccgggccggcgtcggtgtagacaacatcgcagtcaaatacgcagaggaacacggcatccaggtgaagaacacgccccgcgcctcctccaacgcggtggcggagctggctctggccctgctgttctcctgtgcccggaacatctccatcgcgggccacaccatgcgggagaacaagtgggagaagaaagcctactccaagggctttgagctctccggcaagactatgggcgtcatcggctatggccggatcggccagttggtgggcgccaagggtcaagccctgggcatgaatgtgctgtccgtggtccaccgcaacaagccggagggctgcgagtgcgagaccatgcactttgtcactatggacgagctgctctcccagtccgacatcgtcgtcctctgtgcccccagtggcgacaagcccctggtggatgcggagtcccttgcgaagatgaaggatggcgtggtgatcatcaacgtctcccggggtgccaacgtgaacgaggccgccctgctggacgctctgaactccggcaaggtcaaggccgccggtctggacgtgtggctgagcgagaaggatcccaactgggccctggcctcccacccggctgtctcctgcacgccccacatcggcgcaggcaccaaagaagctcagaaacgcatcggcgcggaattggtggacattgtagagaacttcggctgatcagtattcccggtcaaacggcccctcccgtgaaaacgggaggggcgtttttctgtgccgtctttccgattttttctttttccgtaaattgttcctatatttttataattttttaactgccatctctatttacttttcaaagttggcagtgtataatagggaccatacaatcgcagaacagaaggtgatggcttgaggcaggcagttgtcccgtcccagtatctgcagatcgctttggatctggctacccgcatcgcccaaggtgagttgacggagggcagccggatttacggtcggtcggtgctggcgtcggagtacggggtatccccggagacgatccgcaaggccctgcggctgctggcggacatgaaggtggtggatgtgaagccccagagcggggctgtagtcctctccgccgacagcgcccgccggtacatcgaaaacttctccgaggatgcggacatccattccctgcgcctccagttgaaggcgctgctggcggagtccgccgaggtgaaccggcgcatggcggacaccgtgtcggccctggtaaaagggcaggacacatttgctgcggccggtcagcccctccccaactatgaggtccctgtccccaaggactctcctctcatcggcaagagcatcggggagctgaaattctggcagtccaccggcggcaccatcgtggccatccggcggggccagacggtgatcctctcccccggtccctatgccgaactgtacagcggcgacgtcatcatcctggtgggaagccccagcgccgcagaggccgcccaccggctagtaacgacaaaggagtgaaggcagcgatatgatccagtttgaacacgtctccaagagctatggcaagaccccggtcctcaaggacctgaatttcaccattccagacggacagttcgtggtcctgatcggcccttccggctgcggcaagaccaccaccatgaagatgatcaaccgcctgctggagcccgattccggcaccatccgcatcgacgggcaggatatccactcccaggacaaggtggagctgcggcggcatatcggctatgtgatccagcagatcggcctgttccccaacatgaccgtggcccagaacatctgcgtggtccccaagctgctgaagtacgacaaggcccggtgcgatgagatcgtccaggagatgctgcagctggtccacatggagcagtctgccaacaagtatccttccgagctctccggcggccagcagcagcgcatcggcgtgctgcgggccctggcggcttctccccccatcgtgctgatggatgagcccttctccgctctcgatcccttgactcgcgagtccctgcaggacgaggtgaagaacctgcagcagaagctgaacaagaccatcgtcttcgtcagccacgacatgagcgaggcgctgaagctggcggacatcatcatcttcatggccgccggagaaatcgtccagatggcctcccccgaggagatgctggagcaccccgccaacgatctggtccgcacctttatgggcaaacacacgccggacaccgccccctccaaagtggagagcttcatgcgcaccaatgtgttcagcgtccggaaggaccgcggcgtgctggagtgcgccgagcgcatggcccgaggcagcgtggacaccctgctggtcacagacgagcagaaccggtacttaggcaccatctccatcggcgacatccgccactggggccgggaactcaccagcatcgagcctctgatccgccagactgcccggaccgtccgggtgggggacgaggccaaggagagcttcgactacctgctagactccggtgccaactacgtggtggtgctgaatgcggatgacaccatcgccggtatcgtcaccaagaccagcgtggcccgcagcgtggcggagaatctgtggggtgattccaaatgatgacgctgatccaggactacggcgccgacctgctgcgggccatcggactgcacacgatatatgtgctgatctccgtggtcatcggctttgcggcgggactggtgttcggcatcctcctctcccgaatcccgcggtggctgtcgggcatcatcatccccattctctccatcttccagaccattcccggcctggtgttcatcggcgtgctgttcatctggtgggggaatatctatcccacggtgatcgtggccctcagtgtgtacgccatgttcccagtgctgaaaaacacctacaccggcattctggaggtagagccgaaatacatcgaggccgccaagggctgcggcatgtcctccttccagacgctggtgcgggtggagctgcccctggccatgccggtcatcatctcggggctgcggatggccgccatctacaccgtctcctgggcggtgctggcctccatgatcggcctgggcggcctgggcgactttgtgtaccggggcaccagctccaacaacaacacgctgattctcctgggggccatcccggcggccatactggccgttctcttcggactggtcattgacctgctgcagaaaagggtcacgccccgcggcctgcgaaaggaggcgggcaaatgagctgggacctgatttttcaacatctcttcatcgttctggcggccagcctgctgtccatcgccgtgggactgcccttgggcatctgggcatacgtctccaagaccgcccggcccgtcatcctgcggattgtggacctgctgcagaccattccctccctggcccttctgggcatcatcatggtggtgctggaccccggcaagctgacggtcatcaccggcatcacgctgtactccctgctgcccatcgtgcggaacacctgcttgggactccaggaggtggacccgggtgtgaaggaagccgcccggggcatgggcatgagcaagccctaccgggtgctgatggtggagttccccctggccttccccacggtgttcaccggcatccgcatcgcggtggtaaacgccatcggcactgcggtattcgcagctttcgtgggcggcggcggtctgggcggcgtcatcacccaggccatccggatctccgatatgtccctgattctggcggccaccggcgtccttatggtcatcgccgtggtgctggacctcatcatgagctggttcgaggggcagatgcgcaagagccggggcggctccaagaaaatgtggatcccggtggcggccatcgtactggcgttcatcctgctgctgccctatggccgcggcggcaccggcgacattcttctctatgacggcgactactccgaaacccagctgatgcaccacatggtaaagatgctggtggaggaccagacggacctgaccgtcaccattcaggatcagatgtcccaggtgaacaactggaactccctgaaggatgacagccacacctgcgacctgatgatctcctacgacggcacgatcctcaccaccttcctgggccaggacacggtggacgttccggagggcatgacgatctacgactacgtccagggcgagctggacagctacggcctcacccagctggagcagctgggctttgaaaacacctacgccatcggcgtgccccaggccctggcggacgagtacggcctggagaccatcagcgacctcatccccattgcggaccagctgaccttcggcgcggagcaggagttcttcaccctggagggcagcatgaagtatgacccctttgtgaagttctacggtctgaatttccaggacgcggtctctgtggatatgggcctgaagtactccgccattgaaaacggcagcttcgatgtggcggtggtctactccaccgacggcctgaacaaaaaggtcgggctgaaggtcctggaggacgaccagagcttcttccccgactacaacggcgtctttctggtgcgggacgatctgctggagaagtacccggaggtggcggacattctgaaccagctggcgggcaagatccccaccgagcagatggcggagctgacctaccaggtggacgtggagggccgcactgtggatgaggtggcccgggagttcctggtgagcctggggctgctggaggcctgatccccgctctctttcaaaaccgctctggagcgtccgcgctccagagcggtttcctttggaaaatttccacttctttgcaaccggcatcacgttttctcgtctatgttggtgagagaacctccggccgcgggctggagacaggaggaggatcccatgaatctgcaaaagcggtacttattgatgggcggagccgtgctggccatcctgctgacgctggcggcaggactgctgttctggggccggaggcccttccggggtctggaggcggcggacatcgccgcagccaccgtcctggtgggccccccggatgtgacgctggagctggatgccggggagatcgagaccctggcggatctgctggcagatgtccgcatcacgcggccggaccagtcctattcggagtatgccggacagaccgtcctgttcacggtgaccatggctgacggcacagctgcgaacgtcacggcctacaacccgtttctgattatcgacggcaccggctggcgcaccgcctatgcgccctgcgaggcgctgaaccgctttgccaacgagctgctgcgggagagaggaggataacatggaggacacggagatcatcgacctgtactggcagcgggatcagcgggctattgacgagacccacggcaaatacggcggcttcctggcggggattgcctggaacatcctccgcagtcacagcgacgcggaggagtgcgtcaacgacacgtatctgcgcacctggaacgccattcctccggcccgcccctccgccttccgggcctggctggggcgcatcgtccgcaacctctctctggaccgctggaagcagagccgcaccgccaaacggggcggggacggcatggaggtgttgttgggggagctggatgactgtgtgccggagccccacggaaccgagaagacgatggaggaccaggaaatcgcgtcgctcatcagcgcgtttctgcggcggcagagtccggagagccgcatcatcttcctgcggcggtactggtacgggcagagcgtggcggatattgccgccggaatgaactgcggagaggggaaggtcaagtcctctctcttccgcacccggaaggccctgcggacctatctggaacaggaggaggtgtttttgtgaaagcggagcggttgtttcaaatcctgggtctggtggacgaaagcctcatagaggaggcggacaccgcctcctcccccgccgctgtacagcggcggccctcatgggttcggcttttggccgcggccgcatgtctcgcggtgatctgcgccggggcgtggggactgtggcaatcgaatctgggagcgggcaccggcagccccggagatgccgcgctggccggtggagaatccggcggtgacggccacagcccgggcactaccttcctgtcctacgccgggccggtctttccgctgaccacggcggaaacgaacacccgcctgaccgcagggcggaccgtcacctgggattttgcccccggctcctatgaggatggatccccccgacagtggggggcccaggtgacagacagctacacgctgaccaatcctgctgacggcagtgtgacggtcaacgccctctaccccgtctccaccagctggctggactttcccgagctgaacgctgctgtcaccgtggatagcggggggaccggtttctctgtgctctccggcggctacgccggaggctttcaggacgccggggagccggacggctccacctggaacctggccccgccggacgaatgggccgattatcaggcacttctggcagacggagaatacctgtcccgggcgatggaggaaactgctgccccggaggtcccggtgactgtatatcagttcacggatttcgccgcgccccatgaggaatacaacgccgctacccaggcggtgaccttcactaccgacccagaggccaccacagtcctctcctacggcttcaacggcatgagtcgggatgcggaccggggctggtgccagtacagctatttcgttcccgacggtgtccggagagagacggaaacaaaaattctgatcgtcctgggtgatgacatcggcgattatgtcctccaggggtatgccgacggcggctgtgaccaggagatcgatggggtgtcctgcaccgtcacccgccgggagaccaccttggccgatgtgctggacctgctgtgccgggcttatcaggcggaatttgagcagttcagcctgggccgcgggcaggaaagccccttccggtatctctctcaggcgcagtaccagggattggtgtggcagctgctggagcagtacggcctcttctccggcacccccaaggaccggtacagcgacggccgactggatgagatcctgatggaagccctgtcccaggagcgggtgctgtacctgtccttccccgtcaccgtcccggcaggcggcagtgttactgtggcggcttctttttggaaggcacccagctatgactacggctgctctggttcggagaacgtgggcctccagggctatgatctggtgacggccctgggatccacgctggagttcaccggccagaccgccgccctggtgaacacggacaccattgagatcgtccggcagaacctgggctttgatctggaaaacggtgttacccaggtatcgctggatctggcggagcctcactactatctggaaatccgtcctctggagggataatcacaaagacgcgcctatggaagttccacaggcgcgtctttggcatcgttcacttcttccggccccgtatccaggccgccagaagcagccccgggagggaggccgcgaggactcccagctccaggatctcctgaccccctgtgcgttcagcaggggactcttcctgaacgggcagcgaatctggtcccatctccgcatcagccgcatcggcctgccgtgcctcccaagcttcaagggaggccgatttcaacacagcaggcggcggggcatccgctgcccaggccggggacggggagggcatccggacctggtccagcagcttttccggcgcagcggggctccggtccggtgacgtctcccactccgggagaaacccggcgctggggaactgccacagggagccgtccgccaacaccgccagggtccggtcgctgcaggggacggcacaaaccacaccgttcgtgatccgcacaatgccgtcacaggcctccgtgttataggggtcctccgggtccaccagaccgtcccgcagcatggccggacggtcgctgccccaggcccagagagttccgtccgccgtcacagcggtacatctggtgaactgcaccacatcctccagcagtttttccggctggcccagggactgccactggactgtatccgacagattattctcccagggcacacgccagagactaccatcctgcccctggaccagcatggcagggtcctgaattccgcagtacagactgcccacagcggccacatgttccatcaaaggtgccgcggtacaggtatccccgtcaaaccagacccgcaccagcgtcccatcctccttcaccgccaaatccccaaacagctgaaccacctggtccagtacctgggtgggcggatagtagggatcatcctgatgttcctccagggacactccggaccgggcgccccaggtccacaccgtcccgtcagcgcacagggcagaacattccgtctccccgactgatacggacaccacgtcctccagcagccggtacggctcctcctcgccgaaggtccggcccgcgtggccgccccagccccagagggtcccatcctcgtcaatggcggcggccgtgataaaccccgcgtccacataccgggcattctccagcaggacattggcctcctcccagggcagcgggtcctggtccgtggggcccaccgcgccgtggaagctgtctccccaggccagcagggcgccgtccgctcggatagcatagtaagtgtatccgctggtggcaatgggctggctgattgactccagcgccgccgctgtaccggccagcagcatggccgaaagaagcccgcaggcaagtattttcatatccgccgcctcctttttcccactgtaccatacagcctatccaaaaagcaagccccgcaccgtcccggcgcggggcttgtcctttatttctcgatcttcacaaatttctccgccggggcgtgacacaaggggcagcggaaatccggcggcagggattctccctcatagacataaccgcagacagtgcagcggtagccgttgatctctaccgtgcggtacacggtggcagtgggcggcgtggccttgccccggtccgtataggcctggagggtcagcaccctcccgtctcccaacacctccgcctctgtggcctggcccacgaaaaggaggaagctgccgatctccatctggtccaccaccttgcatgcgatgcgggagaccatgtgctccttcaggtatggattgccgttgctgtcggtctccgccgcccggccggcgaacttgtccgtcacccggccggacttgtagccgaacaggtcgatgatctcccccggcgcgtccgcacccaacagggtaacggagaagctccccgccgcctgaatggccttgcaggtctcgtggtccttgttcaccgccacggtgaacttgggcgagaaggaagaggtcacctggtggaaggagttgacgatgcagccgtggcgcttgccgtccgctgccgcagagagcagacaaagggcgtagtccatcttctgatatgccttgttgtccatattgatttcctttctggcggatccgccgccggacatcccgcatgtttctcttgatggaataagtttaccagaagccgccattttatgcagttgcatccgcgactgctgccgcgcaaaaattttcttccattttctgtggacaaataccggatttgggcgtatactctccttaaccagatgccattatcctgatttatattttctataagtccggataatggctcaaaatctaaataaaaggagtgattctatgtctgagagctacgctggcaagatcaaccggaagctgctgaaaaagcgccgcatcatcaacgccgccgccgggcgggagccgtcggacctggtgctgaagaacgccacctatgtcaacgtcttctccaacgagctctgtcatgcggacatcgccgtggcagaggggctgatcgtgggcatgggccaatactccggcacggtagaggaggactgcacgggtaaaatcgtcctgcccggctttctggatgcccacatccatctggagagctccctggtctctcccaaggagttcgtgaaggccgtgctgccccacggcaccaccaccgtcatcaccgacccccatgagatcgcaaacgtcatgggtaccgacggcatcgagtacatgctccaggccacggagggcctgccggtggacgtgcggtttatgctgccctcctgtgtgccggccacgcccctggacgagtccggcgcgtccctggactaccgggccatcgactccttctatgaccacccccgggtccagggactggcggagatgatgaatttcgtaggcatcatcgccggggacgaccagccggtggagaagatcgtggccgcccaggcccaccacaagaagatcgacggccacgcgccggatctggtgggcaacgacctgaacgcctacatcgccgccggcgtctattccgaccacgagtgccacgacctgaacgacgccatcgccaagctggagcgggggcagtttatcatgatccgggagggcactgccgcccggaacctggacgcccttgcccccctgctgtgcgacaaatactccgagcgatgcatgttctgcaccgacgacaagcaccccaacgacctgctggagaagggccatatcgactacatcgtcaagcgggccatcggcctgggggtggatcctatcaccgccgtgaaggtggcctgccacaacgccgcccggtacttcctgctgaacaaccggggcgccatcgccccgggctacctgggggacttcgtcatcatcgacaacttccaggacttcaacatcgagagagtcttcaagaagggcgagctgatggtggaccacggcgtggtgaaggacttccccgccccggccatcgacccctatctcaccgaacgggcccacagcaccttccatgtggagcacctgacggcggaggactttacggatgcccggccccggggcatcatcggcatggtgaacggggagatcaccacggtggacgccggctactccgaccggatcgacgtggagtatgacgtgctgaagattgccgtggtggagcgccacaagaacacccatcatatcggcatcggctttctccagggctacggtctgaaatccggcgctgtggccacatccgtctcccacgactcccacaacattatcgtggtgggcaccagcgaggacgactgcgccgccgcagccaaccgggtggtggagctgaacggcggcatcgtagtctgggaccagggcaagccggtggcagaagtccctctggccatcgcaggcatcatgagcgatgagtccctgacatctgtcaacgaaaagctggaattcgccaaggcaaaggcccacgagctgggcgtcaatccgggcattgaccccttcatgaccctgagcttcatggccctgccggtaatcccctccctgcggatcaccacccgcggcgtgttcgatgtcaccacgcagagctacgtgtgaggagagcgaatatgctggaatttcttctgggggcatgctttttcctgtgcatttttgcccccttcacctttgtgatctttctgatcgacgccatcaagaaagtcgtctccggcgatggaaacgagtatttccccggtctgggcgccgggctaagcctgtttatcatgctgggcgggatcttctatgtgcttttatgaatgcgcaaaattagcactctcgataccagagtgctaaaattcacagatcgttcaaacaaatgacacacaatatccgattttccatcctatcataatacttgaaaagaagaacagaaggtctttgaaaggcacctgttccgcccggcggcatcaccctccatgatccatctgccgtcggtcccaactacggatcatcaggatttgataggaggaattgattatgtttgaaatgagaccttaccgcagaaattctatgagcacctggaatcccttctccgagatggaggagatggagcgtcgccttttcaacaacgacttcttctccggccgcggtctggcggagttcaaaaccgacatcaccgatgaaggcgactactacgagctgaaggccgacctgcccggcttcaagaaggaggacatccagctgcagctggacggcgacaccctcaccatccaggcccaacgtcactccgaacatgaagagcaggagaaaaaggggaagtacgtgtgctgtgagcgttcctacggcgcgtacagccggagcttcgacgtctccggcatccgggcggagggtattaccgcctcctacgacagcggtgtgctgacactgaagctgcccaagaagacagtggaggtttcctccagccggcagatcagcattgactaaaatcaaagcaggaaaagacccgcggtgtacgccgcgggtcctttgctgtcccttttccgtcatatctccgcctcttccaagggcaggaaggaccggaagagataccggccgtcctccgccgcctccagtgtcagctctttgcctcctccagtgaggactagcagcttcccctcccaccggccggcctcgcagatgaacatgccggggccggcgtcgctggtgaagttgtagaaggcgtcggtctccggcaagtacaccagctccccggagctctccggcacattcgtcaggtctgccgtggtgatgtcggcgtgctcctccaggtacgcgtccagctccgtccgccggtaccggtggatgggcaccggcatccggtccagggagtccaccccctggaagggccagcccccggcccccttcagggcctggaactcagcctcgtcctccaccgtgcccccgatccccatgtagcgcagaaactccaccaggtccaggtcctccggccgctcatagtaagaggtgaagaagctgcagacggaattgacgtatgagacgttctcccgctccttaaaaggcgcgaaggcctcgttcacctgggcgatctccttcaccgtcagggcgtcggcggcctccggtgtctccacctgttccgtctccgaaaaatcggccccgccgtcctccggtgccgttcccgccttgccgcagccggttagcagcagggccagtagcagcgccccgacgcaggcgaatcggcatctacgcatacgatccccccccctttttctcagcaaaccgcaaaaaatccgggaaatcatcgcaaaacagccacaaattccgttgaaatcattacaagggcaacgcctcatgttccacggtgatctggcagctcttcatggccgcaagcgcggtccgatggctctccggggtgacacctgcgcagcaggcggcatccaccgctacctctgcctccggcaggaacgccttcaccagcaaggcgttggaaatcacgcagatgtcggtgcagaggccgatcagcgtcaccttttcaatgagttccttttcattctcctccgccagcagacgccccagctccgcgctgccgaaggagggcttgtccagaatggcctgtcctgcgctggcaggccggagctgctcgacgatctcccagccctcggtcccccggatgcagtggggtacaggcaggttccgcccctcccgggtatggagatagtccgccccatgggtgtcccgggtgaagaaaatccgctccccccggcggatgcctgcggccacccgctccgccgcagcaggcacgatccgccgcgcctccggtgtccccagagcgccggacacaaagtcgttctgcatatccacaacgatcaggatgttcattatgatctcctcctttttatcatcatagcagacgccgcgccgggccgcaagaccttcccccgggggaaaagaatgttgacttctcttttcatccggtttaagatatggaatgtctgtccgccgaatttttcggcgaatgtgaaaaagagaaggagagagaagtttgagtcgcgaaaatttccgatcccggctgggattcattctggtaagcgccggctgcgccatcggcatcggcaatgtgtggaaattcccctacgtcaccggtgtcaacggcggcggcgtattcgtgttgttctacatcatctccctggtcatcatgggggttcccattctgaccatggagctggcggtgggccgtgccagccgcaagagcgccgtgctgggctacaaggccctggagcccaagggcagccgctggcacatccacggctggctgtgcgtaatcgggtgctgcctgctgatgatgtactacaccacggtctccggctggatgctgggttactgcttcaagttcgcctccggcaccttcagcggcatgcagccctctgatgtagacacagtctggaccgatatgctggccaatcccggcgagatgacgctctatatggtaatcatcgtgctggcgggcttcatcgtgtgcagcttcggtctgcagaaggggctggagcggatcagcaagtggatgatgatctgcctgctggcactgatcgtcattctggccatcaacagcctgaccctggacggcgctatggagggcgtgaaattctatctggtgccggactttgagcgggccgcggaggtcggcatcggcaatgtgatcgtggccgccatgaaccagtccttctttaccctgagcctgggcatcgccgccatggaaatcttcggcagctatatgtccgacgccaaccgcctgcccggcgaggccgtgcggatctgctgcctggacacctttgtggccttgatgtccggcatgatcatcttccccgcctgcttcagctttggtctggaacccggccagggaccatccctgatttttatgaccctgccacgggtgttcgtcagcatgaccggcggccggctgtggggcgccctgttcttcctgttcctgaccttcgccagcttcaccacggtgctggcggtgttcgagaacattatggccagctgcatggacaacttcggctggtcccggaaaaaagccaccatcgtctgcggaatcttcatcctcttggccagcatgccctgtgtgctgggttacaatctctggtatttcgaggcgtccctgcccagcggcgccaccggccagatcctggatatcgaggacttcctggtgagcaatctgctgctgcccatcggctccctgatctatctgctgttctgcgtcagcaagtggggctggggctttgacaagtatctggcggaagccaacaagggcaccggcctggggatgtcccccaggttcaagatctacttccagttcatcctgcccatgctgattctggtgatcctgctggtggggctgggcagctggggctggcgtgcccttatctgcgccgctgtggccgtgttcgtgtggttcatggcccgccgcagctcctccaaatccaccatttgagcgaagtgacctgtcaaaagagaggaccgtcaaagacggtcctctcttttgcatctcacggcagcttcgcctggaacagcccgtggcaggagcagcaaaggtacagcttcgccccgccccgcagctgggggatgcggaactcgctgccctgttccggatacagccgcgccagcagcagccggtccggtgtcacacaggcggtaaagcggatatagtgccccttgtccatggggtggcggaaggtgacataccagtcctcctccacctcctggaccgttacggcgtgatccggatctgcggaccggacctccaggggctccagccgccggccgcagcaggcaagctgccctcccgccgcagctgtcagaatgttgccgcagtccgggcacacgtaaaactgtatttttttcatatttcctccatccggcgccgccggaagcaggtctccgtccagaattccctccacgctgacgccaaaaatcttcgcaaggcgcggcagcatccccacgtccgggcagccctggccccgctcccacttgctgacggcctgagcgctgacgcccagcagttccgccgcctgccgctgggtccacccccgctccaggcgcaggcgccggagcagcgtcccggtgtcttggtcatgcatctcttctcacctctcccacaggatacccgaaattccgctggaacgcaagcaacgctccgttgagttcgtatggctctgcaaaatgtcgccgcttcgcttctcctagggctgttttcttggcgactcctccgaatttgcaggaagcggggctttttcctgcaaaatgacttttcatccggacggcgatatggtatattgggtgggagaaacacggctcccccgtgacacacaggaggtctcttgatatgataacacttcataacaacggcgtgttcctggcgggcggcgtccccgctgctgccggcccggtctctccggaggaggggcggaaacggaccatggcctggtccattctccaggcccacaacatctccggcgatccggagcacctgcagatccgctttgacgccatggtgtcccacgacatcacctatgtgggcattatccagcaggcccgggcctccggcatgaaggagtttcccatcccctatgcgcttaccaactgccacaacagcctgtgtgccgtgggcggcactatcaatgaggatgaccatgtcttcggcctctctgccgcgaaaaagtacggcggtatctacgtgcctgccaaccagtccgtcatccactcctatgcaagagagcagatggcgaagggcggcaccatgatcctgggctccgattcccatacccggtacggggctctcggcaccatggccgtgggtgagggcggcccggagctggccaagcaactgctgaagaacacctgggacatcaactatcccaaggtggtgctggtgtacctcaccggcgcgccccgccggggcgtggggccccacgacgtggccattgccctggtgaaggccacctttgcaagcggcttcgtcaataactgcgttttggagttctgcggccccggtattgcagctctccccatcgactaccgcaatggcatcgacgtgatgaccaccgagaccacctgcctctcctccatttgggagacggacggcgtgacggagggcttctaccgcgcccaccagcggccggaggattaccgggagctgcacccggcggacggagcctactacgacaagtacatcgagatcgacctctccaaggtcgagcccatgatcgccctgcccttccacccatccaatgcctggaccatccatgagtttctggagaatgccgccgacatcctggcggctgtggaggcggacgcccagaagcggtatcctaaggcccatgtgaagctcacggacaaaatccgtgacggcggcgtctgggcggatcagggtgtcatcgccggatgcgccggcggcctcttcgacaacattaccgaggcggcggacatcctccggggcggctccaccggcaacggtgccttcactctggacatataccccaccagtgtccccgtcagtctggagctgacgaagatcggtgccacggcggacctgctggagaccggcgccgtcatcaagcccagtttctgcggcccctgcttcggcgcgggagacgtgcctgccaacaacggcttgagcctgcggcacaccacccggaacttccccaaccgggagggatccaagcccgcggagggccagttcgccggcgtgtgcctgatggacgcccgctccattgccgccacggcggccaacggcggccggatcaccgccgccacagacatcgattacacctccgtccaccacgactaccacttcgacaagggcgtctatgaccggcggctgtactacggcttcggcaaggcggatcccagcgtggagctggtgatgggccccaacatcacggactggccgaagatgcagcccctggcggaaaatctgctggtggagctggcggcggtgctccacgatcccgtcactaccaccgacgagctgatcccctccggcgagacctcctcctaccggtccaaccccctgcggctggcggagttcaccctgtcccgccgggagcctgcctacgtgggccgggccaaggccgtggcggagattgaggcggaacggctggggggggacgccccggagaagctcaccgccattctggacaaggtgggcgacggctccgcgctggtgaaaaccactcagttcggctcctgtgtctttgccaacaagcccggcgacggctccgcccgggaacaggcggcctcttgccagaaggtgctggggggctttgccaacatctgctatgagttcgccaccaagcggtatcgctccaactgcatcaactggggaatcctgcccttcacactggacgcgggcacgtcctttgactacgcccccggcgactgtgtgttcgtccccggcatccgccaggccattgagaacggcattgaggatatcccggctagggtcatcaggacggacggcgccgtagagggcctgatgctccatgtgaaaggcctgacggacgatgagaaggaaatcattctcgacggatgcctgatgaactattacgccaagcgtaattaaagaggggacttcctcccctcttcagatcccccatttgcctctgccgttgcagcattatgattcccggccctgtctgggccgtcaatcgtgccgctgtctcgaaacagcctcacttttccgccacgggcggcgttttggctgtttcccagtgacatcggtcactggaggcaccgcccagggcggctaggtcaaagcattttcggcaggcacagaaggggaattgccccggaggggcgagagaggcccctctggagggtgccctggcgaaaatgattcaaagtggtccggctgcgccgggctccgaaatttctaatgattggcgaggttgagaccatggataaaatcaagatgaccacccccctggtggagatggacggcgatgagatgacccgggttctgtgggcctggatcaaggaaaagctgatcctgcccttcgtggacctgaaaacggagtactatgacctgggcctgctccatcggaacgagacgcgggaccaggtgaccatcgacgccgccaacgccaccaagcgcctgggcgtggcggtgaagtgcgccaccatcacccccaaccgccagcggatggaggagtacccccagctgacggagatgtggaagagccccaacggcaccatccgggcgattttggacggcaccgccttccgggcgcccattgtcctgcccatgatccacccggttgtgaagaactgggaggcgcccatcaccatcgcccgccacgcctacggcgatatgtacaaggctgtggacatggtgaccgaggagccgggcaccgccaccctcaccttcaagggcgagagcggcgcggagaagaccctcaccgttcagacggtcagcggtcccgccgtgtggcagggccagcacaacacggagaagagcatccgtgcctttgcccgcagctgcttccagtacgccatcaatcagcggcaggacttgtggttctccaccaaggacaccatctccaaggtctacgacggagagttcaaacggatcttcgaggaggagtatgagaccacctacaaggtggagtttgaaaggctgggcctcacctacttctacacgctcatcgatgacgcggtggcgcgggtgatccgctctaggggcggcttcatctgggcgctgaaaaactacgacggcgacgtgatgagcgacatggtggccaccgccttcggcagtcttgccatgatgacctccgtgctggtatctccggacggcaccatggagttcgaggcgtcccacggcaccgtcacccggcactactacaagtacctgaagggggagaagacctccaccaaccccatcgccaccatcttcgcctggtccggcggtttgaagcggcggggcgagttggacggtctgccggagctggtgcagttcggccaagcgctggaggatgcctccctggagacgctgaaagacggcgtgatgacaaaagatctgctggggctggtagagcccggcttccaggcccgcggtgtggacagtgaggaatttttggacgagatcgccaagcggttggccgataaattgggataaaaggggactgctaaaagcccggacgtctgttcagcgtccgggctctttttgctcttttgcaaaatcattggttgtgcggccgtttcagaattgattggagaaaatcgggcggatggaatagtagtagccggacatcaacagcggcacataggcctcatccgtggcaatgatggtcccatcctccagccgaaggccaaaagattccatgctttccgtgatatacagcatccgctcgacaccgagagaaaggttatcccccggccggtagaacaggatgtcctgggcgtctgtccacatggcatcccaccggatgttcgcatggacaccctcccggcaggtagtttccacttcgtggatagcaaactgcccctcaaaagagcggtctcccagaattttcaccgaaccatctatggcaactgtcgtctccccggccgacaccccttccgcactatatacggtggccggcacttccaaagagatctcctgaaggaacaccccggcccggtccagaattgcaaagaggacaaagcccgccatcagcaaagcacaggtgccgcccagcacctgactccactttctccgggtccgctcctttgcctgccgggccagaaaggccagggcctgccggatcgtcggctccggctccggcactgtcccccgctccccccgcagcagatccagcacgcccagccccaaagtatccgccagaggctccagcagggagatgtccgggaacccggcgccccgctcccatttggagaccgcccggtccgacacatgcaaggccgcggccagctccttctgggtcatattctgttctttccgggctgctgcgatcagcgccccggtctttgtccgatccatacttcatcacctggggccagtatatcaaatccggcccgctcccacaacaaacgctgcgtggaaccgcccagattccgccgaggcgccgtgtctttcggcagggtctttccacctcacggctgctctccgcccaggtgttcccgcagcactcggatcacccgcttcatgccgtccgtcagatacttgctacggtggcgcaccaggaaatagctcctgtgaaacccgccgtcctccacagccagctcccgaaggtctccccgctccaggtccgtcaccaccagagaccggggcagcagcgtgatcccaagccccgcccgggcgcaggccagcagggcagcggtgctgacgctctccactaccggctgcgccgtggcgcccgctccctgcaggccggcatccacactgttccgggtgccgctgccccgctcccgcaacagcagccgctcttccgccagctccgccagagtcagggagttctttccctccagatagccgggggcgcacactgccgccagctcctcaccgcacaggggctccaccaggtagtggggcgagacggtgacattgtccactacggcaaaatccagttcgttctgcaggatcatccgctctgtctccctggagttgtgaatactggcccggaccgtgatctcaggcagcgcctctgccagatgcgccaggatacccgcaaggcgggtctcgcccagcgtcacgtggacgccgaagcggcaggccccctgggcgccgctctcccgcaggacctccaccgattcctgaaactgggacagcacggtgtccgcatactgccgcagcgtacgccctgcctctgtcagatagacccggcggttcatccgctcgaacagccgcacgttgtaaaacacctccagctcccggatggccaggctcaccgccggctgtgccatattcagctgctccgccgcccgggtgaagctctcctgggcgcagacggcggaaaagatctcgagatgccgcagcgtcactgcacttccccccctattcataattatttcattatgttttttatcctatcatatagattgatgaatgtcacgaaaaagcgtacgctggggaagaaatccaagagcgcgaaaggagcgatttccatgcccacagatctgaccaaagcccgtcagctgttcgggactttttccaaaatcggcgccttcacctttggcggaggctatgccatgatccccctgatccagcgcgaggtgacggaacgccgccgctggctggaggaccgggacattctggacattgtcgccattgccgagtccacaccgggccccattgccatcaacaccgccaccttcgtaggatatcaggtatgcggcaccctcggcgccttctgcgccacgctgggcgtggtgctgccctccttcctggtgatctacgccgtctcctttgtgctgcggcagttctcggacctggcggtggtccaatacgccttcaacggcatccgggctggcgtattggccctgcttttgaaggcactgctgtccatgtaccggcagagccccaagggcgctgtttcctatgccgtcatggcgggtgcctttgtgctgacggccttctgcggcgtggatgcggtgctggtgatcctggccagcgcgacggtggggctgctctccgcccgcatggcgaaaaggagggctgtgtgatgctgtatctggagctgtttttgaccttcttcaagatcggcctgttcaccatcggcggcggttatgccatgctgccgctcatccaggcggatgtccaggccaagggctggatgacggcggaagaattggtgaacttcatcgccgtcagcgagagtacgccgggcccctttgcggtgaacgtctccacctatgtgggggcggagctggcgggcctgcccggcgccttctgcgccacgctgggggtggtgctgccctccttcctcatcatcctgctggtggcccggttctacgccgccttccgctccagcgccatcgtcagcggcgccatgggcggactgcgtccggcggtgatcggcatgatcggcgccgcggtggtctccgtggggcagacggtgttcctgccggagggattggcagcggtgacggcgtatcccctggtctgctctctgactatcttcgtcctgatggcggtcctgacctacaagaagctccaccccatcgtcatcatcctgctgtccgccctgctaggcatcgtcaccggctacctgcagccggcgtgactccggtccgtcgccccggaacggggcggcgggcctttttctttagccggacaaaagactttctaaaagcaggatttcccctcttgacttggagtgcgctccaagtgctatccttttcatagagggattccgcccaagggcgggccggggacttccccactgtggaggcacctcgtctcccggagaaggcagtatccccttcctaaatctgaaaaggagaaatcgtgatgatttacaaggactttcaggacctgaagctgtccgctctgggcatgggctgtatgcgcctgcctgtggtgggcggcaacgacgccgtggtggacgaggccgccgcggaggagatggtggattgcgccatggccaacggcgtcaactactacgacaccgcctgggggtatcacaacggcaactcagagattgccctgggtaaggccctggccaaacatccccgggaaaaattttacattgccgacaagttccccggttacgacctgtccaacatgcccaaggtgcaggagatttttgaggagcagctgaaaaagtgccgggtggactattttgatttctatctcttccacaacgtctgtgagatgaacatcgacgcctatctggacccgcagtacggcatccacgactatctgatggagcagaagcggcgcggccgtatccgccacctgggcttctcctgccacgggaacctgcctgtgctgaagcggtttctggacgcctacggcaaggatatggagttctgtcagctgcagctgaactacatcgactggaccttccagaacggccgcgaaaaggtggagctgctggatagctggcatattcccgtctgggtcatggagcccctgcggggcggccgcctggcccgcctttccgacgaggaggccgcccccctgagggccatgcgccccgaggaacccatcccggcctgggccttccggttcctgcagtccattcccagcgtcaccatgattctctccggcatgtccgacctggagcaggtgaaggccaacatcgccactttccagatgggggttcccctcagcagcagggagatggaccgcctgctggcccaggcccagcgcatggtcagcaagaccgcccttccctgcaccgcctgccactactgcgtcagccactgtcctcaggggctggatatcccctccctgctggcgctgtacaacgagcatgccttcaccggcggcggcttcctggcccccatggccctctctgctctgccgcaggacaagtggcccagcgcctgcatcggctgccgcagctgcgaggcggtctgtcctcagcaactgaagatctccgaggccatggccgactttgcgtcccggctgtaaaatctgagacagaagcgcccccgccgggaactctccggcgggggtgctcgctctcacggagtcttgacggtgtccgggaatgcggcccggatggcctccggcagatgggcggggtccaactgttcccggccgcaccactccgcaaagcggtggaccgcctctttgtccggcgacagcccggggatgacggtcagcgccaccgtccgttccccctccagcttccggaccagaatgccatacacacaagaacagtctggtcggaagctgcggacgcgcaccggcgcataccggtagccggtcatgccgcctgccctccgggagcagagaaacgcatagaggtcacagccgtaaatctctgccatgcggacaaccatgtcgaacctgggctgcgcttttccccgctcatacttttgcagtgtccgtgtggaaattcccaggcgttccgcagccttttcctgggaaagtcccgccagtctccgctctctccaaaaggggctcttttcctggatgtgtcttttttttttgatatttttgcatagcaaaccctccttctacggaggattttacattatcttccaaatttttaacacgaataaaaattcacttttggaaaaaaattgccgaacaatgtcgaatttcgtcgatttacccaaagaaaatacaggccccgcatattcatacggggcctgtgctcagacaaatccttccagcttggcgatccggtactccagtacggcgaactgtcggcgggtcagcggctggtccaacatcaggtctccctccgcatttccctgcatgatgccgttttccgtcagccagtccacggcggccctggcttctgcctggtagtccgtctcttcttcggtctccacccaggggatgcccaaatactccagaattcccttggcctctgccaccgccagcttctggcggtagtcggcctgccccagcagggcagcctcctcccggttggtgtggaagccgttttccagcaggacggccggggcctttgtgtgcttcagcacatagagctccggatcgtacacaatcggcgtggatcgcacggcgatgcccgccgcccgcacctgctccaggatgtcctgagccgcccgctcccggtcgccgccggggccgtagagatagacgctccaccctttggcagaggaccagccgcccccagcggcggcattgctgtgaaggctgacgaacaggtccaggtccgggatgctgttggcgatctcacaccgtctggccaggcttactgccccgccgccagtacgggtcatggtcacggagacgccccggtctgtgagcagcttctccagccgcttccccaggtccagggtgaatacatgctcataataggtcccatccggactcttgttggccagattgcccgcgtcatgccctggatccaggcagatgtgcttttctcgttcgctcaaatgcgtttcccccctctgtacaggctcggggaacacagggctccccttccagtttagtggaagggcgcccgtcctgttcccccgccggggtcttttcggagcggggcgcatatcatggagcaaaatcatccgaaacagggaggggtccccatgcctgccgctctgattaaacgtctgagcaatcttctctgcgtcaaaagtattgtgacgctgatcctcaccgttgtatttgccgacctagccgtcaccggccgtatctccagccacgattttctgactgtcttctccgttgttatcgccttctatttcggcacgcagagcgaacgcctcagcggacagctggagaaagacaccggacagaaattgtcctgaccgtcatcccagggccacgtccagcaccatcatcacgctgaagcccgcagcaaaggccagcacaccgatgtgggagtggcgtccctgggacatctccggaatcatctcctccaccaccacataaagcatggcccctgcggcaaagcccagcagatacggcagggcgggcaccagcagctccgccgccaggatcgtcaccagggcgccgatgggctccacaacgccggatagcacgcctccggcgaaggcccggagcttcccctcgccctccgcccgcaggggcatggagacgatggctccctccgggaaattctggacagcgatgcccagggaaagcgccagcacgcccatagcagtgatctccgtgtcccctgccagatatccggcgcagaccacgcccaccgccatcccctccggaatgttgtggagcgttaccgccagcaccatcatggtggtccggcgcagccggctggaggggccctccggctgcgcgctgccccaatgcagatggggaatgatatggtccagcgccagcaggaacagaaagccgagccagaggcctgcggcggccggtgcaaaggaccactttcccagctcctccgaccgctcaatagccgggatcagcaggctccaaaccgacgccgccgtcatcacccctgccgcgaagcccgtcagccccttctgcaggccgtccgacatcgcctttttcataaagaacacgctcgccgcgcccagggaggtgcccaggaacgggagcaggagtccgtataatgcttccataatccatcctttctcatcttgtgtccggaatcagtatccatgcgttcagaataccggattcccgcaccggtgtcaaattcattttcccaccggatggcctttcacaaatccggaaaatcgctgccgctctggacagcagggagcaagtctgctatgcttgacacaggggacaggctgccggatggctccgtttcccctcatttcaggctcattttagcttttgggtgtaccatggtcccatcatcagagaaccatcccggaataggaggaacgccatgagggtctctcaccatgtaaaacggtcggtgtgcctgctgctctccctgcttctgctggcgcagggcatgaccctgggcgcagccgctgtgggcaccgattccgtcccggcggggacatccgttctggagcccgccgcataccccgacagtgaggttctggtcctgtatgaggacggcaggaccgaggtggtcgtctacgaggacgccgcctccctggaggaggggctgccgcagctggcccggcaggagggtgtggcgctggtccagcccaactacacatacacaagcaccgctctctccaccacagacccgctgctggcggagcagtgggccctgtataacgacggcagcttccaactggaggagcaggagaacccctatccggtcttcaatgatccctttgcactcccctccgccccgtggcagtggattgccccctggtggatgcagtccgatgcatccgccgggagcaccggaaccgtgcaggccgcggccggcgtggacatcggcgcggaggatgcctgggccctgtacgacggcggaagccgggatgtggtggtggccctggtggacaccggcatcgactacacccacgctgatctggagggccgcatctgggtgaacgaagacgagatccccggcaacggggtagacgacgacggaaacggctatatcgacgatgtctacggctggaatttctactccggcagcaatcaggtctatacgggcagtgaggacagccacggcacccacggcgcgggcaccatcgccgcccatgcggacaacggcatcgggatcgccggcatcgtccggagcgaccacgtcaaagtcatggcagtcaaggctctgggcgggtgggacggcagcggctccacggcgtccatcatccgggccattcagtacgcggaggccaacggagcccggatctgcaacctgagcctgggctcttccagaaacgaccccgcgctgtaccgcaccatcgcggcgtcggatatgctgttcgtagtggcagccggcaacgacggcgccgacctggagcttgcccccagctacccggccagctaccacttggataacctcattaccgtggcgaacctccgatacgacggtaacctggatcctacctccagctacggcgcctcctctgtggacctagccgcccccggcacccatattttaagcaccacccccgggaattcatacagttacatgacaggaacctccatggcggcgcctatggtcagtgctgcggcggccatgctctactcccagtttccggatgccacgctggccgacgtgaaggacatcctgctatcctccgtccaaaagctggacagcctcaccggcctgacggctaccggcgggatgctggacctgggtgccgccatggcatccggggccgcggcccagaaggggcggacctggacggagccggacctggcggcctataccgacagtccgcccattctctccctgtctctcttccagtggagggggcagcagtatctgaccgttcaagtccaggatccggacggcgacttccgctccgccgcttatgccgccgggacatacacggcagcgaatttccagggcggcgccgcggggacgcccctccccttgaatgcgtggggggccgccaccttgctggtgcgcaatggcggaccttataccttttacgcggtggacctggccggcaatgagacggtccgcacagtggatctgccccggagcccctgagggcggcccgccgccaactccatccccggtcaaaaggactccgcaggctgtgcctgcggagtcctttttcctgctccggaaaagcggcccctccatcagtccttcagaatgtcctccagttccctgtccatcgtcacggtcatgcgtggcagctcatgcagtcccttccccaagtcggctgtgccgtgtctggtgaccgcagtgaccgggaacagctcatgcacaaatgcctccgcgtccggctcggtaatgccgaagggataggcgaagaaggtgacgggctggcccacctcctgggcaatgcggtcatggctcttctgaatatcccccagcaccctggcctcaaaggcactgtccgactcctccggatccctttggatgccgttgatgccgcccgggtcaaagtttccgcccagatctcccagattgtggagcgaataggcatgggacccgatctctaccaggccggagtctgccatctcccggcacatatcccagctgaggaagttgtcagcggacacgtcctgcatatacaccataatagagaccacggctttcatctggtatgcctgaagcagcgggaagagcagctcgtagttgctccggtatccgtcgtcaaaggtgatgagaaggggtttttccggcagcggctctccccctgccaactcccgcggcagcacagtgtggtagccatgttccgtcagccagcgcaggtcctgttccatacggctcacggtgatggtcatatcgttgcacggctcaccgtcctccacgatatggtggtacatcagcaccgggagggcccggtccgccggaatgggcatctgccacactcccctggcatagagatagacggctcccgccgtgaagcagagcgccgctgcggcggccactcccaggattcccacccgaatttttttcatctgtctgtcatctcccatgtgttggcgctgcggcgtatacccttagaaaattcgcaaatattattttatcagattaagttaaaatgtcaattcattaaatgaaaagattatctttgctaggatgttttagggtgattacatgcctttggattatgctgcgattggtggccggctgcaggcgcggcgaaaggaactggggatcacacaggaggacgcggcggaacgggccggcattactgtggtctacctgtccaaaattgaaaacggacgggtgcatccgacgctggacctgctggacaggctctgctgtgttctggaatacgaccttgcccgagccttcaccggcgtccagacgacctctcccgactacggtcaggagcaggtgctgcggcttttcaacgcctgtgcgccgcgtgtcaagcctgttgttctgcatctgctggagcagctggcaaccttaacgtgagcagaagcgggaaaagtatgcaccatgtctgtcccgcaaaaaagcggcgccccggcggaatattccgccg

SEQ ID NO: 4974 - DNA, 504 bp, Unknown
  gut microbiota DNA sequence
ccggtcgttggcaaggccggcagcctccaggttcaggctggcggtgttggccttccggccgatggccaccaggaccttctccgcctcaaagctgacagtctcgccagccttgttccggcaagtgaccttggcgcccacgggagaggcctccacggcctgcaccgggcactccaggttgaacgccatgcccatcttcttcatgtgggccacgccgatcttggtcaggtcgccgtccagcataggcagcatgtggtccagcgcctccaccacggtgatcttggtgccgaaggccgcgtaggcgcaggccagctccaggccgatgacgccgccaccgatgaccaccatgctcttgggcaactgttccaagctcagggcgccggtggagtcgatgcagttgggattctccttcagaccggggatgggcggctgggcgttgacggagccggtggccacgatgatggcgtcggcggtcatctcctccacggagccgtcggacttcttcac

SEQ ID NO: 4975 - DNA, 2711 bp, Unknown
  gut microbiota DNA sequence
ccatctgccgacatacggtcaccctgtatgcattgtaatcctccagcatagttgttatatgatgtgaagatatgtaaatattagtcaaattaggttgacatttaccggatattataatacaatgctaacaaaaatatatgaacgccagcacctgtacaggctgctcacttaatcactatgcgtatcttcaaatgaaaattcttccagttctggatagtcaaaaaattcagataacgtaagactgaatgcagatgcgatcttgtgaagcgtctttatttttggattgaatgtcttgtgatttatgagattatcaagtgttgagtagctgataccactcatggcagacaactgatatattgtgaagtcacgttgcctacatagctccaaaatccgtttgacaataatttgtgaatattcgtccttcatctctctacctgctatcaatgagtaataccttaaatggtgttttctctatgatagcaataaaaatagcgcgctattcccgtgcacgggaatagcgcgtgatggaatgaacggtatgaattatgttgcttgaatagaaaatagaatgtgttgcatcactcaagagaccaaggattataatagatttgagattgaaaagagtgggggaaacagctatgaaagaaattcgcatactcattggcggaatgggaaatgctgccaggccgatggtcgatcttctgactagcgaacgggagaggatggagaatgtatacgggctccattttcgaattgttggcgcagtggacagtagaggtggagtgattgcaccgaatggaatttccagtgtgacgttatcggaagccaaaaacaggggaactttggcagatatccccggcttgggtattcagggccttacggcattggagatgatcgagcagtgcagcgcggatgtctatttagatggattgccgccatatctgcccactggggagccggggacttctaacatccgaagggctttggaacggggaatgcatgtggtgaccgcaaataaagcgccgcttgcccttcattggaaagaactgttttccttggcggcacaacaggggctccaaattcgctatggaacagcggccagcgcaggactgcctactctggagatgggtaaactgttgggacgttgtggagagctgctggagttcggcgggattttcaacgcgtcttgtatgtacgtttttgatgcgatggggcagggacagtcctttgatatggctgtgcagggggcgaaggcaggcggatttttggagccagatccctccatggatctcgatggatgggatacggccatgaaaacagttatccaggccaatacctattgggaccaggcatatacgcttgcggatgtggcgatccaaggtatctgcggcctgacacaggcagatatgatagacgcgaagtccaggggcgaggtttggtgcatggttggccgggctgtccagaatccggatggcagcctgaaactgactgccggaccggaacggcttccggcagatcatccgctggccagggcacactggagcgataaggtgctttggatgcagaccagaacgcagggagggcaggtgcaccactgcatcggtgcgtcggcttccagcacacccggaaatatgtatttagacttggtgactattgccagggaactttaatgaataccttttcagaaatgcagaaataggtgggggggctttgttcctgtttagaatcggcgctgccgttcttgaatttttttggggaggaaaagaagtatgaagagagtctttgcgctggtcctgacattggctacagctttagggttggccgcctgcaacagtggaggaggtgaatccggggaaaatgtggtgaggattggaatttttgagccggccactggcgacaatggcgccggcggcaagcaggagatgctgggcatgcagtatgccaataaggagacccccactgtggatatcggcggcaccacctataccgtggagctggtttatgcggacaacggctccgaccccgccaaggcgcccactgccgctgcggagttggtgagcaaggatgtatctgtggtattgggttcctacggctccaccgtgtctctggctggcggccccgtctttggcgaggcgggtgtccccgccattggcgtcggatgcaccaatccccagattacggcagggaacgggtattacttccggatctgcttcctggatccgttccagggaacggtgttggcaaatttcgcacaggagaaattctctgcgaaaaaagcttactgcctgggtgagctgggcaacgagtacgaccagggcctgattaattattttgagcaggcatttgacggcaccgtggaaaaggattccttcccgaccaatacatccgacttcaccacatatcttaataaggccgtaaatgaggacgcagatgtgattttctgcccggtttccattacatattctactcagatcgtgaagttggctgcttctctgggaattgaaatccccatcctcggtggcgataccctggacagcaatatggtgctggaagcggccgcaggcagcgacgtgcagctgtacgtgtccaccttctaccaggagggtggctctccagagtttgacgagggctttaaggcctggctgaacgaggactccaccgccatgaccaacaacggcggcaacgataccatcgccgctgtcactgccatg

SEQ ID NO: 4976 - DNA, 268 bp, Unknown
  gut microbiota DNA sequence
gctgttatccaagttagagaatcagaatataccaatgaaaaaaacagaatatcgtctggatgaacagatccgtcaggcatttctttccctggaaacaaaatgggcagaaaaagaaattggttttcaggtagaattggaggaagttaaatataccgggaatgaaggactttttatgcatatctggataaatcttttagataatgcgattaagttcagcccttcaaaggggacaattacgatgtttctgaaacaagaacaggattctgtt

SEQ ID NO: 4977 - DNA, 27558 bp, Unknown
  gut microbiota DNA sequence
cttcatattttgcaacccccaaatcttctccggcatgaacgccttttcgcggacatagattctaccatcgaagcaaagggggatcaccatgaaaaaactcgtcgtgctgctgtgcgccctgctggcgctggggagcagtgcccaggcgctggaagtatccgcgccctcggctctgctgatggaaaaggagacgggcaccgtcctcttcgccaaggacgaacatgccaagctggagcccgccagcgtcaccaaggtcatgacgctgctgctgaccatggaggccatcgacgccggacagctccactatgacgacgtggtcaccgcgtcggcccacgcctgctccatgggcggcagccagatctggctgaaggaaaatgagcagatgacggtcagcgatatgctgaaggcggtgtgcgttgtctctgccaacgactgcgccgtggcgctggcggagacggtggccggcagcgaggaggcctttgtggagcgaatgaaccagcgggccgcggagttgggcatggccgatacccacttctgtaatgccaccggcctgccggcggaggggcatgtcacctccgcatacgacatcgcccttatgagccgggaactgatccgaaaccacccggacatccgccagtacaccaccatctggatggattccctgcgggacggggcctcctccctggtgaacaccaaccgcctgatccgcttctaccagggagccaccggcctgaagaccggctcaacagacagtgcgctgtactgcctctctggtacggccgagcgggacggcatggagctgatcgccgtcatcatgaaggcaccaacctccacccagcggtttgaggatgccaccaatctgctgaactacggcttttccacctacacgctggagaatgtggtgccggagtccgccctgccgccggtgcccgtgtccctggggacccaggccacagtgcagccggtgctgggggagaacacgcacctcctgctggaaaaggccaaggcgggcagcctgcagcagctggtcaccctggcggactctgtggaggcgccggtggcggcgggcagtcaactggggaccctcaccatcacctccggggaagaggtcgtggcggagctgcccatcctggcaggagaggagatcccacgggtcaccttcggccagatgctggtccagatgctgcggacggccttcctctgcggctgacggcggcggggggcgctgcaccccctgaaatcccggcggattgcgaccgctttcccttgtgtcccgtttcggggcatggtataataaggcaacaaacccgcgcagctttacgaaagagaggccggtcatgatgctggatgtcaaatcgttccaattacagtcttttctgcccctgccctatgaggaggtcctggcgccgcggctgaagcgggcccatgagaagctccagagcggcagcggtgccggcggagagttcaccggctgggtccatctgccccgggactatgaccgggaggagttcgcccgcatccaggcggccgcgtcccggatccgggccaactcccaggccctggtggtcatcgggatcggcggctcgtacttaggcgcccggggtgtcatcgactgcctgcgctctcccaattacaacctgaagcgcaaggatacgcccaacatctactttgtgggcaacggcctttcctccgacgccatgggggaggtgctggacctggtggcggacgtggatttctccgtcaacgtgatctccaagtcgggcaccaccaccgaacccgccgtggccttccgcttcttccgggcggccttggagaagaagtacggccgggagggtgcccgggagcggatctacgccaccacggacaaggcccggggcgccctgaagtccctggcggacagcgagggatgggagaccttcgtggtccccgacgacgtgggcggccgatacagcgtgttgaccgccgtgggcctgctgcccattgccgtggccggggtggatatcaccgccctgatgcagggagcggcggagatgatggagacctgcaccgaggcttccttccggtgccctgcctggcggtacgccgccatccggtacgagctgtaccgggcgggccggtccattgagctcttggcctgctatgacccggcgttccggttcatggcggagtggtggaagcagctcttcggcgagagcgagggcaaggagggcaagggcctcttccccgccagcgtggagttcaccgcggacctccactccatgggccagtacatccaggagggcaagcgcctgatgtttgagaccgtggtgcgcctgggtccctccgaccgacagctgacagtcccggtggacgaggcggacggcgacgggctgaacttcctggcgggcaagtccctggacttcatccgggaccgggccatggagggcaccctgctggcccacacggagggcggcgtgcccaacctgatcgtggagacctccggcaggacgccggcagacctggggcagctgatctactttttcgagtacgcctgcggcctctccggctatctgctggacgtgaaccccttcgatcagccgggggtggaggcctacaagaagaatatgttcgccctgcttggcaagccgggctatgaggaccggcgggcgcagctggagagcaagctggaggggtgaccagcctcggattggacggcacccgtcctgccgcccactgtcaatctccattatgaacaaagtttgaatcttcatttctccattgtttttcacgcgatcttgtggtatgcttaacataccgaatttcccccagcgactttaattgacaggagtgattactatggtcagactgattatgggcgtgaagggctccggcaagaccaagcagctcattgaactgatcaacaacgcggcgaaggacgagcccggcaacgtggtttgcatcgaggctaaccgcaccatgacatacgatatccactaccacatccgcctgatcgacgcccaggagtacaatctggacagctacgagctcttccggggcttcatcagcggcctgtatgcgggcaactatgatatctcccatgtgttcatcgacaacctgtgcaagaccatcggccgggaagtggacaaggacaccgagaatttcctgaactggctggacgcctttggcgagaagaacaacatcaagttcaccgtcaccatcagcgccgacctctccctggctaccgacgggatgcagaagttcctgtaaggctgctgcgctttcccatatacacagacgccgcctctgccaactggcagaggcggcgtttttcaggtttcagatttgcacctgggaggatccggcgtccagcccctccagcagattgtaattgtcatagtccgccacagaggacaggtcgctgaggcacagctggtccacgccgaagaaagcagccatccgggcccgctccagggcggcctcgccgttgagataccacaccgcggtgtccccgctgccggaggtgagataggcgcaggcgtagcggtcggagtagtaatctttcgtctgggaggcggacagcagctgctcgatctcggcggcggaggcctggccggtgtgccgcccatccgtccaggcggagcccgtggtggtcagcagcaggctgagacagtcggaatccacctggtccgccagttcggccagggcgtagtagacctcctccagcggcgccaggggggcgatggggaagtcctcggacacgtcgccatagtccgccacccgcaccaccagcttgtcggccggctcactcagggcggcatagtcatagccgttgtacgcggctccctgccagacgggcgcctccaccatcaaatagagcagccggtcctctcccagttcggcccgcagcgcctccgccagcgcggtgaaatccttcttctgggcagaagagagctccgccaggtccagaaacagcccctcataaccgccgctctccaccgcggccgccagcacctctgcggtgtggctggggtcatccttcagtgccgaggcgctcccgcccacatgcagcagcggcacggcaccggcggcggtgatggtctcctgcagggcggctgcggtctctgcatcgggggtaccggcgagccgggactccccggcgtagatcagccgggcgccgcccaccgccacggcgccatagccggtcaggtctgtcagaccctccgcggaataggcgatgccggttttctccggggccgcggcgtgatagctgtcatacagccggatcagcatgaccgccgcctgctcccgggtggcagtctgatccggggagaaggtggtggccgcagtgccgttcaccagccccagctcatgggccatggcgatatagcccacgttggtggtcacatctcggaagggcatgggcaggtcctgggccaaaccggcgatggtgccgtagcccatggcccgcaccagcatgaccgccagctcctcccgggtgatgggctcccgggggcggaacgtatccgtctgccgggtgatggccccgttggcataggcggtctccaccgcgctgtaataccaggcactcttgtcctggttgtccgtataggacccggcctccggtgttaccatctcccagccgaacaggcggcacagggccaccacaaaggccccccgggtcatgggagcccccaagccgaagcgggtgggcgtctgcccctggaacaagcccaggtccacagcccgacggatggagtccgccgcccagtggctctccggcacgtcggaaaagccggtggaggccgctgccgcgggcgccggcagcgccgctgtcaccagcagggcgcagagcagcgcgcaggaacagaaccattgcagtcgtcttttcatgttgtcattcttcgctcctttagcgtcagatttctttcagattctggcagagatgcccggattcgccctctgtcggtatgccattgtaccagaatctgccgccgccgtcaaacgaacggtgtcggaacgcagaaaaacctttacgtttcaccccttgcctgctataataatttagttatgatggctttttattacctttgaaagggagggaacgtgccatgagattcaaaaaatggaacatcgggaccccggctgagcgggacgttgccctcctgcggagtgccggatacccctatctcctctccacggtcctggcggcccggggtgtcaccactgccgaggcggcggccgaggcgctggagcgggacaggagcctcagcatgtcccccatgctgatgcgggatatggacaaagccgtcgcccgcatccagcgggcgatcagccagggggagaccatcgccgtgttcggcgactacgacgtggacggcattacttccacggttctgctgatggactatctcaaaagctgcggcgtccgctgcctgcggcatatcccccgccggatcgaggagggctatggcctgtccaaggaggccatccaaggcctgcgggaccagggcgccacgctgatgatcaccgtggactgcggcatcaccggcaacgaggaggtggacttcgctgcctccatcgggctggatgtggtcatcaccgaccatcatgagtgcaaggaggagctgccgcgggcgctggcagtggtggacccccaccgcagcgactgcccctatcccttcaagcatctggcgggagtgggtgtggcgctgaagctggtgctggccctgggaggcgagagccgggaggatgccctgttcgcccggtactgcaccctggcggccattggcaccatcgccgacgtgatgcggatggagggggagaaccgcaccatcgccttctgcgggctggaggccctgccccacacggacttcgtgggcgtccacgccctgctgaaggaggcggggcttctgggcaagcccatcacctctgtccagatcggctttgtgctggccccccggatcaacgccgccggccgcatgggcgcggcggatctggccgcggacctgctggagaccgatgaccccgcccgggccgaggagctggcaaaggctctgtgtgacctaaaccgggagcggcaggcggtagagcaggccatctgcgccgacgccaccgagaagatcgagcgcctccgggccgaggaccgcagcgccctggtcctctccagcgaggactggcaccagggcgtggtggggattgtggcctcccgcctcagcgagaagtacgcctgcccaagcttcatgattcatctgaaagacggcgtgggcaagggttcctgccggtcctacggcgggttcaacctgttttccgcgctggagtcctgcgccgacctgctggagggcttcggcggccacgagttggcggcgggctttaccatctccgaggagaacatcgacgccttccgggcccggatgaaccggtatgtccgctccgcctccggcggggaacgggcggtatcctgcctggacgtggacgcgcccatctcctgccccggcgaggtgacgctggcggaggtggagcagctggaccagctggagccctatggcgcgggtaatccccggccggtgttcgccctgctgggcgccacggtggacgtcctgcagcccgtgggccaggggaagcacctgaagctccgcctctccaagggcacgtgccggtttgacgccatcttcttctccatgacggaggagacgtgcggcgtggcggcgggcatgcgggtggacgcggccttttatctccaggccaataccttccggggcaataccaccctgcagctgcagctcatcgacatccgcccctctctgacccccagccgccatgaggcggcggacctggacctgctccaccgcctcgtggcgggagagggcctcaccgggcaggagcgggcccggctccaggcgtcccgcagccagttcgccgccttttggaccgtgctggagcggcagctccgccggggaaaggcggaggaggagatgctgccctttctgcggcggctgtcggcactctccggcgggtgtgagagcttcctccgggccggcctggccctggccgtgttccaggagcggggcctgatcgccctgtccgtccagggggaccaggtgacgctttcgctgaatcccatccaggggaaggtggatctcttcgcctgcccctatctgtcccgcctgcgggaggacgccgccggcaagagtggaggtgttgtgtcatgaccattcaggaacagtatgagaacctggaaaagactgtccggggctacaatcctgcggcagacttccagcacatccgggcggcctttgaatttgcggcagaggcccacaaggaccagaagcgcaagagcggggagccctatatcatccatcccctggcggtggcgcagattgtggcggaggagctgcggctggacagcgagtccatcgaggccgccctgctccacgacgtcatcgaggacaccgccgccacccacgaacaggtatccaaactcttttcacccaccatcgccgacctggtggaaggcgtcagcaagctgacccgcatccagtacgccaccaaggaagacgagcagatggagaacctgcggaagatgctcatcgccatgagcaaggacatccgggtgatcctcatcaagatctccgaccggctccacaacatgcggaccatggagtaccagtctcccgccaagcagaagcagaagtctctggagactatggagatctacgcccccatcgcccaccggctgggtatgcagcgcatcaagtgggagctggaggacctgtccttaaaatatctggaccccattggctacgaggaaatcgtctccaagctggaggccaagcaccaggagtacgaggacttcatgcgccgcatccagatccagatcgacgaccggctgaaggagctggacatcgatcacatcgtctacggccggatgaagcatccctactccatctaccggaagatgttcaaccagaacaagagcctggacgagatcttcgacctgttcgccttccgggtgatcgtgaacacggtgggggactgctacaacgttttgggtgtcatccatgatctctacaagcccattctgggccgcttcaaggactatatcggcactccaaagcccaacggatatcagtccctccacaccacggtcatcggcgcggacggcctgcccttcgaggtgcagatccgcaccaaggagatgcacgagatcgccgagtacggcgtggccgcccactggaaatacaagcagaacggccagggcgccggcaccgaagggcgctacgagtgggtccgccgtttgctggaaaaccaggagggcgcggacgcagaggactatatccactctctgaagatcgatatgttctccgatgaggtgttcgtcttcacaccgggcggcgacgtgcagaacctgcccgccggcgccacgcccatcgactttgcctacgccatccactccgccgtgggcaaccggatggtgggcgccaaggtgaacggccggatcgtcacgctggaccatgtgctgaaaaacggcgacatcgtggagatcctcacctccaagaacgccaagggtcccagccgggactggatgaagattgccagaagcagcgaggcccgcagcaagattcgccagtggttcaagaaggagaagaaagaggagaacatcgcaaacggccgtgccgccttcgaggcggagctgaagcactgcggcatctccatgaaggacgttctctcgccggagatgctgccggtgctgttgaagcgggtgtcctacggctctctggacgacatgtacgccgccatcggctacggcggcttcaccgcccagaaggcagtgagccggatccagggggagctgaaccgggtggcgaagctccaccaggcggaaaaggccgccgaggagctggcggaggccaaaccggcggagcctgccaaacagccctccgctcccaagcgggtgaagagcgagcagggcatcatcgtggagggcctggataactgcctggtgaagttctccaagtgctgcaccccggtgccgggggacgacatcatcggctttatcacccgggggtacggcgtgtccgtccaccggtgcgactgtcccaacgcctcggaggagaagcgatcccagccggggcaggaggggcgctggatcaaggtctcctggggcggcgacaccaacgacagctatcccacgattttggaggtggtgtgcaaggaccggcagggcctgctgctggacatctccgctgccctctccacgacgaatacctttgtgctgggcatcaactcccgcagtacagaggaccagtttgccatcttccggctggagatccgggtgaaggacggcgcccagctgaagtccgtcatgaacaagctgaaccagatctccggggtgctgaaggtcaaccgaccggcggggtgagagcggcttccgccggggtgattcgatggcggaagagcttccggggggatgtaggggcggcgatcaaccgcccggagatgatttgggccgccgaacggcggccacgggggattctgctcccgcagggggccgcttccacgggggatgcgccccccattgtcgtcgtcgcaaagtccgctcagctccgtttccgcctgcggcgaaaactgcgcccgctcccttgctcctcctctccccaccgcgcggggcgcggcgggggcccctttcggtcttgccaaaagagaaatgggccgtgcacggtctaaagagaaaagtgtgtggcgcgctgcggtgcagtggccctccgcgctgacggaggtcgacgtatcggtgcaagcgccgattttggcccgccttcgggcacgcttgggccttctgcgattttcctaactgccgtcccatggcgggagtaccaaccttgtcggggtggttatcgcatggaattgcttctcttttcgctgccgctggctgcccctcgggggaactggcgtagcgggccgataaaggcatcggcccctacggagataccgtcggccttgcgcattttgtgggggccgacctgcgtgtcggcccttgcgagggtgacgaaggccacaagcccggtaggggcggacgcccttgtccgcccgccagcacaagccgccacaaccgcccaggcagcgcgtagcgactgcgcagctgttggtggctctgccgtcttacggatgcggcgtgctccctgcgggcaagcggaacgcgcggaaggaggagccagtggaacactggtgacggaaatacggggagcgccgcagcgcgagacaggaaaagaggagcggttcaaatgcgcccgtgtcctccaatccaagacgcactacgccgcgggaatccgccgctaagtctgcaccgcaccccgccgcgcccgtcgggggaccctcgcaaacacgcaggcaccctctcgcgccgccccccgtacagcaactttgcacgcatgtgtaaagttgcggccaaagcgcctttttctcttataccgggcgcggcgcgttctctttttggcgctgacaaaaagagaatgggggcgcatctgcacggccgtcagcatggctgatattccccgcagaaatagaagccttccattttgagtgaaccatagaaaggaatccattgtatgcgtgcagttgtgacacgggtggctggtgcctccgtaaccattgccgggaacgtcaacggccggatcggccgtggcttcctggtgctgctgggcgtgggacccaacgacaccgaggagaccgccgaccgcctggcggagaaaatctgcaacctgcgggtctttgaggatgaaaacggcaaaatgaatctgaatctggagcagacaggcggtgccctgctggtggtgtcccagttcaccctgtacgcggacacctcctcccgccgccccggctttaccggcgccgccaagccggacgcggccatccccctgtatgagcgattcatggctcactgcagggagcggggcttcgacgttcagcatggggagttcggcgctgatatgcaggtggactcccggaacgacggccccgtcaccatcctcttcgacacagagcggcccttatgagggaagcggcgcagggcggcggcgaaatggcgccgccggagctggtgcggacgttctatgagaccgtggtctcccagcaccgtctggaggacctgccccgcttcgtcgaggagggctgcgtgctccgccagggggagtggaccactcccctgggtcccggcggcatggtgcggcatctggcggctctgcgggagacgtatccggattacacggtccgcatcctccgccagcactgggccgcgccgtatgtcgtctccgagtgtgttatggaggggacccacctgggcccttggcccggaacagtccccacgggaaaacgcctgatcttcaccggcgtgaacatcgaccgggtggagggcggaaagatcgtggagcacggcggcgctgtgaacacctttgagaccctgtgggacgcgggcatgatccgccctgcggagtgacagggcatttgtccattccacacatgggcgggcgggatttccgccgcctgcctctgatattttcatttggcaagggaggtctcccatgaagatcaagtgcttgcaggtgggccccatcggcaccaactgctatctcctctgcgacgaggatgccaagacctgcgccgtcattgatcccggcggggatggggcgcggatcgccgccgcggtggcggaaaccggctgtgtgccctgcgccatcctgctgacccacggccactacgaccacaccggcgctgtgggagagctccaggccaaatggccggagaccccggtgtatctgaatcgccgggatgtgtacgccgatgcctgcacccagcagctgttcccgctcctcagcggggacgtgcgggactacgacgagggggacacggtggctgtgggcggcctgacggtgaccgttctggccacccccggccacagcgaggggtctgtcaccctccggtgccaagacgccctcttctgcggggatacgctctttgcgggctcctgcggccggacggacttccccggcgggtccatggagaagatgatggcctctctgcggcggctggggcagctggagggagacctccgggtcctgcccggccacatggaggcatccaccctggaccgggagcggcgctggaacccctatctgctccaggccatgcagtgaggagggcgcgcccatgaaactggttttccgcggccatgacgagcggtatgtggtggagcagagcctgatgaatctgttccccggggaactgcctgtctacgagccgatcaccccaggcgatgacagctgggccgtgatctcgctggaggagacgggggacctctgccgggtggcggtctccctctgccggggcggcaagaccaccgagcagacctatcaggagcccctctccggcggcgatttccagcgggagggcctccgccgccacgccgtcggcgcctgcttcttcctggcggcccgggcggtcaccggcgtgacgcccccctggggaatgctcaccggcgtccggcccgacaagccggtgacctgggccctggaggacgggaagtccccggaagaggcccgggcgtatttggaggagcactatttcgtcaccccctcccgggccgccctggccctggagaccggcgccaccgcggccaaggccgcccggcggctggagaagcgggacattgacgtgtacgtgggcattcccttctgcccaacccggtgcgcctattgctcctttgtcagccagtcggtggagcggagctttgccctggtgcccccttatgtggacgccctgtgtggggagatctccgccggcggcgagatggttcgccgggcgggactgcgggtgcggaccttctacatgggcggcggcacccccaccaccctgacggcggagcagatggaccgggtcctcactgctttcgagacctccttcgaccgtaccgcctgtgaggagatcactgtggaggcgggccggccggacaccatcacggcggaaaagctggtggtgctccgcacccacggggtcacccgggtctcggtgaacccccagacctttgaagagaacgtgctgcgggccatcggccggtgccacacggctgcggacatcgaccgcgccatggagctggtggcccggtgcggcttcccccacgtgaacatggacctgatcgccggactcccggaggatacggcggagggcttccgccggtccctggaccggtgcctgacctacggccccgacgatatcaccgtccacaccctggcgctgaaaaagggcagccgcatcctgacggagggactgcggatccccggcgcggagacggtggccgagatgctggattacgcctctcccaccctccggaccgccggataccgtccctactacctataccggcagaagtacatgtccggcagctttgagaacatcggctggtgccgcagcggcggcgagtgctggtacaacgtggacatcatgtcggagctgtgctccatcctgtccttcggcgccgccgggtccaccaagatggtggtgccgggcaccaaccagatccagcgggcgttcaacgtgaaatatcccaccgagtatatccagcggccggagaagtggcaggccaaccagaccgccttcgccgccttttatgaagcactgtgaaaggagcatcgccatggcctattccctgaaagagatcaacgacgctgtccgctctgaccccaagggctttgcggaggcgtgcgacgccgcctttgccaaaaaagtggagacggcggcccagaagattgccgatcaccggaaggagtcccgcatcatcctgttgtccggcccctccggctccggcaagaccaccacggcattgaagatcgaagagcagctggagaaaatgggcatccagacccacaccatctccatggacaactacttcaacaccatcgacccggagacggcgccccggaaccgggagggcgccatcgactacgagtctcccttctgcctcgacatcgagctgctgaaccgacacttctccatgctggaccggggggagaccatccacgtgcccaagtacgagttcgcccgacagatgcgctccgacatcctgtctcagccgctgaagctggggcccgacgagctggctatctttgagggcatccacgccctgaacgatgtgatcgtgggaaagaatcccaaggccttcaagctgtatatcgcggcccggtccaatgtggtggacgaggacggcgccgtggtgttccagcacccctggctgcgcctgtgccgccggatcgtccgggactacaagttccggggcagcgacgccaacttcaccctgaagatgtggcccaatgtccgccggggggaaaagctgtatatctccccttataaggagaatgcggacttgatgttcgactcctccctgccggatgaggtggcggtgctgaagcccttcgtggtccccctgctggaggcgctgccccagggcaagtacgagatcgcggacgacatcctccggggatttgagcggatcgagatcatggaggagtccaacatcgcccccagctccctggtgcgggagttcatcggcggcagcatctatcccagctgagcggggctgcccctctgccccaatctttctttggaggtcatacaagccatgaatgagcggttgcaggaactgctggacgcggtgcagcgcactgcctcccaggtgggcggcagtgcggcggatgccgcctacggcatgggaaagcgggcgggggagctcctgtccgtggccaagctgaatatccggatcatggacctgaagggagcggtgagcaccgccctgcgggaggtgggggagatgatctacgccacccacaccggcaccctcacggagtccgaggtactgctggcaaagcttcaggagatcgacgggctccgccagcagatcgaccggctggagcgggagatcgctcggctgcagggcggcgcggtgtgccccttctgcggggcggccgcccggagcggcgacgtattctgccgggaatgcggccaaaagctgtaaggaggaagcgtaagatggaatatacattcgcacaatatcaggagagcgcccaggcgctgagagaccgcctgggggcgttccgcccccggtgcctgctgatcttgggctccggcctgggctctttgggcaacgaagtggagtcccccattgccgtcccctatgaggatgtgccccacatgaagcgatccaccgccccggaccacgcgggccggttcgtgttcggccgcctggcgggtcaggacgtggcggtgatgcagggccgcctccacacctatgagggctggtcctttgaggatgtcagctatcctgtccgggtgctgcggctgctgggggcggaaacgctggtagtcaccaacgctgccggcgcggtgaacaccgccttctctgccggggacatcatgctgattaccgaccacatcaaactcttcggtgtcagccccctttgcggccccaatctggaggagttcggcccccggttcccggacatgagccatgtgtacacgccccgactccaggacaccgcccgggaggccgcggaggagctgtccatccccctgcgccagggcgtctatatgtacttccccggcccccagtacgaaacgccggcggaggtccgtgccgcccgggtgctgggcgcggacgccgtgggcatgtccacggtgccggaggccattgtggccgcccactgcggcatggatgtgctgggcttcacgctctgcaccaatatgggggccggggtgctggaccagcctctttcctccgacgaggtgcttgccgccgccgccacggcggggccccagttctccgccctggtaaaggcgtgtctggcccggttataaacggcagcggcaggccataggctcataggggcagcagattccgccgccctagttctctgttgtaatttgaggtaatcgcttcatgtctaatcaaaaaaagcaatccttcctgggcggcgccgccatcctggccgcagctgtcgttgtggtgaaatttatcgggttcttctacaaagtccccctgaacaacatcctgggcggccccggcaagacgtatttcgacactgcctataagatttacaatttcctgctgaccttctccacggcgggcctgcctctggccatctccaagctgaccagccaggcccatgcccagggacgggagaacgagaagcggaagattttccgcaccgccatcgtgctgtttttcgtcctgggcacggtgggcgccctgtttatgttcttccaggcagagggcttggcagggtttctggagaacagcctggcggcccagcccatccgggcgctggctccggcggtgttctgcgtgtgcctgctggcctgcatgcggggctacacccagggccagggcaacatgacgcctacggcggtttcccaggtactggaggcgcttttgaaactggccatcggtctgccgctggcgtggtatgtactgcgcatcggcatgagcctggagatgggcgccgccgcggccatcctgggcgtcacggcgggcacggcggtctccatgctgtttttggtgggatatttgacgaagcaccggaatcggacacagtccctggatgtcccctccggcagcagccatctgatccggcagatcctggccattggcatccccatcaccctcagcaactccgcaatgagcatcctgaacatcatcgacaccaagatcgtcatgggccagctgcagaacgccctgctgctgtcggaggaatcggccgccgccctgaacggccagtacagcatggccatggatatgcccaacatggtggcctccttcgtgtacccggtgaccatgagcttgattccattcgcggcggcggctctggcccggcaggaccatgccggagcggaccggatcatctcctccgccttccgcatcatcgccattctggccctgccggcgggcatcggcctcagtgtcctctccacgcccatcatggtcctggtgctgccggcccagcgggaggatgccctggcggcgggcccccatcttcaggtgctgggcatcgccctcatcttcatctgcctgatgatcctgaccaacgctatcctgcagacctacggcaaggagaagctgcccatcttcaccgtgatcgtcggcggcatcgtcaagatcatcatgaactatttcctggtggggaatccggacatcaacatccacggcgcacccatctccacgctatgctgctatctggtgatcgtggtgctgaatctgttcttcgtgtggaaatactcgccccagaagccacggtatctcgaagttttcgcaaagcccgtggccgcttccctgctcatgggcggcgcggcctgggcggtctatggcctagccagccgggtgctggatggggctttcctcgccctggcacagcagatgtttgcggatccggataagatccagctctggtctgtatatctggccaacgccgcctgtgtcctgctgggcatcctggccggcgtgatcgtctacggtgtgctggtgatcgctctgcggatcctgcgggcggaggatgtgcggtccattccccgcggggaaaagcttattaaacttctgcacttaaaatgagaaaccgggcggccgcgcccccttcccaagggggcgatccgctaaaattccttgaaaaatcaggggtttcccgtgaatttttcttgcaaaggcaggcatcttatggtagagtttcagcgtaaggatttttacagctacgaggattttctggagatcatgcggctgctgcgggctcccgggggctgcccctgggaccgggagcagacccacagctccatccgccggaacttcctggaggagacctatgaggttctggacgccatcgaccacgacgacgccagcggcatgtgcgaggagctgggcgacgtgttgatgcaggtggccttccatgcccaaatcgaggcggagcggggccgcttcaccatggcaaatgtggtggacggcgtggcccggaagctggtgtaccgccatccccatgtctttggggacgtgcaggcggatacctcccagcaggtcctggccaactgggacgtgctgaagcgccgggagaagggccagcggtccacggcggacgcggtggaggccgtgccccacacgctgcctgccctgtggcgggcggaaaaaattcagtccaagaccgccaaggccggctttgactggacaagctctctccaggcactggacaagctggaagaggaggtccgtgagctccgggccgccctggaggccggtcaggccgccgatgcgccccacggcatccgggaggagctgggcgacacgctgtttatggccgccaaaatcgcccagatgtcgggcgtggacccggaggacgccctccaccgggcctgcgacaagtttgaccgccgcttccgcgcggtggaagaggccgcggacaagcctctgccggagtgcggtgaggcggagctgctggccctctggaacgatgcaaaatcccacgatccgtcttaatcgcgggcgcgcctgcctgcgttaggaataaatcatctagcaagcgcatcacacattgtataggaggataacatccatgaacaaagctgaactcatcaattctgtcgccgcttctgccgacgtttccaagaaggaggccgaggctgttgtgtccgccacgtttgacgccatcactgccgccctgaaagacggcgacaaggtgcagctggtgggctttggatccttcgaggtcaagaagcgtgccgcccgcgtgggccgcaaccccaagaccaaggagtccattgagatccccgcttctgtagtgcccgtgttcaaggccggcaaggccctgaaggacgccgtggcgaagtgatctgaccctgtgatttcgggactgccggtgctgtggtgccggcagtcccgtttcccatgagaaaggagccgcccatgcgtttggataaatatctcaaagtctcccgcctcatcaagcggcggactgtggccaacgaggcctgtgacaacggcctggtcaccgtcaacggcaagcctgcccgggcctcctacgacgtgaaggtgggggaccagatttccctgcgcttcggccagcgcatcgtaacggtggaggtgctggacgtccaggagacggtgcgccaggcggacgccggcacgctgtaccgggagatcggccggtaaggccggacgcatattctccccgcccctcccatatagttgggacagggagggacgcggaatgaacgactacaacaacgccatgtcccaggcgggccaccgtctggagctgatcggccgggagcggctcacggtctccggagtggaggacgtggagcggttcgacgagaccggcatcatcatgtccaccagcgtgggaacgctggtcattaccggagaggacctgcacatcggcaagctgtccctggacgggggcgagctccatgtggacggccggatcgattccgtctcctatgaggacggcggtcaggagcgggggggccttttccaccggctgttcgggtgaggcgccatggcccctgctctctcccagccgctcctgctcttctgtcaggcgatcctgctgggcatggctgcggcgctgctgtatgacctgctgcgggccttccgcctgcggctgccccgcctgacgtcggcgctggacatcctgtactgcatggccgcgggcttggcggtcttcctcttcatgctccgccgggcgcaggggcagctgcggctgtatctgctgctgggggcggtgggcggcggtgtgctgtttttcaccgccttctccccgtttttgcggccggtgtgggatttttgggtggataccctggcatttttgctgcatctgaccgccattcccctgcggggagcggaaaatttgtgtaaaaaaattggcagatggggaaaaaatctcttttattttattcgcaaatgttatacaataaaaaacaccaagcacggcagaaggctttacaaaggaggcgggcggcatggcaagagcaggacggcagccaaagaagcggtccagaggaagcgtcctcaccaagcttctgatcctggtgattctggcggcgatcggactgcagctgcgcagcctccacagccaggtgcaggacgcccaggcccagcgggacgccctgacggcccaggtccaggcccaggagcaggaaaacgccgccctggccgcggacatcgccgagggcgccaccgaggataagatgaaggagatcgcgcaggaagagctggggctgatctcccccaatcagcgtgtgttttctgtgggcaactgaccggagccgggcgacgagggaggcggagcgcctcccccgcttgtgccgggagccggtcttttttgatacgacccgcttccacgggagcgggaaaaccatccggaaggagaaacagtacactatatggagcttcaggtagggagcattttggaaggaaaggtgacctccatcaccaaattcggcgcgttcgtggccctggacaatgggaagtccggcctggtccacatctccgagatcgccaacacgtttgtcaacgacgtacatgactacctgcaggaggggcaggccgtcaaggtcctggtgctctccacggagaatggaaaggtcaatctctccatcaagcggacgctccccaggccggagcggcccgcccgcagtccccggcccagcggcagccacccggcggggacgtcccgtcccgtggcccaggcccggcccgccgcccgggcgcagcagccgctgcccccctccggcgaccagtcctttgaggacaagctgaagcagttcctctcctcctctgaggggaagatggccgacctgaaccgcagcctggacgggcggcggggcggcggccggcggcgcagataacaccagggcgcgcggcaatgccgcgcgcctttttcatgtccgccggataaaaaagggccgcccagcggtttcacgctgcgcggcccaagcgggtgggatattggaaagcttccgggattatcatacacccgccctgcatcccttgtaaataggagcttttgtcggatcggctcctcttttgtcggatcgctgcgggctctgaacaatttgtgaatttcaccggctcgccccttttcaaatggaaagatttgtgctatattaataaaaaggggagagatccccgatctctcccacacgaaaggagcgatccctatgaagtatacctttgcctgcaagagagtcccgctgaatgattccatcaaggaatatgcccagaagaagatctccaagctggagcgatacttccgggaggaggataccaccgcgtttgtcactttctctgtggagaaggaccatctgtgctcggtggagatcacgatccgcggcggcaccacgttgctgcgggcacagacggaggctcctgacggagatatgcgcggcgccattgacgccgctgtgggatatatcgagcggcagattctgaagaacaagacccgcctggccaagcgcctgcggactgagggcttccccccgcccgccccggcggacgactttgaggtggctgaggagaaggagttccccatcgtccgtaccaagcgcttctccgtgaagcccatgagtccggaggaggccatcctgcagatgaacctgctggaccacagttttttcgtgttccgcagcagtgaggatgacggcctatctatcgtctaccgccggaaaaatggcggatacggcctgatcgtcacggatgaagaggagtgacccgtacctggcagacagggcggagccgcgtcagcggctccgccctttttcgctccgccccggagatggcgcgcaatgcctcttgtccttttcggcatcttctgctatactgataccggcaaatccccgctatgggtcaaaatacgaggaaagaaagaacaatttgatgaagatgatttttttggtggacggcgacaacaacattggcaccgggctccagggtatcgacctgctgactgccgaggacaccgtcctggtctttttcggcaaggggcagaccctggccaacgtgaaaaagctgtgcgccggcacaaaggcccaggtgcagtatctggagagcgtgaagggaggcaagaactccctggacttccagatcatcacggagctgggcgtcctggtgggaagaggagaggcggatttcgcctatgtcatcagccaggacaagggatatgaggccgccatgagtgccctccacgcacgatacgcctccacgttccgggaggtggctctgcgcccctccattcaggactgtctccaggcggcgttcctgctgcgggcaggcactcgggaggagctggccgccgccctggcccggcagtacggccccgtgcagggtcagctggcctatgagcatctggaggccctgctcaccccgcctccggtccaggaggcggcggccccctcccccgcgccggaaaacaaggcggcgtccaagcccggaaagcggcgcagccgcgcggcggcgaagccggcggagaccgccgagcccgccccggcccagagcgccccacaggatgcggaggagcctgccgggacggcggagcctgccgccccggccgccagatcccgccgcagcggtgccagccgccgccggaagcgggcggagcggtccaaggcagaaaaagcatgacaagaggccgcgcctttggcgcggcctctttgaatccgccacagtgggcaacacggcgcccggccagtctggccgggcgccgtctgtcacgttgtctgctgttcgtccagggcccgcagcagggcctccacggtccgctccaccacccggaccgtctcttcgtcccggtcccgcagcagatccgtgatccgctgcacagcgtccccgggcgcgccgaagagcacatagtcggcgttcaaatccagcaggcggcacaggcggataaagttctccagccgggtgccggtgtttcccagctccaaatccgcaataaaggacacagatagatcggcccgctcggcaagcacttctctgctccagttgagtcgctctctggcttcccgaaagcggcgtcccatctctattctgtttgggtcacgttttctcataaaagcactgctcctgctgtttgagaaaagtgtaccctatttcccaataaagaaaaatatagtctagtactttattgacaacgtacaaagtactatgttaatatgaaaaaaataggacgcaggcagctgcccgcgccctaaaaagcgtattaccggctctggtccgctgtatgcatgtaggccatcagatccaggatcttgttggtgtagccccactcgttgtcataccaggcgatcagcttcacaaagttgttgtccagcatgatgccggcggtctcgtcgaagatgcaggtctctgaaaaccccgtcaggtcggaggacaccacctggtcgttggtgcaggtgatgatgcccttcatgctgttctgggcggcgttttccatggccacgcacacatcatgatagctggcaggctgcttgaggcgggcggtcaggtccaccacggacacgtcgttggtgggcacccggaagctcatgccggtcattttacccttcagctccggaattaccacgcccaccgccttggccgcgccggtggtggagggaatgatgttgcccaggacgctgcggccggtacgccagtcccggcccgcccgggcgtccacagccttctgcttggcggtggcggcgtggatggtggacatcagcgcctgctcgatgccgaaggtgtcgttgatgaccttagtcatgggggccaggcagttggtggtgcaggaggcgttggagaccacgtccatctccggggtgtaccgcttgtggttcactcccatgacaaaggtgggcgtgatgtcgtccttggccggggcggagatgatgacctttttcgccccgtgccggaagtgggcggaggccttttccgtggtgcagtaggcgcccgtggactcgatgatgtactcggcgccgcagtcgtcccaggggatgttggcggcgtcgtcttcactgtaaacccggatcttcttgccgttgataatcaggtgacggtcgtcccgctccaccgtgccctgaaaggtcttgaacacggagtcgtacttcacctgatagaccatgtagtccaggtccgcgttccgcaggttgatgccgcacatctgataggtggcgctgccgcgctccaccatgatccgcagtgccacgcggccgatccggccaaatccgttgattcccactttgatcgccatgttcccattccttcctgtattccgtattccgccgcagcggatgttgtcctcattataccatattaccggaaaatgtcaccgcaattttgcgtaaaattgcgcatataaaacgcaagatttgttgtccgttttgcacagactggacttctgttcggccgtgtctgccggacttcgacaattttccccctttttcgacaaagaccttgtctttgcatcccttttttgctatcctattggtgttcgaggcaggcttttccacggtttgaaagcccctccccgtatatgctacaagagagaatcccagctgaaaggatgcgcctatggaagcagagcaatttgacttctccgttgtgttccccaacatcgccgcccagttgcgcagcgtgttgggaaacctgcacttggcggccgcccagctggcgcctgccatccggcgggagggggatccggcgctggattccacagcttccctgctggatcagagctactaccgcctgctgcggctggtgaacaatctgacggcggcgggagagctggggcaggacgcgcccctccccgtccgggaccgggatttgacggagacggtccgtgcggtctgtgccggggctcagggtctgtttgcgctcaaaaaggtccagctggaattccggagcgctgcggactgccacacctgcgcttttcaccagccctccatcgagctgctgctctaccagttgctctccaatgccctgaagtttacccccgccggaggcgcggtgaccgtggagctgaaattcatcaaccgatgggtccgcctgtccgtgtccgacaccggctgcggtatccaggaggaccagatccccttcctgttcgaccgctaccttcacgacgatgcgatggcgccccagccccacggcctgggcctgggactgcctatctgccagcacatcgcagagcgccacggcggcaccatgattgccgagtcccggccggggcaggggtcccgcttcaccctgtcgttgccggaccggcgatgcgggactgcggacgtgtcggacgtgaagttcgattacaacggcggcttcaatccgctcctcctggccctggcggacgccttgcccccccaggctttctcccagcgccatctggactgaccctggctccggctggggtcggtttttttcgcagaagcggctttccttttttccggaaatcggctacaatagccctatcacacgaccggcgctccgtcggccttttcaggaggaacccatttatgtcccagcgtgtatttgtggccatgagcggcggcgtggacagcgccgcagcggcgctgctgctgcggcaggccggctataatgtcaccggcgtgacgctgcgcctgcatccctataaggaccgcccgggcctgtgcggctctgcggatgatatcgagacagcccgcgccgtggccgccggcatggggattccccatgtggtgctggacctgtgcgatctgttccgcgagcgggtcatggaccggtttgtgtgggcctacacccacggccgcacacccaatccctgcattgactgcaaccgggagatcaagttcggcgccctgctggactgggcgctggaccagggcgcggacgccatggccaccggccattacgccagagtccgcctcgatacgccctccggccgctggcagctgctgcggggcgcggatcgacggaaggaccagacgtacttcctctatcagttgacccagcaccagctggcccatctgctgctgccggtgggagactatgaaaagcctgccctgcgggccctggcggccgccaacggcctgtccaacgcccagaaggccgacagccaggacatctgctttgtgccggatggggactatgtgtcgtttttgcggcagtatggcggcgtggagcccgtccccggtgacttcctggactcagaaggccgtgtgctgggccgccacaggggaatggaatgctataccatcggccagcggaaagggctgggcgtcagcgccaacgcgccgcagtacgtgctggggaaggacccggaccggaatgccgtgatcctaggggaggacaaccgcctctacacccgggagctgacggcggagcgggtgaactggctctccgtaccggagccggaccgccccctgtccgtcaccgccaagacccggtacagccagcgggaagctgccgccacagtggaaccgctgcccggcggccgcatccgcatggtgttcacagagcctcagcgggccgtcaccccggggcaggcggtggtgttctacgatggagatctggtgctgggcgggggcaccatctgtccgtgacgcaaaaggacgccgcgaaagcggcgtcctgcagttcttatcgctgactggtggtccagctgtcctgaaagatcaggtcatccacatccccgccgctgatcgtctggtgtctcatcattttatttcctcctttgcatttgggttctcagccagtatatgcgcctccgggcggaaaattgcacggaaacgggcacctgtctggactttttgcaacgggagttgtcgaaaaaatttgaaaggttttccttgcccgtgcttgacaatgactggagagtatggtattctaatcattgccgacagctgccggtgtggtggaattggtagacacaggggacttaaaatcccccggtagcgatactgtaccggttcgagtccggtcaccggcaccacagaacagaatatcgcggggtagagcagttggtagctcgtcgggctcataacccggaggtcgttggttcaagtccagcccccgcaaccacaaaaccgtctgatttcgcaagaaatcagacggtttttcttcactttttgtctccaaaagtttccggagaaattacgcgattttgcaaaatttgcagttgacccaaaccgtgacccagacagggcaaaaaacgtgccttggcgcagcccttctgcgccaaggctttcctgctgtttgggattattttttcgctttcagattgccgccgtcaggactttttccatagtcctggccgcctccttttgcgccgctgtcgtgacgtgggcgtaggtgtccagcgtgaagcctgcgctgaaatgtcccagcatcccggacaccgtcttaatgtccaccccattctgaagtgccagcatagcgaacgtgtgccggaggtcgtggaatcgaactctgggcaaccccgcccgcttcagcaccgggtggagtatatgcaggacgctgtctggtgagatgggcccgccagtgggcccggggaacacccagaggct

SEQ ID NO: 4978 - DNA, 515 bp, Unknown
  gut microbiota DNA sequence
gccttcttggttttcagggaggcatctacgatttttctgctgatccgggcgatctactgtttcatccaaaggtttccgtgttcgaaatcgatgccttcccatttcgggccaagcaattcgcctcttctcaatcttgctgccagctccacatagtacatctcgaatatcctactgtttctggcatctctaaggaaggatgccagctgttcaatgggcagcgttttcatctccttgcgtttcagcttcggcaaggcacagccctctgtggggtctgctgcaatcagccgttgctctttggccagcttcatggccgaggcgatgatctggcagatgttccgcaccgtcttggggctcaaaccctttgcctgatttttgctctcgaccctgtcaattctcccgctggtcagcagcttcttgcagaatttctgtaactccagagaagtgagcttttccagcgggaccttgccgatattcgacttaatgtggttgttgatgtacccccggtaggtctggtg

SEQ ID NO: 4979 - DNA, 242 bp, Unknown
  gut microbiota DNA sequence
ttcattggaaacaaaatggacagaaaaagaaattggttttcaggtggaattggaggaagttaaatataccgggaatgaaggactttttatgcatatctggataaatcttttggataatgcgattaagttcagcccttcaaaggggacaattacgatgtttctgaaacaaaaacaggattctgttaagttcattctggaagatgaaggaccaggaatagaggatgatgtaaaatccagaatat

SEQ ID NO: 4980 - DNA, 22934 bp, Unknown
  gut microbiota DNA sequence
ataatggaacgtatttttcctaacgtcaccttgatatgtgccgattctccggagatagctgcataaatcttactaaattcatgccgcaaataccgttcagcctcctccatattcataccactcaggtagataggaccgatattctccaccatgatattaccttccggagaaatagtctctcgtaccgtattttccgaagttccccatacatcgataatcacttcatcccccggccccaacctataattttccggagtaggaatatttaaatttggctcaaatgacaaattccggctggcaaatatattgcgtccaaaaacctggagttgtttactctgctccgtaccattttgtaactcttcctgttgagcctttgtccatccgataaatgatagcaacagtaaaaagactaatactttcttgcccatctttctaactcattctataaaattatttttcttcttaaatctccgaaaatcataaagtatccatatcagacaagcgagtagtcccaatatcacacttccaagaatacatcctaataaaaccatagcagttaactttttataaaatctcaataaaacattcttattatcaatacattatagtccaaaagatgtgtttttaaacgtacgtttaaaaacacaccaaaaacgagtgatttattacgagaaaggatacataaaaatgaaaagagaaaatataaaccctaacaactatcacctatttgagaatgaggttatttcaattaaaatagaagtaaaaaacaagtctttttattaaacactttgtgtatttaaatattagccctatctttgtgaacaaataaacgtacgtttaaaaacacattccacttactttctttcatccccgattttatagcattttcccaacttagcagacttataatccggaataatcttgtatttttgcgccacgactattcaaaattcagatatgatgacccgattttcttttgtccttttcgcattaatctcacttctgctaaccgcttgccaagataagcagaaagtagtttccaacaccgaaaacgggacttccgtgccactttcatacgcccaaggatttggtataacacattcctccggatacaccacaattacagtatacaatccctggaaaccaggagaaatttatgatacctactatctggtgaaaaacgaaggtcaggcagttcctactgacggactaaaagtagtaattcctctaaagagtataatgaccaactcagccactcatctgggattcctcgaacttcttggagaattggacaaagtcacgggagtctgcaactcaaattacatttataaccctactatccttcaaggtgtaaaagatggaacaataaaggatttaggtgacgctttcaatctggacatagaaaacctacttctactacatccgcaggccgtaatgacttctgcctacaatgccgaggacgaaaacagccgacgtatgaaacaaacaggattacccattttgtataatatcgaatggcaggagaagtccatcttgggacgtgcagagtggattaagttcataggagcttttttcgataaagaaaagcttgctgacagtatctttagtcagatagcagaacaatacaatgaaatcaaaaagaaggctgaaaaattatcatacgctccttccattctttccggacaagattataggggaacttggtccatgccaagtggaagaagctacaatgcgcaactctttcgcgatgcaggtgccaactactattatgccaatgacaccacagtttccggaagtatatccagtagtatcgaagaagctttgatacacttcaaccaagctgatatctgggtaggtgtacaagccaacacactcgaagatttgggaaagatggatcccaaatacaaactatttaaatcctataaaaatggtaatgtatatcatataaacaaacggacaaacattaccggaggaaacgattattgggaaagtggagtagcccgcccggatctgttattgaatgatatgattaaaatcattcatccgagcctattaccagagtacgaattgacctacatggataaattaaagagtaaatgaaacactaccgactgtttttactattaataggattgttagttttggcctttctggcagatatcgccatcggaagcgttagcttgtctatacgtgacgtatggaatacttttatcggtagcaacgataaccttatctaccgggaaatcatcttgaaccaccgactccctaaagcactgacagccattttggcaggagcctcactctccgttgccggagtgttaatgcaaactctgtttcacaacccactggctggtcccgatgtgttgggagtaacttccggtgccagcttaggagtagccttactgactctcggcacctcttctcttccgttgtggctcattacaggttggggacaagtgactgctgctattattggagctataggggttttattattggttattattgtctctatcaaaattcctcaaaccatctcgttactgattataggtatgatgtttggtaactttgccggtgccatcgtgagtatcctgcaaagtatgagtaatccggataccctgaaactattcatcacctggacctttggaagtctttcttcagtaggctgggaacagatgagcgtgatggcacctgtcattgcctgtggaattctgactgcattactattacaaaaacaactcaacatcttgctgctgggaaaaaactacgccaacggattaggggtctccgttcctcggctgcggctttggattatcctggctacagcactcctggcaggaacctccactgcttttaccggtcccatagcctttatcggcatcacgatgcctcacgtagcccgtggcttattcggcagccccaaccaccgcatcattcttccagcctccatgctctgtggtgccatcacactgttagtctgcgatttaatttcccaactacccggaatgcaaggtaccctacctatcaacgcggttactgccttgtttggatcccctattatcgtatggatcatactacggaattcatatatcaataaatagaagtacacgaatagactattttcactggagtacaagactacttaatgaactaatgtgactgtctagtattccatttacaaagatactttctgcatcagcctactatattcaaacgcaaaggggatgcttgtaagcatcccctttgcgtttgaatatatcactaataagagagcaggtccctccatcaagcgtttttttattttttcacaagtaccattaccagtgttccgtctgcactataaaatccgatacctcctccggataacacatcgaatgacttcacctcgttgatagctttcatcactttgccttccacttccatatcaggacaagccatcatagtagaaataacattagggaaagaaatggaacggggattctccttatctgtttcaaatcctccattaatcaaattacatcccgcattgccatgaatggacttcttcttcacgtcaaaattgataaacggttgtttttccatacccgaagggatagcttctccattcacttcttcgattttccattcaccattcaaagcagacaactttacatccgaagctttcttctgaagaacgactaccggacgattggaagcgttgcaaagagccatattatgtttacccagttttttataactcttcacctgtcccaatgcattcagcacattttgttctgtcgtcatatccggacaagccatacgggtactccccaatcggctcatatcgatagtaccgggttttgaattgagatctatagatcccatcatacggttacaaccactattaccatatactttacccgtagctgtatcaaaaccaataaacggcaattcctgattttctgccggcacaatggccgagccattcacttcaataatattccattcaccatttaaagatgataaagaagcggcttcttttgtcgaaccgcaagatgacatagcgaatactgcactcaccatacaaattgaaagtaatacttttttcattgtcatactgtttaagttaaatatcggcgcaaatatataaaaaaataacataaagttgatacatttgccgaattaagataaacagaacaaacaaacgaatagttcaatttaacaaaatataatcatgaaaagacgcctcagaaccttattactccttcttttgatagccaccagaacattacttgcacaaaacagccattttgcaagttcctcctcccccggctccctatcacccgatgaagaaacggatttcataacaacacatttccccttaaagcagttatgtaaatggacacccggaatgaagtttatgttcatccccgatagtagtgatgaattcgtccccatattatgcaaatatgaagatgggaaagaagtcgacaacgatttgctcaaaagtaaaacgctggaatataccggttcggaagaaactgtacatgaaacgtatatcggcaagatttatacttcccgattcatattccagtgtgaagatcataaatactattatgagatgaaagatgtcaaactgaacgatttgtgtgatcaaaatccgtatgccagcatccctgccctcgtctatctgcaagatgtaaacaaggccaaggaattattaattgggaaaacgctctatacgcgtactaccatagcaaaaacagacgatgccaacagctattcagaatatagagaagtcaatatcgcgaaaggtgaacctgtcaaaattacaacaatagatgtcggtaacaagtccttcccggtaaaaatcacttttattgaccgcaagggagtttcttattatattgatgtagccatgtccagaaccaactccggtatggaacctgcagattttcaagcggagaaaagaataaactattttccaaatgcattttctttcaccaatccggatgtcaaaaccagagagtctatccagtccaaatacatcggacagtctgtttatcctcaaaagacaattcgggtcaagcaaacagagttattacgttataccccattacatatcaaagatgtacaacctgaaaaggcaggaacatcagctacactccttctgacagatattcaaggaaacacatatcaagtcaaagtagatttgaaatatgatccgatccttaaaaatgaagatttcatagaggaccttttcggattctccgacatacgaaagaaatatccaaacattagtgaatccaactggcttatgcttgccaaaggagaagtaaaaccgggcatgacaaccgaagaatgcaaattagcaataggagaaccgatagaaatcagagttcggacagacacccgctttgaaacctggttatatagaggaaagatattggaatttgaaaatggcatcttgctccgggctaaataaagaaacttaaatcgtcgaatattctgaaataatgccgtatatttgttccatcaacaattcttaaattcttaatttaaaattcttaattaaagaaatgggtagagttcttattatcggtgcaggcggtgtaggtaccgttgtagcacacaaagtggcacaaaatgccgatgtatttactgatatcatgatcgccagccgcacgaagtcaaaatgtgacgacatcgtgaaagccatcggcaatcccaacataaaaacagcccaagtggatgctgataatgtggacgaactggtagcactcttcaacgattttaaaccggaaatggtcattaacgttgcattgccttatcaggacctgaccatcatggaagcctgcctgaaagcaggagtcaactacctggataccgctaattatgagcctaaagatgaagctcactttgagtacagttggcaatgggcctatcatgaacgtttcaaagaagccggcctcaccgccattttaggttgtggattcgatccgggagtaagtggtatttatacggcatatgccgccaaacattattttgatgagattcaatatctggatatagtagactgcaatgccggaaatcatcataaagcttttgcaacaaacttcaatccggaaatcaatatccgcgagatcacccagaacggacgttattatgaaaatggccaatgggtgaccacaggtccactggaaattcataaagatctgacatatccaaacatcggtccccgtgattcatatctgttgtatcacgaagaattggaatcattagtcaaaaacttcccgaccatcaaacgagcacgtttctggatgacattcggtcaggaatatctgactcatttgcgtgtgattcagaatatcggaatggcgcgtattgacgaaatagattacaatggacaaaagatcgttccgctgcaattcctgaaagccgtgttacctaatcctcaggatttgggtgaaaattacgaaggtgaaacttctatcggttgccgcattcgtggtctgaaagatggcaaagaacgcacttactatgtatataataactgtagtcacgaagaggcatataaagaaacaggtatgcaaggagtaagttataccacaggcgtaccggctatgatcggtgccatgatgttctttaaaggcgaatggaaacgtccgggtgtaaacaacgtggaagagtttaatccggatccgtttatggaacaattgaataaacaaggcttgccttggcacgaagtattcgatggaaatttggaactgtaatcaacataacaatatgcctattggctatgcctaaccctaagtaagtcaatcggcatatttattattggaagaatcatcaaaaatgaatgtaggagataaagccccagaactgctgggtatcaatgaaaagggtgaagaggtacgcctcaacaactataaaggaagaaaaatcgtcctttatttctaccctaaagataacacttccggctgtacggcccaagcttgtagccttcgggataattacgcagagctacgtaaagccggatatgaagtgatcggtgtaagtgtagacaatgaaaagtcacaccagaaatttattgagaaaaacaatctgccattcaccctgattgccgatactgataaaaaattggtagagcaatttggagtatggggagaaaaaaagctatatggccgtgcttatatgggtactttacgtacaactttccttatcaatgaagagggagttatcgaacggatcatcggacccaaagaagtaaagaccaaagaacacgcttcacaaattttataaatcgatcattatggcaaagaaagaagacgaattaaactttgaaacagataataataaaatggcatcaagcgaaaaattaaaagccttacaggctgccatggacaagatagagaaaagcttcggtaaaggttctatcatgaaaatgggtgaagaagtggtagaacaagtagaagtaattccaacaggttcgatagcactgaatgctgcattaggcgtaggcggttatccccgtggaagaatcattgaaatttatggtccggaatcatccggtaaaacgacactggccatccacgccattgcagaagcacaaaaagccggtggaattgccgctttcattgatgcggaacatgcttttgaccgcttctatgcggctaaactgggagtagatgtggataacctgttcatctcgcaacccgataacggagaacaggcgttggaaattgcagaacaattgatacgctcttcagctattgacatcatcgtagtggactctgtagccgccttgactccgaaagctgaaattgaaggggatatgggtgacaacaaagtgggcttgcaagcccgcctaatgtcacaggcattacgtaagttaacatcagctgtaagcaagactcgtacaacctgtatcttcatcaaccagttgcgtgagaaaatcggtgtaatgttcggtaatccggaaacaacaaccggtggtaatgcattaaaattctatgcttccgtacgtttggatatccgcggttcacagcagatcaaagacggtgaagaagtgattggtaagcagacgaaagtcaaagttgtgaaaaataaggtagctcctcctttccgcaaggcagaattcgatattatgtttggtgaaggcatatcacattcgggagaaatcattgacctgggagcggatttgggaattatcaagaaaagcggttcatggtatagctacaacgacaccaaattgggccaaggtcgtgatgcagcaaaacaatgtatcgccgacaatccagaacttgccgaagaactggaaggactgatctttgaaaagttgagagagcacaagtaagtgtaatcaataaacaacgatcggcagtgttctatcgaacaaccgccgatcgtttattatatatcttaattcatcatattccgtttttccaatgccaacggataatatttattcagcagcatagcccactccgctaccaactcgataggtatgcccggaccattttcatcgttagattcggcaaacatccttaaccggtcgtccaagataaccaaacgtcgtatctccggctctctctcacctaatacttctacaataatgtccaattttgttgtttcattttgactcatagtatctatttttaattcagtcattaaaagtacatctttttcgccaaagatcttcatcttacttattcttttttcgctttctttgtaacaaaattcctcccgttacgtcttaaggatataaacattgacaagaacgaacacatggataccgaaagttttaaaagagagtttctaccctatcatcgcaagctgtactgcgtggcctatcggctattggagaatgctgctgatgcggaagacttagtgcaagaagcctatctgaagctgtgggataaacgggaaggactgtcggttatcagcaatcctgaagcattcagtgtcactttagtaaaaaatatgtgttttgatttgcttcgttcaggaaagtatgttctgtcccgacaaagcgtggagctatcagccgcccaagatgtttttcaaccggacaatctggaagcacgtgaaggggtacgacaaataaaagatattattgcccacttacccgaacaacagcaacgaatcataaatatgcgcgatattaaaggttgttcatacgaagagatagaacaagtcactggattaaactctataaacgtccgtgtgctactgtcacgggcaagaaaaaagatacgtgaagaatttaataaatggaataattatgaaagtcgaagaaattgaaaggctgctcgccgaattttatgagggaaccactaccgagagccaagaagaggtgctgagaaattatttcagaacaacggaagtgcccggacatctgctgaaggacaaagaaatttttctcaatctttgcccggatgccgaccaagatatagaagttcctgcacatctggaagacaaactaaatctgctgattgacgaaatggccgagaaagaacaacactttttccgccccaataactccaaaaacagctggcactggattggaggggttgcagctaccatattattgcttataggcattggatacgggattgacaatttaagcaaaaatgtatgcccacccaccccacaagatacattctccgatccggaagaagcctaccggatgttacaagcaactttactggagatttctgccaacctcaactatggactcaatgaggtgaaagaaagccagatagatatgagaaaaatacatcaagaagtaagaaatgaaattaaaaaataaacaattatgaaaacaatgaaatttattttggcatgcgtactgctattgtctcctctgctttgccaggcacaaaaaaacttattcaacaagtacaatgacatgaaaggggtatcctctgtttatatctctaaagcaatgatggaattaaatccgaatctatttatgaaggacctttatataggtaaagtagcagaacatttgaactctgtccaagtgctctctacacatgataataaggtacgtgaagaaatggccaaagatatccgttcattggtgcaatcatccaaatacgaattattgatgaaacaaaaaagtacggtttccggttcggaagtttatgtaaatcgcaaaggaagtaaagtgaaagaactgattatggtaatgaacggagcatcttctctaaaatttgtatatatggaaggggacatgactacggatgatatcaagaagttaatgttataccaaagcaccagtcaaaactttataatatcaggagatctgttttatgcaaataataaaccggttacttactttaaaaaagaaaattcggacaatcaaaaagacatggcagagttaagtggaacctataatttaaattcgatagatatgaattataaagaagaactaagtaccttaaacgacaaattaaaaagaattgaacaagggctcaaaaacataaatataaagtagaaaatcataaaatagttattatacaaaataaggtacgatgcccaaatacatcgtaccttattttgtataataactatttatcctgaaattagaaccaataaatataggccagagtgctcaaactaatcactacccacagaagcactccttgtatcaaaggtttgatgcctacggacttcacaacatccaatgagagagaagctccaataaagaacatagtgatagtcaatgttttgcgagccaacccattgatagcggcccccaattcaggtacactacccaacaaataagtattcacaatcatagccaatacaaagaagaagataaaccaaggaatactaatcttctgccctttgctcttaaatatgaacgaagtagcaaatgccatcggaataatccaaagagcacgtgtcaatttgatggtagtagcaactttcaaagcttcttcaccgtatgctgcaccggcccccaccacagagcttgtatcatgaatggcaattgcggcccatgttccaaattcatgctgactcatatttaaagcgtgtccgatcaccggaaatataaaaagcgcaagagcattcaatataaatatagtcgccaatgccacagacatttcactatcattagcctttactacaggccctacagcagcaatagcgctaccaccacagatagcagttcctgaactgatgagataagaggtgttacgatctacctttaaaaacttacgcccaatgaaccatcctaaaatcagagtgccaattactgaaacaatcgtaaactccattccttctttaccggaagcaagagctgaatgtaaattcataccaaaccctaatcctacaacagaatattgtaatagatatttagatgtctttttgttaaatttcggatgggcctgtccacaagtcaacgcaaaagctaatcctagaaaaagagccaatggcggagtaacccatgtagaaaatgcttgcaaaccgggaatataatccaacattaaaaagaaagtcaaaatagaaagcaaagaaacatagaccgttttgttgtttgtcctcaacgttttcgtaatagctgataccatatcttattatctttatttatttttcgggtgcaaagatacggctacttgtcggtatatgccaattgcatctaattatactctataactttttgttatgatgcatagcaaactgcatcaaaacttgtgataacccactctcctgtccttgcggttgtgcaaaacagaactcacgtagcattggcatacctttaatctcaataacacgaaaagtacctgaaagtaattcacgactgatagaacggatagaaacaattccgatacaatctgtatgttctaaaaacaacttgatactctctgtactgcctaaatataaaagtacattcaaggatgataatttcatattatgttcggacaaagctctctcaaaaacatccagtgtgcccgaacctctctccctgagtacaagcggaattctggatagatcctccggagttatctcatcaggcaatgaaagcttgctacctgtatgaacaactgccactaattcatcctgtaaaaatgtagtatatctaagattgggcaagcgacaaatgccctctaccagccctaaatcaatgcgatgctcctgcaaagcagcctctatctctctggaattcccattcaataatgaaagatttacttgagggaacttggctataaaattagcaagcaaaggaggaagcacatattgagaaatggtagtactggcacccaatttcaaatcgcctatatattcgttatgcagcaaatgcatttcgtattccaaccgcttatagtcctccaatatcttttcactatgctcctgcaaaagcttacccgcttctgtcaaagaaatcttatttccctgccgatcgaataaccgaacctgataacaagtctctaattcctgaatatgtttagttatggcaggctgactgacaaacagctcttgtgaagccttagtgaaactgaggttcttagcaacgcttaaaaatactttcagacgaaaatcagacataaatataaaggcttattgtcaatattacaactcttctcccctgattcccaatgcttgcatcgcgggatatgccaacatttcccattgatatccttcaatactctcctccggttcattcatacggaactgaatggtttccttattcttgacaccttttaaccgttccattaccttatcaccatattcttcattgaaagaaaccaaaatcagccgttccacatcggcagaatctaaaacgatactcagcagatccaaatataattcttcacgagataccatttcctcacaaggtacactggcaaaagaaaattctccgaactgactcttaaatgccaccccattcaattctgccgataaatcggaaggtcggcaattagacaactgagccgaatctttatcatataccattaatatttgaatttgattatcgcctactgccatacctgcatcaagtactatataagttaccagttccgagagatcaatctcttgcagttcacgcatcaaggttttctcaaagtacttcttcagatccgtcacaactagattcagaaacgctgcatcaatcagtaccacattcgaaggaaactttattttttcgtccatatcgtaattccttaataattatattgagggcataaagatacaacatacttctaaaatgctcttacattcggacacaatttcctctacaaaagaaaatatatgacattttggcttttatttttcttaaaaagctgaaaaaaagtcagtttttaccccatggcaaatcttttgcgcctctaatagtgttattgaaaacaagaataagaaaggagaacaaacgatatgaactttaacaattttaccattaaatctcaggaagctgtacaagaggctattaacctggcacaaagtcggggacaacaagccatcgaaacggctcatatcctgtacggagtgatgaaggtaggcgaaaatgtgactaactttatctttcagaagttaggactgaacggacaacaaatctccctcgtactcgataagcagatcgactctttcccaaaagtttccggcggagaaccttacttgagtagggaagcgaacgaagtctttcaaaaagcaacgcagtactccaaggaaatgggcgatgagtttgtttcattggaacatcttttgctggctttactgacagtaaagagcacggtgtctaccatcctgaaagatgcaggaatgaccgaaaaagaattgcgtggtgccatcagtgaattgagaaaaggagaaaaggtgacctctcagtccagtgaagataattaccagtcactggaaaaatatgccattaacttaaatgaagcagcccgtagtggtaaactcgaccctgtgatcggacgtgatgaagaaatccgacgggtacttcagattttaagtcgacgtacaaaaaacaatcctatattaataggtgaaccgggtaccggtaaaacagctattgttgagggattggcacaccgtattcttcggggtgatgttcctgaaaacctgaaaaataaacaggtatactcacttgatatgggtgcactcgttgcaggagctaaatataaaggagaatttgaggaacgactgaaatcggtagtgaatgaggtgaagaaatcagaaggtaatatcatattattcattgatgaaatccatactttggtaggagcaggaaaaggagaaggtgctatggacgcagctaatattctgaaacctgcacttgcccgtggagaactacgctctatcggtgctaccactctcgacgaatatcagaaatattttgagaaagataaagctttggaacgtcgtttccaaatagtacaggtagatgaaccggacaatctgagcacaatatctatcttacgtggattaaaagaacggtatgaaaatcaccatcacgtacgtatcaaagatgatgcaatcattgctgccgtagaattaagcagccggtacatcactgaccgttttttacccgataaagcaattgacctgatggacgaagctgccgcaaaacttcgcatggaggtggattctgtccctgaaggattagatgaaatctcacgaaagattaaacagctggagattgagcgagaagctataaaacgggaaaatgatgaaccgaaattacagacaatcggcaaagaattggctgaattgaaagaacaggaaaaatcatataaagcaaaatggcaaagcgagaaaagcctgatggatataatccagcagaacaaagttgaaatagaaaatcttaaattcgaagctgacaaggcagaacgtgagggaaactatggcaaagttgcagagattcgctatggcaaattgcaggaactgcataaggaaattgaagatacccagaaaaaattgcacgaaatgcaaggggatacagccatgataaaagaagaggtggatgctgaagacatcgctgacgtagtatcccgctggaccggaatacctgtaagcaaaatgatgcagagtgaaaaggacaaattgctccaccttgaagaagaattacatcagcgtgttatcggacaagacgaggctattgcagctgtgtctgatgctgtacgccgcagccgtgcaggcttacaggatcccaaacgacctattggttccttcatcttcctgggcactacaggagttggtaaaaccgaacttgccaaagcgcttgccgaatttctgtttgacgatgaaacgatgatgacccgtatcgacatgagcgaataccaggagaagcacagcgtttcgcgtttagttggagcgcctccgggatatgtaggatatgacgaaggcggacaattgacagaggcgatccgtcgcaaaccctattctgtagtattgtttgatgaaatcgagaaagcacatccggatgtatttaatatcttgttgcaggtactcgatgacggacggttgacagataacaaaggccgtgtggtaaactttaaaaatacaatcatcatcatgacctctaatatgggtagcagctacatacagagccagatggaaaaactgaacggcgccaacaacgaggaagtagtggaagaaaccaagaaagaggtaatgaacatgttaaagaaaaccatccgtccggaattcctaaaccgtatcgatgagactatcatgttcctgccattaacagaaaaagacataaaacagattgtcttgttacagattaagagcgtacaaaagatgcttgccggtaatggagtagaactagaactgacagatgcggctttggatttcctctcacaggtcggctatgatccggaattcggtgcacgtcctgtaaaaagggctattcagagatatttactcaacgatctatcgaaaaaattattggcacaggaagtagaccgtagtaaagcaatcattgtagatgcacaaggagacgggttagttttccgtaactaaagaattaaaaggtaataaacaacagcgatttgccggtatgccttatggtataccggcttttcttttttttaaagttcaataaatgactctcctaacttccaccggataggataaacagtgaattacaagcacatacatacctttttgaggtaatgtaaaagtagcagaagattttgttgagtgaattttccctattaactcaccctgctcactatacagatataccattgtattaacatccagatgctctaacgataaaactccggtaaaatcatccagtttcatacaaattccgctatttcttgctgctttcatgctcttttccttccttctatccctcccggttccctcgaaagaatctttcgtatataaaaaagcgtgggaacgttgtaattatcgtacctgaggctctggactgccactattcaaataatgtacaacaacccacgctcgatactatatatttgcatatacagcagagcatgagcgttcgttacattattcctgaatagtgaaattgtccagatttcaagtacagaataatatcttaaaaacgcttttgttctttttgtgtaatattcctcgtaacactgactcttcaggttccgacggattgcaacaaagataattaaaaagccctgaatacgacaaataagttctctaaaatattctatgcaaatttcatatagtcctgcaagaacagcttaaaaaaacttttgtttatagagatataataaaaaaataaaagcacaataccctttaataaaggacattgtgcttttaactaaaagtgtggtagatttattctgcttcaacggcagtctcttcaccaaagtctgtaattccgttagagactaagatattataccacaaaatcaatttcttgatatcattggtatatactctgtcacgatcaaagtcaggcaaaacctcagccaaatattcacgtaattgctcagaagtagctttcttcacatctatagaagcgatagctgcattttctttttcttttattgaacgcaacacgtcacgtaaaggcacttctgaatcgtttgtgtacattgctatatctgccagagagataattttttcgttaccataagcagggaaacgtttcttagctgcatcaattgtttctacaatcaacatatttttaccctgcgaaataagcttatacaaccccggtttgccggagatagacaaaatagtctttaacatagtatattacttttatattagttattttttgcggagcaaaggtaatgaatcttttgatatagaaaagcaattagctctaaaatctgtggtatcaacggcttttcaccatcgtttattatgacgaaagaagccctctcacatttttcttcatcactcatttggctccggatacgctgcataatctgctcgcatgaagcattgtcacgccgcaccgcacgttctaccctgagttccaaaggcgcgtagaccatcactatacaatcaacttcatccgcaaagcccgattctatcagaattgccgattccatacctattatatccagacactctttgtgtgaactccattgcctgaaatgctccttaaccctcggatgtatgattccattaacctgagaagcatgcgtcgaagaagcgaaaagatatgtggccagtaaagtcttatttaatttgccgccagaaaaaacctcctctcctactaaatcacacaactctttacgaataacaggatcagtggccactactttctttgactcttcatccgagatatagacaggaactcccatcacttcaagtaaatgtgaaacgacacttttaccactaccgattccgccggttattccaattttaattgccatcagaagagagttgttctatcaaaaaatcaacctgttccggatggattcgcacatgacttactccacgtggaagagatttcaattttacagtatatttatcagtacccaatttcaaaagttcttcataagaaacattcacaacaaagtcacttgcgttaacttcgcgaaaacgacttaatccaacttgaaacgtaacctgaactttagatggaaatgccctcaataccttatctgcaggaaaattgataccacgtaataagacttcaactgttttctccgtatatatatccacgggtaaagtcaaatcaatagccccgggaacaaatttggccccctttactccggcaagcgctattcgctgcttcaatgtatccattacattttcaaaattaactttttgcgtataagctgccgttattgtatccaatatagccacaggggcatataccaaaacagaatccggagaatagatcgtatcggaaatataatattggcgccctgcaacgactttaccttccaatttgacaggcactagtttagactttccggtagaatagatatactccagagtatcaggctttacagacagcaaacgggtcgatacattaagttgtcctgctatttttttctcaagttccgacgcataaatcttcacatgattatcaggtactttcgactcggaaaaatcgatattaacgggaaaaaagcttttacccaacatatagttcagcaacaccgttcctttatcttttactttaatgcggagttcagaaggaggttcagaagttaaaaccacatgattgggcactcctttcaaacggacaggaatagaaaattctgcttcataatcattgtttaacgtttgaagcaaccaaaatccgcctgcaataaaaaagaaaaataaaaaaattaagaactctctgctcttatcactaagcagaaagtccttaatctttcttgataattttaaataaatatactttatgttcctacgttcgaacataggctttatttatttttagttccttatttcgtagcagactgactgttggcagcagaagcatctgcaaaaatagagttcttatctatcttaatttttacattagaagcgatttcaagaacaatgtaatcatcattgatttccttaatcacaccatgaatgccaccagcagtaatcacattctggttaacctggagagatttgcggaaattagcgatctctttctgcttcttgttctgcggacgaatcatgaagaaatacatgataacaaacattgctatcagcatgatccacatcaaactaccgtcagggccagcagcaggagcttgaaaaaatacagttaataggttcataaaataatcagttttattagttttttaatctatttagacaaaggtattagttttttgtcaacttaccttctttttttaattgattaactattccgtccaatgtaccattgataaagctaccgcttttcactgtactatagagtttagcaatctctacatactcatttaacgaaacgctgaccggaatgttcggaaaactaagaatttctgctaatgcacattgcataataattacatccatgaaagctacacgatccaaatcccagttctttgtattttcactgatcaagtgccggtaatagtcggcatttaaaatggcccgacggaacaaacggcgtgcaaactcctggtcttcgtcatctttgaactcgggtaacaatggttggttagctccctgtttttcttcaaaacgcttaatggtcttcaatacaaatgtatcgacaatctccttatcatcattccaatataaactctgatcttccaacacctgatctaacgaatcattattaaaaacgaaagttttatagagttttctccataattcacgatctgcttcataagatttgtcagaagaagccatatactccttgtatatatcggatgcaataatcttttcgtataattctttaatgaagtcctgatcattagcccaggtccttttctgattagctataaattcgctcaattgtttattcacttcgagttgtgcaacaaatttattttccacaaacttcatgttaggatacaactcttctttagtcggcgctagtttagctttcgctgtgtcgatgcgtttttgtgcatattccgtcaaagcaatcataagcatcagcaaatagttgtacagatcataagcctttgagaggctaaagaacaactctttctccgctgagtctaaatttttgctgccgttttgatagtaagcatacactatctgtatgatctttagacgaataagaactctgttaatcataatcttaattaatactgttattaacgaattgcaaaagtagacatttttaatgagtttacacaaataaatcacattttttaatgcagtatttcattctctttcctttttcttttgacagtttaaaaaaaatatccaattttgaagccaattataaacagacctaacaatatggaagattttaaaaagaaaataggaacagacatgaatgataaagagatcgtattctcaaaatcaataaaggccggtaaacgtatatattacctggacgttaaaaagaaccgcaaagatgaaatgtttcttgccattaccgaaagcaagaaagttgtgatgggcgaaggagatgactctcaagtaagctttgaaaagcacaaaattttcttgtataaagaggattttggtaaattcatggccggactcgaacaagctatcaacttcatcaatcagaatcaagaatatacagaagattccgaatcggaggaaaaagtcgaacctgaaagtgaaccggagactacagttttggatagcgaaatcaaaattgacattgattttgaataattaaaggcatcaattctttgatatttcagaaagaaagtgtaattttgcaccgctttttgcacatcgtgtgataaccacatcgtgtgatggtgaattaagcaagcaaaataacttaatttagagtaacacaaaaaatttcaagaaatgagatcaattgaagtaaaaggaactgcaagaacaattgcagaacgctcttctgaacaggcaagagctttgaaagaaattcgtaacaacggtggtgtaccttgcgtactttacggtggtgaagaagtagttcacttcacagtgaccaacgaaggacttcgtaatttggtttacactccgcatatttatgtagttgatttggttattgatggcaaaaaagtaaatgccattctgaaagatatccaattccacccggtaaaagatactatcctgcacgtagacttctatcagattgacgaagctaaacctattgtaatggaagtacctgtacagcttgaaggtcttgctgaaggtgtgaaagccggtggtaaattggcattgcagatgcgtaaactgaaagtgaaagctttgtataatatcattccggagaaactgactattaatgtatctcacctgggtctcggtaagacagtaaaagttggcgaactaagctatgaaggtttagaattgctgaatgcaaaagaagctgttgtatgtgctgttaagttgactcgtgcagcaagaggtgcagctgctgcagccggaaaataatatcggttatccctttaacaaagatatcattcaaacgcagattaatgcagattttacgatctgtgttaatctgcgttcttatttaaaacaaacagattgaaaagatatgaaatacttaattgtcgggttaggcaatattggtccggaatatcatgaaacccgccataatataggttttatggtattggatgctttagccagagcaaacaacctatcattcacagatggtcgttatggctttaccactaccctatctgtcaaaggaagacaaatgatcttgttaaaaccctcgacattcatgaatctaagcggcaacgccgtacgttattggatgcaaaaagaaaacattccattagaaaacgtattaatcattgtagatgacttagcacttccctttggtaccttacgcctgaaaagcaaaggcagtgatgccggtcataacggattaaaacacatcgcaactatcttgggcacccaaaactatgcgcgcttgagatttggtatcggtaatgattttctaagaggcggacaaatagactttgtattggggcatttcacggacgaagactggaaaacaatggatgaacgtttggaaacagccggagaaatcgccaaaagcttctgtttggcaggtatcgacatcacgatgaatcagttcaacaaaaaataattattcatttttcaattcataatcaaatgcctgaagcaagaatagataaatggatgtgggcagtccgcatcttcaaaactcgcacaatcgctgcagaagcctgcaagaaaggacgaatcagcatcaatgggtcgtttgtaaaagcagctcgtatgataaaacccggagacgtaatccaagtgaaaaaacctccgataacatattcctttaaagtcctgcaagccattgaaaaacgggtgggtgcaaaacttgtatctgaaatgatggaaaatgtaacaacccctgatcaatacgaacttctggagatgagtaaaatcagcggttttattgatcgggcacgaggtaccggacgtccaactaaaaaagatcgccggagcattgaggaatttactactcccgaatttatggatgacttcgattttgatttcgatttcgaagaagataatgaataaaaaatccccgacagccgtcacggacaccggggaggtataaataaatggacttatttatttataaaatcgtccacccggccgatggcctatcagccggatggagatagaggtcaaaacttaaatccgatcttaaatgtcggagcggccagcacactgtagttgtggctgtctgccgacagatcgccaagacctgcttgcgggttatacgtagtcttattgtacgtataagcaaacggatcgatctgcgcaccgatatagagtgcaggaagaacaaagtaatcgacaccaatagtcaaagcgccgcgaagattccaactctcggcaatagatttgcccatagaggtctcttcatcatacttcatttcattttcaccgtaagcaaaacctac

SEQ ID NO: 4981 - DNA, 255369 bp, Unknown
  gut microbiota DNA sequence
cagagagagccaaatctcgattgctaaacttcaggattatgatgcgcacaccactcgttgtgtacaggaataggaacggagactgattaccacaaagtaacacagagtcgatcttgtagggtacactccgtgttactctgtgatgaaagcattaaaacaaattgccttttgagcaaaattcatcttcagttgttatttacagatataagataatccatacataaaattaatatcatggagaagaatattttcaaactggacaatgaacaactgaaaggaatcgcacacgcattccgggagaaagtggaagagggattaaataagaataatgctgaaatacaatgtattcctacctttattttacctaaggcgaccgatgttaaaggcaaggctttggttctggacctgggaggtaccaactatagagtggcaattgtcgatttctcaaccgaaaagccaatcatctatcccaataatggttggaagaaggatatgtcgattatgaagtcgcccggttatacccgtgaagagttgttcaaagagttggccgacttgattgttgaaataaagcgggaagaggaaatgcctatcggttattgtttttcttatccgaccgaatcgataccgggaggcgatgcaagattgcttcgttggaccaagggggtagacattcgggaaatggtgggacagtttgttgggaaacccttactcgactacctgaatgaaaaaaataaaatcagatttacaggagttaaagtgctgaatgacacgattgccagtttatttgccgggcttaccgacaaaagctatgatgcttatattggcctgattgtagggacaggtacaaatatggcaacttttattccgtctgacaagataacgaagttggacccggaatgtcacgtacaaggcttgattccggtcaatctggaatcgggaaacttttatcctcccttcctgactgcggtggacgatactgttgacgcaacttctgacagtttgggtaaacagcgttttgagaaagcggtatccggcatgtatctgggggatatcctgaaagcagctttccctttggaagaatttgaagagaaatttgatgcaaggaaactgactgctattatgaattatcctgatatacacaaagatatctatgttcaggtagcccattggatctataacagatcggcccagctcgtcgctgcctctcttgccggattaatcgcattgctgaaatcgtataatcgagatatccatcgggtttgtctgattgccgagggcagtcttttctggagtgaaagtcggaaagataaaaactataatatccttgtaatggagaaattgcaggaacttcttcgtgagcttgaactggaagatgtcgaagttcatattaatagtatggataatgccaatctgataggaacggggattgcggcattatcctgattgtagacagtttgtatttgtcctgatgaaatattcatcggggcaaatacaaacagtaaacctcgcccgtcgaggttagtctgaccgggatggacttattttgcgtagagtggatgcgcccggatcgggcttctacattgcaaagaaaaatcgagatgacgatgttaccggccggtaaattagcgattatctaatttgagacagctttttcggggcgaggtgtttttttatttctgtttagaaatgctccattgaccgttcttgcaactgacgctgatcgtattgtttttccattggttgtccgcacgttcgagcaggatacttccttcagactcgggtgtgtagagttctgcttgcacagagtcggcagcaaatacaatgtaagtggcgtaagtagcgttgtctttttgggtttcgctgattttcagtcctgcttcgaagggacgaatacaatctttcttcacttcactccatacgtatccggcagagccgacgcaaccgtgttcgtctttatcacttcccggtataactgcttcttcagtctttgcttcgcttgcggtgtcctgtccggctttattggatttgcatgccgaaaatgctattgccgtgcaaagtatggccgtccataaataagttttcttcataataaaagttttttcctttctattaaacttcatgttttgataattatattctataaatgcaataaaccttgtattactgcttgtattacattgcttttttattgtattcggtttaaattttattgaatgggaaggatcataatagaaattgaaaaatagggattgctaacattcagtggattaacctcaaaacagggtatgctcttggttgtttgtcagtctaagttaaatcgatcttttatgaccgatttaacttagacaggaacttactgtatgatttttccttcttcggtaatcagaaggatggttagttctccattggggagcagcacatcgcagtggcggtggcattgttcgatcaacagggaacagaaagcctgcagttcggtttcaggaaggatgttccaaagttcacgtgccagaatgatatggtcgattgcctctatgctggagggggtacatccacaccgtcgggcaatttctttgaggaactccttgttcatggtgactttcttgctgtgtgtgtcgaggtgcccttccgccagtttcacagctttacccatcatcactcccaaggtcagccgcgagatgccgagttcggctgcgattccgatcgtttcgcctatgaaattgccatagtgtacaaaagcctgcggcggaagttccggatagagattgcgaatatatttttcgcttttggctcccgaattgatgacaatacggcaagcacctgtagcacgtgccacttccatctccttacgaatggaacggacgaaagcttcggaagaaaagggtttcacaataccgctggtaccgatgatggagattccgcctacgacacccagccgggggttgaaagtacgtgcggcgacttcttcacctccgggaactgagatggtgacatggatgggaacgtttggcaggtatcgatagtagtaccggatgcaattcctcagattgtcgataatcatttgcctgggagtagcgttgatggccggaccgcctacttcgagcccgagtcccggcagggtaactgttcctacacctgggccaccatggaagacgaactcccatgtttccggagtttgtacaggtgcgttattagcctgtttcgcttctgcgaggttcagggttaaagtggttacaatcggcagcccactggtcacatcggggtcgtctcctccatctttgatgacggtagcgctgacttcaattttctcgtcggagaatgtaccggatacggattggcaaggaatttcaatcgtttcgccactgggaaggacggtatggatattccggttaaaatcctcgagtatgggatttttcagttttcgaaaagcagctatggcagcggctgcggcacaactcccggtagtgagtccgctacgcaatgggaagtaatcgggcagcattttctcaagggtacggcgaagactgtttactccgtctactgttatatcgtaatattctaattcgggatggagaaggatgtaaggagttgccccatattccaggatcatgtctttcttttcggtgaatcctccggacttcccactttctttcaggacgactgcctggggagacagttcttgcaggagttggggcagattctccgtttcgggatgatagtacaccagatgatcttccgggaatccggcttgacgggctatttcacgggagctgtcacggtcgagaatacggaagtaacattcatacttcttcttggtccataaagatttgaatcgggcgatggactggacgcctgtcaggaaaagaaatctgtgaccctctttttctttcttcaactcgcgcaacagatcccgattgtcatattcaaatttaaaaggcaaatcatcagggtcgcagttgtcttcgaaaatcgggttgaggtaagagcggtcgtaaatgcgttcgtatcgaatgcagggaatgccgagatcatgcgcaacatcggttactgtatcatgcagcttttcggcaaaggggtgggcggcatctatcaaaaggcgaatgtcgttttggcgacagaaagctttcagggttctccgggtcatggcgccgctcaggcgtatgccatgatgcaggtagatatcctgttcgtcacctttggttgagtaataataaggtttcccggcttcttcgattacattgacggcagcccgtccttcagtggttcctccaaatataagtatcatgattatttacggaataagtgtttaaattggtgagaatatagtcgtgacagtccttcccgattatcgatggcatcgcctacgacaatcatggtagtcagagtcagatggttttcgtttacgatcttagctaaatcctgtaattgtccgcgaaagatgcgttcgtctttccaggtcagatgataacaggcagctacaggtgtagtgggcggatagtgctcgaggagctctcgctgaacctgatcgactacgcctgcgctgaggaagatgcacatggtgctttgcgaacgtgccagcaggctgagtttctctttctcgggcatcggtgtacgaccttcaccgcgagtgaggatgatggtctgtaccctctccggaatggtgaattgggattggagagcagcggcagcggcctgaaatgaagagatccccggagtgatgtggtaatgcataccatattggtcgaagaaattcatttgctcctggatggcaccatagatacaagggtcgcctgtatgcagacggactaccaactgtccacggtcataaaactctttcatcaaggcaaattgctcttcgagagtcatggaagccgaactgcgtatggtagcaccggctttggcacattctgtcagttcgcgggggacgagactgccggcataaagtatcaggtcggcttcttcgagaaagcgacgtccgcgtacggagatcagctctggatcgccgggaccggctccgacaatttcgatgtgcccctgacgtacggaggcggcgtccatggcgatggctacagtaaagttagcgcctttttgtttgggcaggagtaagggaccgcctccggaagagagtagggcagaggcttcggatacactgggagtacccatgtgcttgttgaccacttcacttggagtgggcacctctattttgctgagttgactggcggtgtaaagccgggtctgataagcctctgcaagtagtttgagcaccggttcgtcttttttttcttcaatggaagatacggtacgtatggcaagagggatcatgttggcttgcaccacaacatccatcagatgggtaatgacggtatccaccggatgggcatcgcgggccagtccgactcccatatgcaataccggtgggacgtagtagagtgccggagtgtcagaggtgttgtaaataaatggagtgacaagcaggagcaagtcatatttccggagatccatatcctcaaatttgtagaatacatcgacgtgaggaggcaaggtatgttccaactgtgttgtgccttcgtcgcgaatgtcgagtaatagagctgttggtttgcaatctacaaagagtgtgatcagatgattcatatccgatgattcggccgggactgtttgccaaccgtattttttgccaagagtatcgagggcccaaagaccggtacggtcactccgggtggtaatcacaggttcggctcccagaatgcttgccacataccgggtcagtccgttggctccaccaatatgtccggacaggacagagacagcataacgtcctgtgctgtctacacagacaacggcgggatctttatgcttgtcttcaatatggggagcaatggcacggatacaaattcccatagctccgatgaagataatagcatcgaatttatggaatatctcaggaacggcctcctgaagattggaaatagagtggcaatctgtgtctgtgccggtagaaaagatctctgattcgggaagttcctgttccagtgtcttggccagtgctatgccggcttctgatatgacaataatggctgttttcatatatttttatagataaggagagtccggagctgaagccaccaggatctctattggattatattcatttattgcgactcttgttccgccgagaaaacaaagtccggattcgttggcggcttcgatgaaatgcgttttactttcttcggatacggagttgaaaacgatgcgtgctccgggaagaagcttatgccggacccgggatatgatttctttcagccgtccgccatgtccgccgataaaaactgcatcgggacagggataaatggcggtatctgtttcaagaaagtcaccgatgacggtggtaatgcccggagtaccgaaacgccggctgttgatttccatcagtcgcttgccttcggggcggatctcaaaagatgtgacatgcagatggggaaattgtaatcgggcttcgatagagacggagccggtgcagaagccgatatcccagaaagaagtccgtcggtttagttccaaggcactcaaggtgagcaggcggataggggctttggtgatcatccgggcacgtccgtcaagcagttcgaatgcttcgtcggggatgccgaagaaacgaggggagagtattcctccgtttacagattgcagtccgtcacctgtagttaaaatcaggcaattgggatattcaaatgtttctgcggctgcctcttcaagcgtcatccggcgaatcagttcttttgtcggatgtcccagatgttcacctatgtacatggtataatcgttgtaaccatagtccagcatccggcttgcaatggtagcaggcgtatgttcgcgatcggtgaggattcccatcttgggagtacgttctatcaatgcacgatcaaatccatgccatggacgtccggtaagggagatggtgcgcatatcatcgtagggcatcactaatcggtgtgccagcgtttgcaaagagttaaaagagggatagagccgaatctccgcatcgggcagacgtcggcggatcgtgttggcaaagccgaaaaagatagggtcacccgaagcaaagacaatgatatggggatgtcctgcataacgggcgaatacctggtcgagaggaacggtgatgtcgatccactttgctccggcagggagcagtggggcaacaatgtcgtgatggcgcgctcctcctgaaaagacacatccttggtctatcaatgccttgacggaaggtgagaggtaaggcgaaggactgtcgtcgagacctataacggtgaaaaggttatggggtgtaccctcttccgctctcttcccgacagggagagaagaaagagtaggtcgggttgtttctgaggtcttcattctttttatataatgaacgattctaataaataaaacgtctgtataccggtcgtctgctatacgtctcttccgggtctgagttgttccgcatcgggatagcaaagaatggcatttaccagggtggcagccagattacttccgcccttgcgtccttccacaatcagtttggggatgcgggtgaagggctttgtcatgtgttttgactcttctacatggacaaaccctacgggagcggctacgatacctgccggttgcgctttctctttccggatcagatcacaaagttccatcagtgctgtgggggcattaccaaagacaaagagtgcatcgggatgttcttccacagccaggcggatgcccgcttgtgtacgggtgatcccctttgaagttgccatttcggctactctttcatcgtttaagtaacatttcacttctacacccagacgctgcaatgcacctttacggatgccggaagctgccatcgttacatctgttacaatagtccgcagatttcctgtgcggatggtgtcatagagagaggccacagcattgggatcagtgtaaagcaaacgttccatctcgaagtcggctgtcgtatggatagcatgcaataaggcccatttccggtcgagtggaatatcacggttcttcaattccgtctcgatggtgcggaaactgcgtatcatgatgtcttgtccgataccggttgcctcactgcgtgtttcgcgatagtatccccgtggagtaattatgttttggttaaatgtatatgtttgtgagttaccaatcagaacgaccgtaaacatatctacagtttccggatcgaatgcggcgagagtggtgatgtgtatttcctgttcttcacgaccagcctgccgaacatagcctacaggggtttccggtgagcgtccttcgcgcagaaagatttcgcgcagacgataaatttgccaatagcgcccatcactcttgggattgtatacagccgtcacaaagtcggcctgggctgcagcgaggatacggcgctcgatacgttcccatggtgtcatcaggtctgatagagagatgacacagaagtcatgcccgatcggtgcaccaagtagtgaggccgctttctggaaagcgctgattcccggtaaggcaatgatttctacgttactctgacgttcgcgtttcatttcgtaaatcaagggtgtcatgccatagataccggcatctccggagctaatgacacaaacggtctttccttgttcggcatattcgaaagcctgttcggcgcgggcacgttcgcgtttcatcccggtgtcgatacactcggcatccggacggacaaaatcacgtataaaacggaaataatatttatatcccaccactacatctgcttcgcgtacagcggcgagcacggcaggagtgatatcttgttcgcttcccggcccaatgccggctacgataattttggattgtttcataatgataatctatagtgaaattcttggattcatttccggcttgaactatacctataccggcttgaacggcaaagatacggattaatcctttttctgccctttattcagggacataaatgatctttccattctcgagttcataggctacacctactttctttcctcgtttaccggatgattctttctgttcggatggagtatatcgtttaatctctttaccttcttttgtgataatctccatgttctcttgtccgggattctttaccatcgtataatcttctttggagaaaatttcggtcatattgaatcggctgacgagtgctaccatcaatgccacagcaaaaaccatggctacatcgaataagttggctactgttcccatcgggtcagtatcattctggttgtgtagaagtttgtttcgtgccatggattagggttttactgataaattcaaggtcgtttatttcacgggcataccaacgttgccggatttgcagggtgaccactccgatagcagctataaccatacctactacagtggtggcaaatgctacttgcatattgtaggccattgaagcaatgtctcctgtggccagacctacaagtgcgggacccattgggattaatgtacccattagtccgagcatgggacccagcttgacaaatgtacgtgaacgtcccaattcttgttcggcatctacttcaaagttagcaagcaatcgctcacaataagctgcattgtcccgatgcgtataaagcttgtatacacagcgttgcacgggggtacttctgtctccggtaagggaatccgctttttcttcgatattgtcgggagtcagttcttccaactgctcggcaagagatttttgagtatgtaccctacgataaaattctccgaagaagccgcctgcaagcagtacagcacgcgcaaagaatagtaacaacagaactactaccgggacaagtagcccgttggatatccagaaaagcgcatttgatattgtttccatatttataattgttatttctttagttgtttcctgtgctaacgacactaagcagtacgataaacagattggtgatgaagagtatttcaagtcgtaatttccgttctcctactatgtttttcaagagtaggctcagtccggatatcagtataaaaacagcaactgaagagatgccggtgatcagtccgaagctgactcccggaaaagcgaagaacaactgtataagcagataggttagtatgcccgccattagcagtccgggataaaaattcaatatgtatgtaactgtccgttggaaaagtgtccgctgttttgaggtatctgcaaaacagttgaagcaaaaagcgatcattattgaggcttcgagcgtgacatatactgaaagggtcagtatgtgtggggcagaggccagcagagagtttatctctgttggcgattgttccgtagcccatggacctatacaaataaggaaaaccgtatagacaagtgctgacaaccagattccccatcgcggatagaaaccggttttgagaaggaaacttaaaacgatgaaaccgattagtaaatgaatgatatgttccataaacttattttttacgtttcagcaggtatattactccaccgaatactaaaagaacaataacgccggtaaggatgccatttaccacattctttttccggttttccgttttcgtgagtttctcctctttcaatacgatatcttttcctttttcgtttcctgcctgatggacttcttgcataaccagacgataactttcagaatcattgttgtccaagtgaccttctacaaattgctgaagctttcggttatcgcatacaaattctgtacaggcggcaccggcttcgcgggtgatttgcgcatgtagtcgggctgttactttcaattgttcgtcgctcgctttccagtatcctttccgggcactttcaagcatgactgaggtcattgcctgataagaagccggattaattctttggaaatagtcccggatacccaaatggttttcatctacaatgtacattttatagagatcgttgaagatctctttatccattgccgatggacgggtggcatgccatccgaagatattacggaatatttcaccgaacatttgcgcggtggtagcacctcctttcatccgttctttcacgaaagttgggttgagcacggtagctctcgcctctacagcgattgcttcgttgatattctgcatccgtttgttgtttcgattgcgatagtcagccattaaggcatccggttctttaccggtcagtgtcttcactgtcaacgacagacctcccataaattcgtatacatggtcaagtgaaagtggtccccaggtattactttgccggggttgtatcactacatcagtttcggaaagggcggaagcaaaaaggtctttttgcatacctccccagttctcttcatcaccataggcggctcccatattgttcagatatccgtctactaactccgattcatgatcccatcggtcactcttttccgtatatgccatcataccggtactatatccgctgttgacaggaccaaatacacgcatgactgacatctcacgtgctcttttgggtgatactcctttttctaccagcagtttttcctgcaagcgtgtaccggaagagacataattagggtatgctttgtcgtctgcggccgaagcaaggcgaacggcatcggttagcatagtcagtcgggaacccgctatgtcacgtagttgtcccgacacttgtacgacgacgttgactcttggccggcctaactctgaggaaggcactaagcgtagatcgaccacacgtcccattttgtcgcgtacaggttctacgcctaacatccagaatacttgtgccagcgtagccccttcggtcgtgataaattcaccggcccaaaaagagtagcttacttttcgtggatactctccgttgtgattctcacgataggctttcagtgtggcttctgccaatcgtttgccttcttcccatgacaatatgcccggagttgtttctacattgatactatacatgttccgtcccgtcggcaggacattcggattgagtaccggatctccaccgggagccggaaatactgtgccaccttttaatccgcgtagcatggcgttcaattcgttgccggtggatgaaactaaaagcgcatgataacggagtgcctcttgcaattcgggggcgatccctgtggtatccttaggcggattttgtaacaaggggattaaccgttgtttggctatgggtaaatagtgatgggtgatgtagccaaaatcttgtaactgttcggtcgtaatttttcctttatcgcgatcacgtttcgccatttgataggctaaaggatcggcactgactgcaagtgtggtggtaagcaggtctctcgcagaataggtttcaccgagggtataataagctccaatcgttttttcattggctatctcttcggcaaatagatcaatacgttccagttcttcggcggtataaggacgactggatacagaatctaatttgaggtcacgatgtagccccaactttatgacctctttttttatgcggattcccaaagtccggtttttctctatgtcttcggaaagtattttgtgaatgtcttccagtaaagaagtgtatcgttgacgcattccgctttccacatagggaggagtcaagtgggtgacaagcacagcatgagtgcgacgtttggcaatgataccttcacctacgttaccggtagtataataatagaagtgaggtaagtcacctaccaaagcatctgcccaatcattatgagaaagggctacatttttccccggagtatattcaaggttgccatgcgtgccgaaatgaattaacgcgtctgcctgaaaccctttttgtacatatagataaggtgccagataactgtgcggcggtgcgaccggcatgccatgaacgagtttgaaatcatcgtcccccaatgcaggacggggctgagggaaaagcaggatgttaccgaaacggaggcaggcaatggctaattgtgcttctccttgagggtttgttccggtcagtaaatggcccggagcatctccgtaacgttcagtaacttctttgtatttatccggttcgattgcttcatgtacccacttttcatactgtgttttagtcagccaaaccggatgggctgtctgtagaaacttttcttgagctccggtagcgtatgaacccattacagctccatcccggtagatttgtttgccgaactcctcgacagtagcaggaagcctgctgacatcataaccttcggtgcgtagccttttcagaaagttgtaaagtgacggaatcacttccattccactggccaataatgcatctttgcccggtgtcttgaagtaacagatggcgatgcgtttatccgagttgggtttagtacgtaaatccagatatttgtgtacatggctgatgaagttatccactctttccatttccggttcgtgcagataatatccgcttttgtgtaaattctgtgtagcaattaacaaaggtgtcattcctccgtctatttcggggacgaggacacgagctgtaagggttccgccactgacgggtttcatcggatcaagccactcttcccgtgactgaataagggggaaaggattgaaaatggggatattttcggtatgcagccagttaatcagcgaatcatctccaagtcttcccatgggaaggtaaaccaatgcatccggatgtagagaacgtagcatctcttcccgcttttcctttcctgctatgggataaacattaaatccggcttgtgtcattttggatattaatgtgtctacatgtgctctgttaccttccattggaaaactgactccggagatgaaagcgattttaggtccgttttcatggaaaatacctttttgacgcaggtattgttcaagggctttctgagtctcgaagtattttccatattcttgatgataaaataaattgttgggtaggcgaagaggggcatcaaaagtttcaatgttccagcgtgtcggtgtggcaatgtgtcggagataacgtaatccgttccggtaattctgtcggcaggcatccccgaaatattgcataagcatggcttcctgctcaggggtgatattcctgttgataattgtattgaagttacgcagtgaaatcgtgaaaagtggaataccggccgatgcggcacgttccgcctccttcatttgtcgatcgttcaggttgaggctgcgtccatagagaactacggcatcatagcccttaaaggactccaaattttcggtttgtatgcaagtaacttctatattccggctatcgttgttcaatactatgtcggcagcttgtgccggtagcggattgacaatcaggatccgtgtcggggccatccaatagcggtagccgatagtaaaggcaatagccagaagcaatacgcttccggctatgtacagtgttcttttatgacgaaataaggtcaatactttcatgttatcttcttgttttctttctgcattttcgttcgatatatctcactccgagtacaactccgcttaatgaacaaaccgtgccgccaagcagcaatacccacagtacacttttacgaagtgtaggagaggagttcagtccttgtatgcgtagtctgtgcaaagcggtatacatccagtatttccaacgggcagtgctattgacgtatcggactgtggctgtttccggatgaatataataacaactgtggtcgggatcgtctactgtgattttccataccggtaataaactgcggtcgcgatacatcctactcatgtcgcggtagtaagtttcgaatttatcaatcaattcgaccttcagatggatgctgtccccatggattgtccttactgcgtcagtaacctgttttttgtccaaattcaacggatggggcagagagtcggaggcatcgatgtacagatctccttcactccgttttactatgtagtagggttttgaacggaaattactccattccacctggcgtacgtccggatattcggttagtatttgccgataatccaatagatactgatccggtttgggtgctcccttctttatttcccgtgtggggttcctgtccaataccggtttgctgatccatgccggcacttccgccagtgacatcataccgctgaaacagaatgtcagaacaaaaagtccaaaaacaattcccgttacataatgccagtgataccactttttacgatagggtgagaattttcctttttgctttcgtgatcgacgccatacatcaatacctacccacaatccggcaatagtcatcaggcatccgataccggataaccagattaccgcaatgctccataaagcggcatcttggcggagccaagtaaaataaacccaatgaggaatggctcccagccatgcccagaaacgttcgttacgggtagtgaactgcaagacttctccgctttgcgaaccaatgtatagctggtgcttttctgtgtcggcaaagtgaaatttatagatgggaaactctcttttcagaccgccgaagggtatccattgatccagtcggttcaaagtatcgattctgtctatcggtgcgttacaccatagagaggctacccggtggatgcggcttccgtctataaccggaagtgcctgaacggagtcggccggaagattgtgttcacctttgtccgtacggatatggaatatggtttgtccgaggtatcggtctaaacggattcccttaactttttctccttcgggcaggcgagaagtaatttcactgacagaaggcagagaaggagacagaggctccagcttttctaatttttcagcttgtgatgcacgtggaaatccgtggtacatcatgacaaaagccgataggaaccaaactaaaaacaggatactgagcagtgtgcccagtaccctgtgaatggtatacatgaatttcgtgatcatcattataaagtataagatgcggaaagcatgaagttacgaggcatgcttggtattaactgattaccaagtgcctgattacagtattctttattgaacagattattgatgttgactcccaggcgcacattgctctttaatgtataagagaaaccgaggtcggtcagccagtaagcatcgaacgagctcgtattatccgagttgcggtatactttgtcctgaaaactggtagaaaagtttactcccagtccctttaacacgcctttggatacggtgtaagcgccaaaagcatagaatgtgtttttaggaatgtaggcatattgtttgcctttgcttgaagtggtcggcatataagggttatcggctaaatcgcgtacttttgcatcggtatatccgtatccggcgctcatcgacaagttgtagatgggactccaggtaatgtcaatatcgaatcctttggaatccattttgcctacttgtcccacaactttcttgtccagttctacgccgttggcaatatcgcctttgttggcaagagtctggcggatattatccttattgatatagaacaaacttacgttagtctgcaatgtacgtgtgatctcgtatcgtgcacccacttctacctggaaacctttctccggcttgaatacctctttaccatttacgggagtgaactcttttccatccttgtcgatataaatggtgttagcgtcataaaatgcgcggataggcttgaagtaagtaccgtatgaaccgtaaacagatagtttttcaataggcagatataccaatccggcacggaaggtgaaggcaccattggttattttattataagcatcgtcatccggtttatcataatggcgtcctccgtcactggtgttcaggttagcagtcttatacataaaaagatcgtaacgtccggccagcatcattttcagtttatcactgaattccaccaagtcttgcagataaaatccgtgggtaaatgttttctgtgcagtaacaaatctgaaaggagcttccatccaaccaatgctgtgagggttgtataccgagccatgtcctgtggttccgggaccggtggctccggtgcttccattgccataggccatataagagtcacgcatcaaggatacaaaagaataaccgcccaaatagttgtgtgcaacgtctcccgtatagaactttccgcttgcctccaattgattgttcacagttttagcgatatgtgaaaagcgtagcgggtaactgtagtagatggagtccaggcagatatactttttggtatcattgccctgtttgtctttggtcatgtaataatgatcatagatgggacggtcgcttgtgaggtagtccagtgattcggtaccgaagtagtcaatgtcgtcataggtataagacaatttctccatcaatttgaaagcttcgctgaatgtgtgcttatacatggcggaagcattgaatccacggttgtacataaagtccgattcactgttgtagcgggctttcttgttcagtccgggcagggcatcccccttactcagatatttgctgccgtctgtggctgagaggatgtcataagacattgtgggaggtaaaccgatttctgtcggatagaaatcgcggttagctccgatacggatatccaattcgtcattttctgtcaaatgccctcctaaggccagatagccggagagacgtttggtagcattgcttctccatccttcctgatcctgccaattgacgctggcacggtagttcaatggtcctatcagtttaccgcccaaagccattgtggcctgcttgttatagtaactgccataagccaggcgggcatagacactttgcttgcttacaggagccttgcggacaatattaaggacaccacccacagcggattgtccgtagagtactgaagccggaccttttaacagttcgatgctttccacagccgataagtccatgaacggataagagttgtcaatagacgagcgttcgtcacgtaccccgtctaccatgattacagaattatcgaatccacggattgagaattgggtaaacgctccgtaagaggtacgaaagcgtacaccgggaaggaaacgggaggcttcctgtatatcccggatgtttcgtttctcaagcattccggaagtaatggagttggttgaaataggaatgaactttgccggaacatccagtttcaaagcatcggtcttgcgtctgtagttggttgccactactacttcattgattgaaaatacagaatcgttgaagttagtatattctttatttttctgttgtgcttgtgcaggaagtaatagagcactccccaatgcggctaatatgattcttttcattcgtctttgtcttttgagtatttgtcttttttcttcattatatccaccatttcatgctttagcataaattgggcatgatcgataaacagttgttggatggcgggtatttcgcccaacccctgcatacgtacatctactttcaaaccttctttttcaagggcttctttccagtcgacggctatatcgttattggcgtgatcacctgccacaaacatgaacggaaccagcgtaacctgtttcgttttgttatctttgagttgctgaagcatggtgtcgaaagtaggataaccctcgatagtgcctacatgaaagttttttaatcctttggctttcagcatgtagtcgatcattgcataagtggcggtactgggagtgtaggttccatgacccacaagtactacacttcctttttccggtttgcctgcaccgaggatatctactactgcctcagcatcttctaccgaatagagcagcgggttacctacccggatctctttaaaaaaacgggctactgaagcaacatcacgcctcaatgattccatttcaacgccttctatgatattggtgctttgcacaatgacgtgtgtatagccatctccgagaagtttcagcagcgcttccagcggattaggtttttcaatgccacgagctttgaggcggcgcattacgatacgtgaggtataagcttcacgcatttccatttgtggaaatgcttctttggctttcgcattgatggcatcgatcgtcttggtgcgggtgtcatcataggtagtgccgaagtgtaccataagcaaggcggctttatcacccggctgcatgccggccagcatatcggaggccacgaagttccccccttcgtgcgcagagcagaagagggaaactaacaagaataaagagagaatatatgttttcattgtttatttcttaaaacgaagggttaaacttacatatgccatacgtcccggagagaggagtgcgtagttcacaccgttaggacgagtatcacgtttgttgaaaatattgtcgaggcccataccgaagtccagtcccaagtgttggaaacctgtcagtgagtgttttacattcaagttccatacgccatagcccggagcgtcaccgtagctatgtcccgggtggaaacgtttgctttggaaacgaccgttgatatttacgttcagcatatagtcgttccatgcatgtgtgtagttccctgctacggttccggtgtggcgtaccgagcgttcaatgttaccccatacaccgtccacactcttgccacgtgcataagcgtaagcatagtttccgttcaggctgaagcctgcgccgaggttggtggctgcgtttacttcaaaacctctgacaacacctttgtcgaggttgccataaagtttgtaattggctaatgcctttgtttcagagtctgtcagattgaattctttctgggcctgagcacgtaactcttcaccgttaggaagatctacaagtctatatgtagtagagttaatcatatcatcgatataattcaaataaccggtaacagagacattcaggcggtttgtattgtattccagatttacagaataataattactgtgttctgcttttaaatctttattaccttgagtgatcgttttacctttattcatataataataaagttcgtccagaccgggggcgcggtaaccggtggagtaagtaccacgaatattgaaagcacctactgaatacatcacagccaccttcggagtgaagcgtccgcctgccagctcgtgataatcatagcgtacgccggcaataccggtcaaacagttccataacttgatttcgtgttgcgcataagcagatgccgtatacactgacttgtccacccttgcactgggacgatccaggctttcagagcggtaatccactcccagtaccgtcatgttgtttttggcaaagttgaagattccctttagctctgcatcataaaagtgctgctctttggttttggcgtaatctccaatagcaatcttatttttatcgtcagctacagtatatttgtagttctgcatatagttatcattcatcaaatcgagttggatggaagaacgcttgttgattttgtaacgtcctcctaaaccgaagttatacgattcgtaatgtagatcatacttggaacctccatcgatatccgctgtgtatacagggcggtccgtcaacttccaatagtatcctccgttagcatagaacgagagcttttcagtcggttcgaacgtgaatttctggtttaccagattagaatggaaaccattggatgtagctgatacggtcggtactgtcgatacattaccttttttatcagtaacatatgccagatcgctgttctgccatcctgcactttgttcgtgtttataggaggtatatgagccgaacttttctgttgcaatatccgcatttaccatttgtgtcagttggcgatgatcttcatatcgggtggtagaagtcacctgcatcagttctttcggttcgttggtgatgatattgatcacaccggcaatggcgtcagagccatagagtgacgaaccggcaccatccagcacttcgatgcgtttcacacggctcatatcaatgcgtgagaggtcgatattattagatgtatctccggtcagtttacgtccgttgatcagaatcagcacatatttattggagagtccgttcatcatcaggtaagatcccattgagttggtagagaacgaaagagaaggaaccagcatggtcattgcctgctgaaagtctgtgataccggctttctttatttcattggcggttactacttccaccggtgccggtgtgtttttgagcctttggtgtgtaccggtacctgttacaactacaggattcaggtcaacactcatctctgtcttcttgcctgtcgcgtgttgttgtgcaaatgcacccattgccgcgcatcctcccatgaggatggtcagtaagcatcttttgttcattgatgtttttgaataatgtgttagtaaacggccttcctgaccccgggagggcactgttatctatgtctgcttcggcaggtttcctgactatccctttttgaaaagctaccttcccgtcatgctttacaggctatgacagtggtatatgtagaaatgcttttcttatcttcttccgattatgatggcaacagtagaagagcagggggatcacagtagcgggcactgttcgggatttacacccgattcccttttatgcaacgaacagaaagtccggtatgcatcacctaagcggctgcaaatatatacatttattagattatatagaaataaattaaaaaatataccgattaataggtacatataaaaaagtcctgatagacgctttgtttttggaaatttgacattctgcatcctccttttagaatctctattttgatgaaaaagaggctctaaaagaggaagatgccgattcagcctttattgaggcactgatggaaagggagccggattctcgctgtcggagtgtataaaggaagatgaatcttatatttttcattaacaattcttcatctattggtttttatccttatctttgtcccgaattggtttcgaatgaagactttcgtcattcggattaaaagggaatcgggtgtaaatcccggacagtcccgctgctgtgaagcttcatcgatatcttgaaacaatcctttcgccactgacgtggggggaacacctccgtcgggaaggcttcaagattagaagtcagtcagaagacctgccgttcatcaaaggctgtttttactcgtgggattaggaaagcagtacgaaaaagtatttaatcaggaaaaaaggaaaggtggtgtgcctgtgaaaaaggtatgtccgtgttgtggtgctgtgtttcaatgccggcacgacaatatattattatgtcattgtgctacggtaaagctcgactcgctgcaacgtgcttatatcaaggagcatttcccggactgtttgtgtcacgattgcctaaagaaaatacaagaaggggaattggcctgtaaggcaaatctttcttgtacggatggtgtgggtgaagtaactgatcgactctccggggatatgtaaacaagtattcaatcaacataactttttatactatggaacttttaagaaacctgtttgagggataccccaacctttggggtggaggagtggcacattccgtgcttatcctgtcgctggtcattgcgtttggcattatgctgggtaaaataaaagtagcaggcatctctctgggagttacctggattttgtttgtcggcattgtcttcggacattttaatctgaatctgaacgagcatttattgcactttctgaaggagttcggacttatcttatttgtatattccatcggattgcaggtggggcccggattcttctccgcttttaagaaaggaggattcaccctcaatatgttggctatgatcgttgtctttgcaggagtcatcattacccttgcattgcattttataaccggaataccgattaccaccatggtaggtattttatcgggagcggtgaccaacacacccggattgggtgctgcgcaacaggccaacagtgacctgaccgggatagatgcaccggagattgctttgggatatgctgtagcctatccgttgggcgtagtgggatgcatcatgtcgctgttaggccttaaataccttttccgtattaataccaagcaggaggaagccgaagccgaacagggactgggacatttacaagagttgacagtccgtcctgtttcattggaggtccgtaatgaagctcttcacggtaaacgtattaaggatatacgtccattggtaaaccgtaattttgtggtatcgcgtatccggcatttgaacggaaagaaagagtcggaattggtaaattccgatactgagcttcatctgggtgatgaaatattggttattgcgactccgatagatatagaggcgatcactgcgtttttcggcaaaccgatcgaagtggaatgggaacagctgaacaaagaactgatttcacgccgaattctgataaccaagcctgaactgaacggtaagacattggcgcaattgaagattcgtaataatttcggtgccagtgtcacccgcgtcaaccgttcgggagtggatctggtggcaagtccccagttgcaattacaaatgggagaccgtgtgacgattgtcggcagtgagttggcggtgagtcatgcagaaaaggtattgggtaattcgatgaaacgcctgaatcatccgaatctgattcctatttttctgggtattgccttgggatgtatcctgggtagcatcccgtttatgtttcccggaattccccaaccggttaaactcgggttggcaggaggcccgttgattgtttcgattcttatcagccgcttcggcccgcagtataagctgattacttataccactatgagtgccaatctgatgataagggaaatcggcatctcgctgtttcttgcttgtgtcggtctcggagccggcgacggatttgtggaaaccattatccatgaaggcggttatgtgtggatcgcttacggtatgattataacagtcgttcccctgctgctggccggttttatcggacgttatgctttcaagctgaactattatacgttgataggggtgttggccggttccacaacgaatccaccggcgttggcctactccaatgatctgacatcgtgtgatgcgccggcagtaggttatgctacagtctatccgctgacgatgttcctgcgtgtgcttacggcacaattattaattctttcgttaggttgagttctaaataataataaagataagcaatgtgacaaggagagtctggtgaaatgaaatgacttatgtgctttctctttcctttcttttttgtacttttgcgcccgatttaaaaaagtgagcaattttatgactacaaatgaatctttgatttccatatccaagttcattgccggatattcggcccatttgatgggagcaggtgtgcatacctcccgtgtgatccgtaattcaaagcgtatcggagaagcctatggagtggatgtgaagttgagtgtgtttcacaaaaacatcattctgactatcatcgacaacgagacgcgtgaagcctgcaatgaagtgattgatatccctccccatccgatcagttttgaacacaactcagagttgagtgccttgagctgggaggtttacgacaaacatctgtctttacacgaattgtcggataagttcaacaaaatcatatcggcaccgaaaatagatccgctatttgttcttttactggtcggatttgccaatgcttcattctgtaagttgtttggtggcgatattatttctatgggcattgtcttttcggctaccatcaccggacttttcctgaagcaacagatgcagaagaagaaaatcaatcattatattattttcattgtttccgcttttgttgcgtcgctttgtgcatcgacggcactgatttttgataccacttcggagatagctcttgccaccagcgtgctttatctggttccgggtgtaccgttgatcaacggtgtgattgatattgtagagggatacatccttacgggatttgcccgattgacggaagccgcgctattgattgtcagcattgcgataggcctgtcgtttacattgttaatggttaaaaacagtttgatatgatagctttagatattctttccgatggattttttgccgcaatagcgggtattggttttggagccatatccgatcctccgttgcgggctttcaagatgattgcgatacttgcggcagccggacatgcctgtcgttattgcctgatgactttcctgggtgtcgacattgccacggcttctttgttcggggcattggttatcggctttggcagtttgtggctcgggcggaaggtgtattgtccgatgactgtgctttatataccggcattgctcccgatgattccgggtaagtttgcctacaatatggtgttctcgttgattatgagtctgcaaacaatgaacgaaccggagcgtctgggcaaatacatggagacgtttttctctaatggcctggttacctgtaccgttatctttatgttggcagtaggagctaccttccccatgtttctgcttcctcacaaagctttttccctgacacggcattaatcaatttatctattaaataaagaatctatattttatggagattttctggaaaactattgcgtattataattctgctacatggatctatcagttgctgatcattgtcgccggcctgctgttgacagtgatgcttataaagaatccccgtccgtgggtaaagatgggcatgaagctatatatgatttttctgtatttgtggattgctatcgcatattatgccatctgttgtgacgagcgcagttataacggggcgctggctatgttctgggtggttatggccacgatatgggtatgggatgccatcaccggatatactactttcgaacgtacatataaatatgatatcctttcgtacgtattgttgattttaccatttgtatatcctttggtatccattgcgagaggacttacttttccaggcattacatcgccggtaatgccttgctcggtaacagttttcacgatcggtctgcttttgttgttctcccgtaaggtaaatatgtttttggtgctgttcctgtgccattggtcgctgatcggcttatcgaagacttacttctttaatattccggaggatttccttttggccagtgcaacgatccctgccctatatctctttttccgggagtatttcctcaacaacctgcatgccgatacaaagcctaaagcaaagtacattaattggttgcttgtctttgtatgcgtatctatcggaatcttacttaccaccaccctgtttctggagttgatgccgggcaagcagccgtagcactttttaccggtaaagatgcaccctcacagagaaatatccgtatctttgtaggataaaaaccgacaataatggaatgtaggatgatttctcaatttctgatagcggctccttcttcgggcagtggaaagacaacggtcagtcgtggattgatggctctgttgattaagaagggactgaaggttcaacctttcaaatgcggtcccgactatatcgacaccaaatatcatacggcagtttgcagacgtccttccatcaatttggatacctttatggcttcggccggacatgtaaaggagctttatgcccgttatgccacaggagccgatgcctgcatcacggagggtatgatggggatgtatgacggttacgaccgtgaccggggttcctcggcagaagtggccggattactgaatttacctgtcatattggtggttgatgccaaatcggccgcttattcggtggctcctttgctttcgggcttcattcactttcgtcccgagatcaggatagcgggtgttatattcaatcgggtagggtctccgcgccattacgaaatgttgcaggaagtctgtaccgagttgggaattgcctgtttggggtatttgcccaaacaggagagcttggtacaggaatcacgttatctggggctggatttcagccattcgaaaggaacggacgcactggaagagctgaccggattaatggaaaagtacatcgactatgaccgtttgcttgaggaaacgaaacttcctgctccgatacctcctgtttcaaatctttctctacaggaagatttaaagatttccgtggcatgcaattcggaatctttctctttcatttatcaggaacatctggatgtgctttgccgcctgggaaccgttattctctttaatccggaggataatcgcccgttgcctgaaggtacggacttgctttatcttcccggaggctatccggaaaagcattatgagaaattgcgtcaggcttggcaaaggatgcagtctatacgtaactacgcggagtccggcggacgagtacttgccgaatgcggaggaatgatttatctctctaaaggcattctccttgaccggtcggagcactcggacagtgaggtcggggtgcaggcaggggtacttccgttctttatctcgaatcgtaaggctgacaggcgcttgactctggggtaccggcagttcgattataacggccaacatcttcgcggacacgagtttcactatacacaattcgagccgaaaccggaagagtcactggaatctgtcactcaggtatacaatgccaagagaatgcctgtcagtacacctgtgttccgatataaaaacgtgatagccagctatacgcatctatactggggagagatcgatttacttaaattgtttgaatgatgaaacgaatctatacacggaccggtgaccggggaacaaccggcattcatggcggagaaagggtagagaaagatgatatccggatcgaggcgaacgggaccatcgatgaattgaatgcagtgatcggcattatccgttcattgctccctcaggagcatgactggcagaagttgctgcaccacctccaaagagagttaatggtagttatgagtcatgtggctactccatccgccattcgcgataagaatccgaatgtgctgtcgcccggactggcggctttctgtgagcaagagatggatacaatgactgccggactgaaagagaacggttatttcctgttgcccggtggcacacctgtctctgctcagttacagtttgcccgtaccgtagcccgccgtgcagagcggcggctctggaccttgaaccggcaagatgctgttccggaagatattctgagctttatcaatcgtctgtccgatctgttttttgtaatggcacgcttcgacatgcaacaacaggactggccggaggaacgctggcaggctttcgcatataagacaaagaagaaataaaaacaagcatccgttccaaatcctttccggcagagggacagggaagatgatataaaaacgaagtgaaaacactcgggcagtaactgtttcccttccaaaacaaagcaaacatgatgattagtaaaaatcctttgggcgacatagccaaactaaacaggatttgtgcttcggcacagatcggatggtgggaagtgaacttcactacaggaaagtgttttatttcggaaaccctgcttaaatcattggaagtcagtagtgaatggttagacattgacgagttgatgtctaccgtacgacaggattatcgtaagcgcattacggatgagtttacctccatacctcggaagggggtgttcgaacagacctttcctgtgacttccggtcgcggtaatgtattctggatacattgtgcgttgagcatggaggaggagaatgaagaagggcaattgattgccaccggatatggccagcggatagagagtccggagacacaaggttatcaatgtgcatggaatcagcgcatcaacaatttgctctattgccagaactccattgccaactcgctcctgaaacttttgagtaatgataccggtgacgaattgtttgaagaaatgctggctgacattctgtacttctttaaaggtgcccgggtctacatcgtgcgctacaactggaaaaacggaaatcaaagctgcctttatgaagtggcggcctgtaacgtgatcaccctgaaagagaaactacagaatatctgttcggaagatgctccctggttctatcagcagatacatgctaatcgtcccgttattttgaactcacccgacgaactgcctccgcttgccgtgcgtgatcgcgaagtactggccgaaaacgggacaaactcgatgatgctggcacctctgatgcgtgaggaaggggtatggggatatatgggtatcgacatcgtagacggataccggaagtggaacagtgaagattatcaatggttctcttcgctggcaaatatcattagcatctgcatggagctgcgcatcatcaaagagcgggtgatgcacagtgagaaattgtttcacgatatattcaccaatattccggtgggtctcgaactatataataaggaaggtgtgttgctggactgcaataaccgcaacctcgagatattcggtgtcggcgataagaaccggatcgtcggactgaacctgtttgaaagtcccaatatgacccgggatatacatgaaagccttcgggcaggccgtcccggtacatttcatctgaaatacgatttcgatgaagaacgcaggctttttcagtcggagcgaagaggagtgatggatctcgacatacggagcctgatgctttatgatgcggaagacaacctgtcaaactacctgttggtcaatatcgataatacggagcgcaacaatgcgctgagtaaggtgcatgactttgagaacttcttctctattatctctgattattccaaagtggggtatgccaaaatcaatctgctggatcacaccggattcgccgtccgccagtggtatcgtaatctgggagaaagccatgatacacctttggcggacattatcggtatcttttcacacatgcatcctgatgaccgtaagtcagtgctcgatttttatgaaaaggcgaaagcgggtacggaacgcttctttgacggtgatctgcgtattcgtccggcagatggttcggatcggtggaactggatacacaagtcttctatggtgactgcctatcagtcacccaatccacggttggaactggtagaggtgaactatgatataacagtccagaaagagacggaagcggagcttcgggccgcacgggacaaggcggaagagtccaatcggctgaagtctgctttcctggcaaacatcagtcatgagatacgtacgccgctgaatgccattgtaggcttctccgatcttctgatgacggttgacgatccggcagagcaggaagagttccgccggaccatacagaaaaacaatacattgcttctgcaattgttttcggatatcatcgatctttcaaagatcgatgcgggatcgtttgagtatacgccgaaacctgtctgcctttatcagttctgtgccatgatggtgcagaagatgaggaacaaggtgcccgaaggagtcgaactgcagattgacgaggactcaccgctcgatgcctggttcagtgccgacagcggatatctgaatcaggtggttaccaactttatgagcaatgcgattaagtttacgcatcgaggcaccatcactgtcggctatcggatcgacgcccggcagcaacttgaaatgttcgtagaagatacaggtatcggtatttccattgaaaatcaggaagctgttttcgaccgctttatgaaagtggacagttttgtacaaggtaccgggttggggcttcctctgtgcaaaagcattatcgagaagatgggcggacatattggcgtaatctccgagttggggaagggttcacgcttctggttcacgcttccagctttttcttgtatacccacacgctgagcccgaaatagacgatcacctgtatccacagtgtaatgtattccggctgtatgtctgccatatcggctcccatcgagtttagcttgacgaaagcaagcgtggcgggtgcggccgggaggatgtaatgtgccatgcgccaataccatggcatcagttccagcgggtaggagactccggacaggaaaatcaagcctaccgagaagaaagcgatcatcagcagcggagcttccgaatcggtgaagtaacgcgaggctgccagcccgaagaaagaggtcgccatcagataaggtaccatcatagcggtaatgtacagtccgtttccgatattgggaatgctgaagaagtggggtaataatcccaataagaacatggagaagaccgtataaagtccgcagtacacaaaagtctttccggcaacgagacgtattgcccctccccatagtccgcttttatccgctgtcctgccccccggaagcaacggttctgtagcgcggtgctgatactcgtcacccgtcagcataccgataaccatcaataaggtctggaagataatgaccatcatgacagccggaatcagataagaaccatacccctcggtgtggttatagagtgcggtgccggccacgtttacgggcttggccatggccacggcaagcagtccctgcggggggaggaatacggcaccgtccatgcgatgggcatcgttgatggcaaggtatacacgtgaagtggcttcttgcagcgcttcaaaatagagaaaggcgtctgtggtggcgtatagtgagaatacagcctcgcgtccctggaagacacgggtctcaaaatcatgcggaatgtacagaatgccttgtaccttgccctctttcatccattcgcgggcttcccgatagtccatggcttgtgcgtatacggctacttgcggcgtggcgtcgagccaacggatgtattgccggctaaggctgctgtgcgagttgtcgaccactgccaccggagcgtcggtcacgatattgggagcatacatatagttatagagcaacccataaacaaagatacctcccatcagtaccaacagtacggcatagctggtgctgatggcacgaaactcacgtgcgatgataaaggaaatctgcgaaagtttaccggatgttttcatatttacgactgattatggctcgtctgaggtgcggaagcatcgccaacgccaataacgggaagatacagagtatcactgccgaaggccataggtggataaatccgccgccatagtagagcatggtttgtgtaatttcggtgtaatggcgcaccggaaacagataagaggcgtcgcgcaccaacggatacatgttgagtaccggaaaggtgacaccggataaagtagctcccagcgagccgaccatggatacgatactgatgatgattgccacggcagggaacagggagaagatgaacaatgccagtgcctgagtggcaatgataaagagcactgtcatgacgttgagcagcacccaactcccttgaaaaggtatatgcaggatgccaaacatgacaaagttgcctaatataccgatcaggctgaagataagcgtataaggcaacagcttgcccgtaacggcaaccgtgatgtcgccgcccgccgcctgcaaccattgaccggctgtaccgaactttatttcgcttcctacggcatataccgtgataagcagtaccaacacctgaaagagtacaaaaaagaaaggctggctcaggtagaccgagtaatccagcgacgggttataaatgggatgattgttggcttgcacggggagcagaaaggtttctatctgctgttcgttcactcccagcgccacagctttcatcacgatgggggagagagctacgggtgcgagcgagctttcgaaggcggccatcaactcacctcccaccgagagcagggcatagtgataataatagttcagagtggcgtcctgccccgatatcatatcctgttcaaagcggggagggatcgagagataaccatatatttctttctgctgtaccgctttgcgtgcctcggcttcgtcaacgaagtggcgggttacccggaaggtgggtacggcagacatccgccgggtaatatctctcgaagtggccgtgttgtcccggtcgacaatgccgatggggatattttccatctgcccgttgccgaatatggtagccatgaaaaagagcgtgaacaacggaagtaccaggcagacaccgaagtagaggcgtcgagaggtcatccgttgccactcacgttgtatgacacgggttataggggagtgttgcataattagattgtctttgagttttgatttaccacagagtagcacagagtcccactgagaatatcttttctcttaaacatcctgtaaacaagagattaaaattctgtgaatctctgtgtcttctgtggtgaatcgtattcatttctctatttgatttctaccagtaccgacattcccggacgcagcccctccactttcttggtgggacgagcatggatttcgaatgtctgtaaatcatagctgcccgtttgcttggtcgacttccaggtagcaaaactacccagcggactgatataatatatcttgaacccgattcctttttgggccagggcgggcacatccccaatgaatgtacctcccatgcggaagtccggcatcaggtcttcccttacgttcagtaccacgtgtatatcatccatcaccaccaggttcatgatcggagtgcccggtgcgacaagttcgccccgtttaggaaagatggttgctatttgtccatcttccggtgcgatcaggcgggcatctaccaggagtgatgaaacttcatcaaccgtgctgttggccgcattgaccatcgagcgggccgaggctttatcttcactttgcgctccgtctacagccatttgatattgctcgtaagcagcccgttcggccgcttgtgcggctttgtacatggcttccacttcatctttacgttgagaagtgactacactgtctttatataaagtgagaatacggttgtacgttgtccgtgccaatgtcaggtcgctttgagttttgttccataattgctgcgccgtagctatgatctgcttgcgggttccggcgtcaatcttcttgttctgttctacggctacttgtttcaatgcgtccacctggcgatacttggcctctacagtcggactgttgatgactaccagcgtatctccttgtttcacccactggccttcttcaaccaggaaggtgtcgatgcgtcccggcagtttgccgctgatgcgaatctcggtagcttcggcctgcccttgcaagacgagaggctggtggcgcatggcaatcattccgatgacggtgaagagcgctactgccacaagtacaacgatgaatgcgatacttaaggttctgccttttttagattctgaattctccatctcttattattgttttattggttactccgttcattcgatttctatttcatttcttctgttctccgtaatgggaagagaggtgacgttcttcatgcttccgaactgttccggtattccgcacagtgccagcagattcatcagcgtcacgtcatattcgtagtaggccgccagtctggctacttttgttttcgaaagtaaggtttctgcgtctactacctctgtcgaagtggccattccttcggcgaaggcttttttcctcatccgtaccagttcttcactcagttcgatggtggtgttcagcgcccgtacgttgtcgagtgccttttgcaggccggtgtatagtttgtctaccccgacggacaggtcgtcacgtgctttctcctgtcccagtgcaagggtttgttgtgtcaggcgtgattgccggattcgcttctcccgttccagtccgtcgaaaaggttccaggtgaagcctaccccgatcatggtgcggggcaacaggttgctctgtatgccatgtgaataaagagtttgtttgccgaaaagggcgatattgggcagatagccactctggtcgatgcggacctgctgcttggccatgtgttcttgaagactcagttggttgagcagatagttgctgatgcccactacctgcataaactccatcttcggaggaagagtatcgttgataaacaagggagaggaaggggagatgtctccgctcgtctccagattcagcaaggtcttgagggtgcgttgcaccactgcctcttccttgcgggcggcttccagttcacgcagtgcttcgtccatgttgacttgggcaaagaggcgtgccgctttatctatcataccggtggactccagtttcaatgcgttctcgtaatgcagcttcagtgctttgtacgattccaggcggacaccgacaatttcttgtgccaggcgcaatccgtagtagctttcggcaagcagtgttcgttgggtggcatcggtctgtgcccggttctcacgggcaaggtctatcatcgtattgcctatcttagtggcatgaatacgtttgcctccggcgaacaatacccattcggcggtcaggtcgacagtggtcaggttgcgcggtgccaacggaaagatgagggtgttcgtcccgatttgatcgagtatggacgatatgattttatcgtccggcaagatggaatgtacgaagtctttggccggatcggtgaattgagaaagcggttgcttcacttctatcttctccgaaaggtgtacaaatgctccggtcgattgcaggctgggcatccagaaagcattcagcttcccacgttcggcacgggctatgtcgatgcctttgtcggctatcttcaggctttggttgcctttgtgcagcagttgcagcgcctcgttaaagctaagctgatgttgcgaagtttcctgcgtgggagggaggctctgcgccgcgacggtgttgttgtataagagcattcctgccgctatcatcagtgcgacgggtattttctttttttccatacgtctgttacggtttaggtttatgagtccttgtaacagacgaggggggaggtttgttcagaagataaaaggaatgccgtctttataatccgacttctctgttcaacttagaaggatgttggtgtgtatgaaacaaagttacgatgaatatggtttcttccttttcgtctacataatatataattttataaggatttacgagtaaatatcggcagctaatctgtttttctttggcaagtatcagttctacaggtcctcggaatgggttattgattaattgcaacgttttttgctcaatggttcttgccaggcgatcggctgctttgttgccaaactcttgttggctgtattctagaatttcaataactcttttttgtgctcgaattgtccatgctatcttcatcataatagatagtgtttaaaagtagtgtgcatttcttggctactgattgtttgtccttgttgtatttcatctattgcttgttctatttcttctttaatttcatcttctgtgagttggcaagggactgtttttttaacaacagttttttctttcaaaccgagtacatcgtgaagtttctgtttcactttatcgatgatttctttactgtctatgttggcaatagtccggatcagttctgctttttctgcttctaattcgagataagccatactattgtaagctactgtcggctcggacagtcgggtggtttcctcttctggttgcttgtatttttcaggctctttcataatacatcttgtttcttttagtacaaatacaaagataataaattaattgatagcgaatgatatttatctgtgtaaatcagcgtaatctgtggtgaagttcattataacatattcgtttgtcaaattggtaccttataaaatgttttctggatcaaaaagacaggtaatggcattttctgctaactatccctttttgttttcttacccatataggggagaatgtcccggaactttctgcttctttgcccggaaaaccgggcttgggaaggggaagagtctgtgttttcacctcgaagagccggtatttcgaccaaaagaagtaagcatttactccgaaagacggttgtgtttttcaaaaatgaataagagttttgcccaatatctctatatgttttcttccattacatatattgttcttatttgggagtgaaaacagtgatcctatttctctggttgctctcgtagagtgataggttgatgattgataaaaatgtgatattttattggtttttgtttctgttgttaaacgataatacaaagtaggtatccttttgttctcgtaattgatgtattggtttctaacggtcttttcttgatgcgaaaatacggcgattttagcccatccttggtactttgtacgggaaaaagcgaatctgaagcgtttggattatcattttgataaaagggtattttgtatctgtttcaattccctttgggatactcggttctatcttttttatattaccagtgcagcgatctctggtgacagctcgatgtttccgtctttgcggacaatgataaaacattataggcatgcgcgccgacaaggtttgacaggggagtatttacgggtgtgaccgtattgcatttatcgaacatcagttccatcgtccgactgcgaaatgtggcgattcgtcccttatgttcacctagagtccggaggatggaactatagcaagtcgccacttgtgcatacgtcattttgttacgtttcgccacccgtgcgatgggttcgccaccggagacggaaaggaatatttcccgttcatgatcgtctgtaatcaactggccgagttcctgaatgaggatatgaaaaagcggttggtgtagtttctgggttttcaatagaaatagttcgtcgtcacattgtgagaggagtacttcacgttccagttccttttctttgataatcttttccagatagttctcacctaaatctttggtctggtgaacatcaagatattgggtcaggctttcgtcatcaatcattaggacgttctctatcctcgatgaagcgatatatcccaagtttgcccatgtgcggaggtcggattcggcaataccgcgtttctccgacagttgtttgagggttatccagttagccatgcctgcccctccttgttacttctttgattggtctgttcatacctttctgattttatgaacgtccacatccttatgtataccttatatatataagaagtcgggcgctgagttcatatttacgcggaaagaggtagtaccaatacctagaacttcataaatatgttcacacgcccgaccctacgtcgcacgtatgaaactgatttattgaagttcttgtttttatgcattaattaaatttggtacttttctttccgcacaaaacgtttcaatatgccgcatttctcttcggctttcaagtgacaaagataaagaatcttgtgggaatagcaaagaatgtgacaagaaagttgagactgttataacttccgcatggaggcacactgcatggattggagatgtgtcattatccaccacagagtgacacagagttccatggagctgacttaatctgttgataactaatgatacttatctgtataaatctgttgtgaatacgagtttcgacataccccctctctgtattactctgtgttctctgtggtgagtttttgatacgcccacttgctctccccgaatattttcactaagtttgtcacccattaacgtgacgaacacgatatgaataagaacttacaccctttgatgctggccggaaccggtagcgatgtaggcaaaagcatcattgccgcagctttctgccgtatatttctgcaagacggttatcatccggcaccattcaaagcacaaaacatggcattgaactcttatgccactcccgaaggacttgaaataggaagggcgcaagccgtgcaggccgaggccgcaggtgtgccttgccatacggatatgaacccgttgcttctgaaaccatcgtccgatcatacttcacaggtggtgctcaacggacgtcccatcggcaatcggaatgcttacgaatatttccgccgtgaagggcgggaggaattgcgaaaagaggttcatgccgcattcgaccgtttggctgcccgatataatccggtagtgatggagggagcggggagtatctccgagatcaatcttcgcgacagcgatctggtgaatctgcccatggccatgcatgccggggcagatgtgattctcgtggctgatatagaccgtggaggagtgtttgccagtgtttacggttcggtgatgctgcttcggccggaagagcggaagcatatcaaggggatattgattaataaattccgtggagatatccgccttttcgagtcgggggtaaagatgctggaagatctttgtggtgttccggtggttggggtggtgccctactataaagatatctatattgaggaagaagactcggtgatgcttcagaccaagaatatccgtgccggacaaggcaaagtgaatgtggctgtcgtgttgcttcgtcatttaagcaatttcaccgacttcaatgtcttggagcgcgatccgcgtgtacacctgttctacaccaacaatacggacgagttgatgaaagcggatatcatcctgttgcccggttcgaaaagcactttgtccgatctgtatgagttgcgccgcaacggagtggcgcaggccatcgtccgtgcccaccgcgaaggtgccacggtaatgggcatttgtggaggttatcaactgatgggtagggaggtttgcgatcccgatcatgtggaaggcgagatagaacgcttgccgggattggggttactgcctgtcagcacccgcatgcagggagagaaggttacccgccaggtacggtttcgttttcttgaagacagcgctgtctgcgaaggatacgaaatacacatgggaacgaccacgccccttgcggatgttccagtttctccactcaaccatctggcggatggaagggaggatgggtattttgtagaccgcacctgcatgggaacatacgtacatggcattctcgacaatccttcagttatcgattacctgctggagcctttcgccgataaactgaaagagacggcttttgattacaaagcatttaaagaagaacaatacgataaactggcagcccatgtccgtaagcacgtcgacttgccgcttatctatcaaatattgacagacaatgattgaaggacacggagacgattcttataaataccgctacccgatacggagcaatttcagttccaatgtatataataaggtgaacctcgacggactgcgtgcacatttgtgcgggcgcatctctgccatatccgcttatcccgaaccggaaccttatacgctggaggcccgtctggcggaccgccacgctctgcctgccgcttcggtttgcgtgacgaatggtgctacggaagccatttatctgatagcgcagacctttcggggaacgaacacggccattctgatgcctacgtttagtgagtatgccgatgcctgccgcatgcatgggcacaaggtcacatcgctgtacacattcgatgcagtgccggaggacgtgcgtatggtctggctttgcaatccgaacaacccgaccggagaggtgcgtgataagaagtatctgacggaactgatcgcaaagcatccccgggtctgtttcgtgatcgatcagtcatacgagtatttcacgctgaaagagctttttacggcgcaggaagctgccggatttcccaatgtgatccttctacattcgatgaccaaacgctatgccattccgggacttcggttggggtatgtcactgcgcatcccggactgatagggcgtctgcgtacgaaccggatgccctggtcggtcaatcagcttgccatcgaagcaggactctacctgctttccgaaggcatcccggccggtctctccatgaaagattatctggcggaatgtgcccgcctgaaaagttcgcttgaggcgataggcgggttagaggtctggcctaccgatactcactttatgctggtgtgcctgcgtttcggaaaagctgctgctctaaaggaatatctggcccgtgaagaagggattctgattcgggatgcttccaacttcgaagggctggacgaacgtttcttccgcattgccacccagacaccggaagagaatgacgaactggtgggagcgattgcgaagtggatggcggagtaatgactgactgataggatagagaaagtatggatggaatgttcttttggtatattagccttgtgtatttttgcaggttgtttccgttaccgttagcctggttgttcgatcgctggcaaggcgatccgtcctggttgccacaccctgtggtaggattcggtaaactgatagcttggggagagaagtgtctgaatgcggggagggcccgcgtttggaaagggggaatgatgtcggtagcattgattgcgggagtctacttttttaccttcctcttttttaaagtgatcggagagtattccatcatactgacagcgctgatacaaacactgctgatcttttgttgcctggcaggtacaaccctgatacgtgaggtccggatggtcttcgaagccgtagaccgttcattggacgaggggcgtaaacaagtggcccgcattgtgggacgggatacctctgcactatctgcacaagaggtgcgtaccgcagctttggagactttagccgaaaatctgagtgatggggtaattgcaccacttttttggtatgcagtgttgggagtgcccggcatgatggcgtacaagatggtgaatacacttgactctatgatcggttaccgcaacgagcgttaccgtcaattcggctgtatagctgcccggatcgatgatgttgccaattatattcctgcccgcctgacggctttgttgatgatcctcgtcagcggacggttttctttgctcaggttcgtgggtaaatatggcagccggcacgccagcccaaactccggttatcccgaagctgctttggccggtattctgaattgccgtttcggcgggccccactattatttcggcgaagaggtgtggaagccttttataggcaacaacgaacgggcattgacaaccgaggatatgaagaaagccgtctgtgtcaatcggcaggcagaggtactgatggttgtgttggtgtggctgactattcttctgtctttgagttaagttgcagccggaccactccgccgtaaggtgtcagtgcgttaaaagcgtcttccattctcagtatccctgcatagatttgtgcacaaatcagcacccctccatgtgcaaagacggctatgcgtttatactcttttccactcacttcattcaggaactccgatacccgttgaagctgcatcataaaagactctccgcctgtagcagctacatggaagtagtcgttataccactcctccagtcgcggatcacatattttatcaaactcctgcatctcccattcaccgaagttcagctctttcagccgggcatcacgaatggcatccggataaccgcagtggtctgccaggcgggtgcaacgactcagcgggcttgtgaatacggcatcaaatacgtcgttctgtagttgttgagccgtaattgaggcttcttcttcaaaactatctcgcaaaggtacatcagtctggccataacagactcctttaggaacatcgacagaggtatggcggattaatatgacttccatgactatataaacattagtataactattcccaggtagaaagacagttcgcttagaagaaacagtgccccgcaacagtcgccggtataaccttgcaacttccgtttcatcagtgtgcaaagcagatacagcatgaccagcggaaatacgatagccatccagtatcggtacggtagcaggagtgctgaaggaagtataccgcataacagaccgaaagcaaattctccgcctgacattctgttatatactactttggccttgctttcttcttcttttcgtgcgtaaggcaggaagttgatgatttgtgatgaggtcagcttgcttatcgtgtcgcctgcaatcaatgtaatacatgcgaaggagagggggagcgacatcaaaagactccatagaagaaggaagtagaaaatcaacccgatgacaccgtagctgccgatatgcgaatctttcatgatggaaagaatccgctcccggttcgtacctcctccgaatccatcgaagaaatctgccaacccgtcttcgtgtagggcaccggtgatcaataaccgggcggcaagtgccaacaatacggcaacggagaaggggaggatctgtgcgcttaaccaaagtactcctgccatgatgctgcccgtgagccatccggacaaaggccagtaaggcacaacgtgtttaaaacattctgccggaacttcgcggatacgccagaaggggaggcgggtaaaaaagataaatgctgctaatatattcatcggcaaatcttattagaaatatttggtgatggctgcatgtgcaaagttgtccatctcgttgatcatccgtatggcagagtcaatgataggataggagcagatggctccggttccttctccgagacgtaaacccagattcagtaatggcttggctcccatggcatcaagtaccagcttatgtccggcttcatctccttgatgaccgaagatggcataatgcaatacctcagggtaaagttgggaggctgcaaggatgcagtttgtcatgatgaatccgtctaccaggataatcatctttaactcggctgcctgaagcatggcgcctattgccattaccatttccagtccgccgaaatagcggatcaggtcgcgtgcgcttccgtctccctgataatggtccagtgcctgctgtaatacattatatttatgacggacgcctgcattgtcgagtccgctgcctgctccgacacacagttcgagaggaatatgggtgaagcacgtcatccacatggaagacgaagaagtgttgccgatacccatttcgcccaaagaaagcacattgcacccttcggcatgacactgacggactacttccgctccgcgctcgatgcacaaattcatttcttcttctgtcatggctgcctcgtacagatagttacgcgagcttttgcgtaccttcatgttgatgattcctttctcgtatgggaggtcgtaatccactccggcatctacaatcttcaactcgaatccgtgctggcggcaaaggaagttgacacctgcccctccgtgaagaaaattgctgatttgttgccaggtgatctctttgggagagaggctgactccctcgtcgacaatgccatgatcggctgcgaatatgatattttgaggatgtctcagctcgggagtaagtgtttgctggataagcccgatctgcaaggccagttcttcaagtgttcccagagagcctttgggcttggtcagattatttattttgtcggtcagtgcttcccggatggtttcgtccggtctggtgatttgaaatgttttcattttataagggttattctatcatttacttttcgtcttttactttcacaggaatccccgataccattagtattacccgattggcccgggaggctatatactggttcatccatccttgcatgtcagtgaactttcgttgtatcaggttttctgaagttcctcccataccgatttcgttggtgacaaaaataagggtcgcgtcctgttgtgtcagtcggtcaaactcggctttaacagcagtcagtgccttgtcggtgtctgcttcgagatcaaagaaataattggtgcaccagagggttacacaatcgatcagcactacacgcccttccaaagagtggcggctcaattctttttcttcctctatattggtccattccggtccgcggttggcttgatggcgcaataccctttgacgaaattcttcgtcccagatacgtgaggtggccaagtaaaccggattaggagagagggataacgccaggcgttcggcatagctgcttttgcccgaacgggctcctccggtgatgagtatgatctgtttcatgaatctatctgtgtattttgggttagcaaatgtacggtaatattttatatttccattcccggatgcaaaatattgtgccattgctatgggtatttcggaaacaatatttatctttgcatggctttacaaaataaaagcaacacatgcggtagtagctcagttggcagagcggcggcttcccaagccgcaggtcacgagttcgaccctcgcctaccgctcaaaagtttatctcctcaactaaaatagaatatcgcagatttctccagtctttttgtaggaaaagaatgatggatctgcggtttttttatgtatttcttctgtcactctttgttcttttcttacctttgtgaatcaatttaatagataatcacatgaacaagaaactaatcctatctattttcgttctggcaggtgctcctatgctgctgtcggctgcaggagaagcacggttgttgcgtttccccgctacgaacggaaatgagatcgtattttcgtatgcgggcgatttgtataaagtgcctgcttcgggaggtgaagcacaacgcctgacttcccatgtgggatacgaaatgtttccccggttttctccggacggcaaaacgattgcattcaccgggcagtacgatggaaatacagaagtgtataccatgcctgcaacgggtggcgaaccactacggataacctacacggctaccaatagccgtgacgacttgggtgaccgtatgggacctaacaacattgttatgacatggactccggacggacaacgtatcgtgtatcgtaatcgcatcagcgacggattctccggtaaactctttactgtagacaaagaaggcggattgtcagaagtcattcctcttcccgagggaggcttttgcagctattcaccggacggaaaacaattggcatacaaccgggtgatgcgcgaatttcgtacctggaagtattataaaggcggtatggccgatgacatctgggtgtataatccgggaaacaaaacagtggagaatgttaccaataatgtagctcaggacatttttccgatgtggattggcgatgaaatctttttcctttccgaccgtgaccgtatcatgaatatcttcgcatacaatacgaagaccaaacagactgtaaaggtgacgaacttcactgagtatgatgtgaaattcccaagcgtccatggcaataccatcgtttttgaaaacggcggatatatttataagatggatgctgtggcccggaaagctgaaaaggtaaacattacactggcttctgataatatctatgcccgcaccgatttgaaagagggagcgaattatgtgactgcggccagcctttcaccggatggagcacggatggtagtgacaagccggggtgaagtattcaatctgccggtagagaaaggggttacaaaaaatataactcgttcgccgggagctcacgatcgtgatgcacagtggtcaccggacggaacacagattgcttatatctctgatgccacaggggaaaccgaactttatctgcagaatgcggcaggtggcgaaccgatgcagttaactcataagaacgatacatatatccgtgactttaaatggagtccggattctaagaagatagtgtatatggatcgtaagaaccgagttaatctgctggatgtggcttccgggaaagtttctttattattgcaagatccggtgggagtgccgggtggagttactttctctccggacagtgagtggttgacttatacacggatgggtaaaaatgaaatcaatgtcgtatatgtctacaacattgcggaaaagaaagaatatccggtgaccgacaaatggtataactcttcttctccggtgttcagtgccgacggaaagtatctgatattctcttctgcccgtgattttaacccgacttacggatcattggaatggaaccatgtatataataatatgtatggtgtgtacatcgctttgctgtctaaggatacatcgtctcctttcatgcagaaagatgcggaagtggctgtatctaatgctacccccaaaagcggggataaaaaaccggcagataagaaggaagtggccgatgcttcgttggtgaagttcgatccggatggcattaccgatcgcatcgttcgcttgcccttgtctccgtcttattatggtaacttctattcggatggcaacaaggtgtactactggggacgcggtggtacgaaaatgtatgacttggcaagtcagaaagaggaatcgattgccgatggagcttcgatggatgttacttacgatggtaagaaggcacttttctttaaaggccgtcagatttatgtgaccaatcttccttcgggtaagacagaactgaccgctccggtcgatttaagcaatatgaagattactgtggattatccgaaagagtgggcacaaatctttgatgaagcttggcgtgcctatcgtgacggattctatcaggagagcatgcacggtgtagattggaaagcaattaaagaaaaatatgcggtcttgctgccttacgttaaaactcgtttagacctgaattacattatcggtgagatgataggtgaattgaactgtggacatgcttatgtcaatccgggagaaacggaacaacccaaacggatcaataccggcttgcttggtgcggaaataactcgcgacaagagtggctttttccgtctggagaagatattccccggagcatcttggagcaaagaactgcgctctccgcttacggaaccgggtgttgatgtgaaagtgggagagtacatcgtagctattgacggtgtgccgactaatacagttaaagatatgtattctttactggtgggtaaagcagagatacctactgaaatttcgctgaatgtcaaacctcagctttccggagcacgtaaggttgtgatcagtccgcttgccaatgaatatcctttgatacattacaattgggtacaggataatataaagaaggtggaccaggcttccaacggacgtatcggatatatttatattccggatatggggccggaaggcttgaacgagtttgcccgctatttctatccgcaacttgataaagaagggttgattatcgatgatcgtgccaatggtggaggtaatgtttcaccaatgattttggaacgtctttctcgtgaaccttatcgtctgactatgggtagaggtaccagccatgtgggaacagtgcctgatgctgtacaggtgggaccgaaggtttgtttgattaataaatactccgcttcagatggcgacctgttcccgtggggcttccgcgcacttggcttgggtaagttgataggaactcgtacctggggaggcattgtgggtatcagcggatcattgccatacatggatggtacggacatacgtgtgccattctttacgagctatgacccgaagaccgggaaatggattattgagaaccatggagtagatccggatattttgattgacaatgatccggtgaaggagtggaatggagaagaccagcaactgaacagagccatcgaagaggttatgaaacagcttaaagatcgtaaaccgttgcctccggtacctgctccgagagattttagtaaataaactgataagcctttgtagcaaaaggcttgttcaccacagattctatggatttccacagacttatttccctatttctgtatgaatccatacaatctgtggcgtttttttaatgtacagtttttaaaatctatatgaaacaagaactaaaggaaaagcttttgcttttagcggataaatatgaggtggaagaatttattatggatgatccgatacagtttccccatcggtatactgataaagctgatattgagatctccggactgatcgcttcctggatcgctaccggtaatagaaaggccattatcaaaagtggtgaccggattgatcacgagcttttcctgaatgctccatatcgatatatattaagtgaagaatggaggaaatatcggggagtaacatccagtttttatcgctattactcctggaatgatttctatatactctgccagactttgtatgctgcctaccgggagcatggggatctggaatcctatttgtgccattctctctcttccggtacgccattggaaagattgcaatcggtgttcggacatatcaatgggatgcctgctttgtcaagtgcttccgaagcaaagaaaatgtgtatgtttctgcgttggatgattcgtagggattctcctgtcgacctcggtatttggcggagtttcagtccctcagatctaattatccctcttgacactcatgtacatcgcatctcgactgatcttggattgaccaatgcacgtaaatgcctgaaaacagcacgttgcattactgatgcattgcgggatatatggccggatgatccggtgaagggagattttgctcttttcggatttggtatcaacgaaccggtgaaaagttaggtacgttcataagcaactctttgttttgacgatctgttctttgggtgataaagaatgcgttaattctctaatatgtatggttcccgttggaagagaagggtaggaaatggtgatctcttgtctttagagaaaccataaaccggtcggttgtcgatccataaaccggctgatttatatataaccttggtatgacctctcttaaaattatagataaagaatgagcacagttcacccatttttagtatttttgcatcctgttttgaagatagaaaactttaaaagaagaaaaatataatggcaaaagaactgaaagacctgaccaaacgcagcgaaaactattcgcagtggtacaatgatttggtggtgaaagccgatttggcagaacaatcggctgtgcgtggatgtatggtgattaagccttacggatacgctatttgggagaaaatgcagcgtcagctggacgacatgtttaaagaaaccggacacgttaatgcttatttcccgttgctgattccgaaatcatttctgagtcgtgaagctgaacacgtagaaggctttgccaaggagtgtgccgtagtaacacattatcgcctgaaaaatgccgaagatggttcgggtgtggtggtcgatcctgctgcaaaattggaagaagagttgattattcgtccgacttctgaaacaatcatttggaatacttataaaaactggatccagtcatatcgtgatctgcctattttatgtaatcagtgggctaacgttttccgttgggaaatgcgtacgcgattattcctccggactgcggaatttttgtggcaggaaggtcatacagcacacgcaacgcgcgaagaggcggaagaagaggctatccgtatgttgaatgtatacgccgaatttgcagagaagtatatggcagttccggtagttaaaggtgtgaaatcggctaatgagcgctttgccggtgcacttgacacgtataccatcgaggcaatgatgcaggatggtaaggcattgcagagtggtacttcacacttcttgggacagaatttcgcaaaagcattcgatgttcagtttgtaaataaagagaacaagcttgaatatgtatgggctacctcttggggtgtttctacccgtctgatgggggcactgatcatgactcactcggatgataacggtctggtacttcctccgcatctggctccgatccaagtagtgatcgttcctatctataagaatgacgagcagttgaagctgattgatgctaaggtagaaggtattgtggcaaaattgaagcaattgggcatttcagtgaaatatgataatgctgacaataaacgtccgggctttaaatttgccgattatgaattgaagggtgtgcctgttcgtctggtgatgggtggacgtgacttggagaacaatacgatggaggtaatgcgtcgtgatactctggagaaagagactgtgacttgcgatggaattgagacgtatgttcagaatctgctggaagagatccaagctaacatctataagaaagcacgtacttatcgtgactcacgtatcactacggtggatagctatgatgagtttaaggagaaaatcgaagaaggcggctttatcctggctcactgggatggaacagtggagacggaggaaaagatcaaagaggagacaaaggcgacgattcgttgcattccgttcgaatcgtttgttgaaggtgacaaagagccgggtaagtgtatggtgacaggaaaaccgtctgcttgccgtgtgatatttgctcgttcttattaatcattaatataaggtatagaaagaaaaggttggaggtacccgaaatgtgaacttccgacctttttcttttttatcattaatctgataattctatgaatccattgttaaatcttatctggctgctttgtggcggcatctttactgcgatagaatatcttatttcaagtcttttaatgatgattaccattattggtattccattcggctttcagacattgaaattggccggacttgctttatggccatttggcaaagaggtgagaagtactcctgattctggaggttgcctcagtatcataatgaatatcatctggttgtttctaggtggaatttggatcagcctctctcacttggggtgggggattttgctttgtattaccattatcggcataccgtttggaaagcagcactttaagttagccggactcgctttgactcctttcggaaaggtgattgtcgacaaaagtttctaaatgaaatgctctttcggcgcatttagcaagttttactctaagagctgtttcatttctatttggtagttttgtcatcagtaaaaagacagagagcattacattggatgctctcttttcatttccgatttcgctttttgggtctctttcaccgaatcattcggtatgctgtccttagcggcagcttgcttccgtctcaggtttctcagtttccatttattccaaaaaagaagctcactccatttattgaagtcctttttatacatgataccgattccttgtgtagtcaggttggttcgcgtataatagcggtcattcgtttcattgtatgcttttaggcgtatgtctcccgaacggttgagtaaccattctgcttcaaagtctccaatgaagttggtatttgccaatggattgtcccggtagccgaaattcccgttgattagcaagcggttgttcagcaactgcccggataagatgccttctatttccatgtccgtccaacccttgtcacctgtactgagattagtgccgatgttccagttgttgttatcgaatacttgtgacaacagattgtttaactgtccagatagggtagagaacagggccgatgatgtcatgttggagttttgggtacctccggtactttcctgcggatagaacttgccaatgcccaacaggtagagaatttgcatgttcatctgttcgtctgtactgatataattgcgtaccagtgtctgtatctcgtcccgttcattggggagttcaattcccaacttgatgttaggacgccagagaattcctgtcagattcatgatgcaattcactttcacattaggttgttgggtaattgtttccgaagcatcgggaatcaggtcgttcagtgaagctgaatttaccgtgtaactagcctgaatgtcaagtgtcgcatccaatgggggaccgttgaaagtgatgctgcttccgtctttaatgataaaatctttgcggatgacctcttgtaaactgaatttgtagataccttggttgatacggtaattaccgaacattttcacatctcctttattaaagaactctgtacgtatgttaccggagcctttaccgctgatgtaatctccggcaatagggtccatgataattttcattgtagcatccggagtagcatctatcagcaggttcagtcgaatatccgttttggattcttcttcttccatctcttgctgtaaccgatcgtattctgacattacattaatggaatcctgcacaaacctgcggggcgttttatcgacaaacttaataaactggttgctggctgctgaagctgttgcgttggttatgtagacaaaattggtgttacgattggtagtgacagctgcattgacttgtaattcctgcgggtttccaatcaacattgcattaccggttccatatacttttccgtaaaagttaatatccggattttctttcgtattcataagtaacatgttgttcacgttgaattcgaaatgataacttaggtccctgaaatgccggaaattcagtttgccgttcatagtaccctgatgtccttctatatctgctatgcgtatattatcgaagctaatgccactggtggacaaacggatggtgtctgttacagcgaacgaagtattcagtattcctatttttaaggatgcgtccgtcatcaggtttccttcgatattgagtgctttgaactttccgtagaaatgggctttaccactggtacgtccatgcaggtcttcaacaatggaacgcatgaagtattggagaaattggatattcgtatgctccgtctctatattcaagtctagtttgctttccggttttaacggatagacatgcccgatgacatgcgtcttcgacactccttcttcttccatgtgtgcatcaagaaagatagcgcgcatgtcgttcttccacgcaccgtaaatatccatagcccccaacgaggcatcattaaaggtgaagtttttaaaatgcaggcgggtgttcatgaccggttcttttaaaatgccactggcatatgctgttcccgtagcgtctcctttgaagtccacatcgtcaaagtttaccacatcgaacacgtagcctacattgatgtcctttagttctactttcaatgtatctttggcttgttctgaaatgcgtccattgatacggatatgacggtcctgatgtgaaaaatagaaatcattcacatctatttttcctgaatcgacgacaacttgtgacggatgaacctgccatagagtatcattcaggatgatgtctgtctgtttaatatctacgacagttttcagtggagacttttcttcggctgcgcggaagaaactggcggcggcagatagtcgtccgctataagtactgatggcattgttaccccagttgatattggcatttatagtgtcattcttggcttgtgcgtccagagagatgcttacagcactttctttctttaggttattgaaccggacctttgctttgaactgatcggtaggattctcacaaagtaccaaacctgactcgataaacgtgttttgatattgtaaacgtggaaaatagccttctacacgcaagcgttgtgcctgatcgttgaagtaacctttcacagtcgagtgtgaatatattttcaatgggatgtcaaatactgtcgacaacagttctgtattaaatatgtgaatatcgaaactaaagttattattggttttaataggctttttattcggttgaattagtgaaggaatatatcgccgcataatgttcataacacttgccggaagcgtatgatacaggtaattgccttcgatacttgcttttaagaaactggaggttagtttcaattggttctctttatcttggcgggttgcagtgatgttgatattatccagaaaatagctcttctctggtgcggtaaattgtaaactgtctatattgatttcacccatcatttcatcgatggaaccaccccggaaattagcttttagtttcaaagaaaattctgcatccggatactcctttgtcagattcaggtcgtgtggacgtattttgtctatgactgcattgaagttaaaagtagggactttttcgactacattgatgttgccgtttaaatgtaccgaaccgttttcgtcattcaatgccactttaccgtcaaaaccaccgcgtttgaattctccgtccagcgtgatgttttcatatttataattactgtattcgagggatgctatcaaaccttttaacgtaatggaaggatattggctcttgtagtggtttcctcggacatccagattaaaggtaatcttgcccaattgcttgtttcctagcagttgccctaactcaaaatcggtggtctttacgcctcctgaataagaaaacagcgctttagctttatcggaactaagctttaagtcggtttggacggagcctatgtcagtacggaacaggccgtacataaccaagtctgtaaagtaccctgatatttcaccatgaaaagaggtatttcctaagtgttgtaatacagggggaacgccattgtagtgtgggcttagattgcgcactaaaaatccgatcccctctttgttggcagagagattggccagatgtccataaacgtaagcgtcttgaggacgtgataagtcttgtaaagatacatctccttttagtcggaacttatctcctgcgttgatttccagtgttctgcaattcagttgattgagcgtaccttctacatcaatgttgagatctagtttttctttaaaattggataatgccgggacaaaagctgaaatgtcattcaaagtcacatgagatggtaaagtacggaaagagaagcgaacgttatcggcaaaatggttgagtgctttcaaactgtcatattccattcggatagtatccattttcatttcggtacccggcatttctattgcgaaattttctattttcatgcctttgttattagcaatgactttcaggctcaactttcgtagttcaaagcccgattgttcgtctacactcaggcgtttgatggctgcattgatcgaatcgttttgaagtgccttgagtgaaatgttggcaatgatattgtgtagtttgatatgttgcgggttaaactttccgggcgtttcttcttccgataatacgtcgtaggatagtttaccacggcgtattaatatggaattaatacgtagatcaatgtccttttttgtttttactgtatctttggatgcaaatgcgtccaagacgaatttaaaattgggctccatgtgcggagcgggcttattcaagttgatattaaagccaaataactgcacgctgctgattgtgatttttccgttgaataaaggaataatatcaaatttggcagaaagacgtgtaattttgagcatttcttttcccgattgatcgtcgagcaatacatcatctataatgatacggtttaataatccaatgtctatcttaccgatagtcagttctgtacccaaagtccgggatagttcttttgtgacaaacgtagtcatatttcgctgaatatatggaatattcagcaaaataatagttccgatatatatacctaatatgataccgataacccaacgtacagtcttcttcagcgttctgataggcggttgttttgattttgagaacaaaaatataaaatagttcgttatgaatcctacttttatcattacttttgcatcgtttaaatatcaaaaagcgtatgagtacaattatattaggaattgaatcttcctgtgacgatacatcagctgcagttattaaagatggttatttgttatcgaatgtggtatctagccaggctgtacacgaagcttatggtggagtagtaccggaattggcatcgcgtgctcaccaacagaatatagtacctgtggtgcatgaagcgttgaagcgtgcaggagtgaccaaggaagagctgagtgcggtagcctttacaagggggcctgggttgatggggtcattgctggttggagtatcttttgcaaagggttttgcacgttcattaaatatcccgatgattgatgttaatcatctgacaggacacgtgttagcgcattttattaaagaggaaggagaagcaaatgaacagcccgattttccattcctttgtttgctggtatccggaggtaattctcagattatattggtgaaagcatataatgatatggagattctgggacagactattgacgatgctgccggagaagcaattgataaatgttcgaaagtaatgggacttggttatccagggggacctataattgaccgtttggcacgtcagggcaatccgaaggcttatacttttagtaaacctcatatttctggtttggattatagttttagcggattgaaaacgtcgtttctttactctctgcgtgattggatgaaagaggatcccgatttcatcgaacaccataagagcgatttggcagcttcgcttgaagcaacggtagtagacattttgatggataaacttcgtaaagcagccaaacaatataaaattaatgaagtggctgtagcgggcggtgtttctgctaacaacggtttgcgtaatgcctttcgtgagcatgcagagaaatatggttggaaaatttttattcccaagttcagctatactacagataatgccgcaatgatcgctatcaccggatattttaaatatcaggataaagatttctgctctatagaacagcctgcttattcacgtgtaactttgtaagagtcctatgtttgcggagataataaccattggtgatgaactgttgataggacaggtgactgataccaattcggcatggatggggcgcgaattaaataaagtaggtatagaggtgattcgtgtcgtgtctgtacgagatcgggcagatgagattattgaagctgtagatgcttcgatgaaaagggcaaatattgtactagtgacagggggcttgggacccaccaaagatgatattaccaaacagactctttgcaaatacttcggtaccagactgatctttagcgaggctgtctttgaaaacgtaaaacgggtattggcgggaaaaataccgatgaatgcgttgaataaaagtcaggcaatggtacctgaagattgcatcgttattaataatcgggtagggagtgcttctgtcagttggtttgagaaagatggtaaggtacttgtttctatgccgggagttcctcaggaaatgaccactgtgatgagtgaagaggttattccacgtttgtgtgcaaagtttcgtacggatgcaattgttcatcgaacatttactgtacaaaactatcccgaatcggtgttggctgagaaattggaatcttgggaaatggcattacctgcttgtctaaaactggcttatttaccaaaaccgggtttgattcgtttaagattgacgggacgcgggcagaatcgtagcgaggtagaagcttgtgtaaatactgagagtgccaaacttgaggcaattttaggagaagatattttggatgaggaagatactccgattgaaattttgataggcgaacttttaaagaagaagaatttgactctttctaccgcagaaagttgtaccggtggaagcattgcagcccgtataacttcggttgccggcagttcggaatattttaaaggaagcatagtagcgtatgccaatgaagtaaagacggagttgctgggtgtatcgatggaaacgcttgaaaaaagaggcgcggtaagtgaggaaacggtgattgaaatggtaaaaggtgcgatgaaagcgctaaaaactgactgtgctgtagctacgtctggaatcgcaggtcccagcggggggactgaagagaagcccgttggtacagtttggattgctgctgcctataaaagtgaaatttgcactatgaagcaggaaactaatcgtggaagagagatgaatgtggagagagcaagcaataatgcccttctattgcttcgaaaattggtgaaatgaagaaaaattaccgctcaataatgaatttatttaggaaatacttgttttatatacataaaagtgcttactttgcgctctgtttgaaagaagtatagattaaaactataaaaataagatagaaatgtcgaagatttgtcaaattaccggaaagaaagccatgattggcaacaatgtttcacactcaaagagaagaactaaaagaacctttgatttgaacttgtttaacaaaaagttctactatgtagaacaggactgctggatcagcctgagcctctgtgccgctggtttgcgtattattaataaaaaaggtttggacgctgctttgaatgatgcggttgccaaagggtattgtgattggaaaaccattaaagttgttggctaaaacgttaaaaagaggagaaactgattatggcaaagaaagcaaaaggtaatagagttcaggtgattctggaatgcacagaacacaaagatagcggtatgccgggaacatctcgttatatcacaactaagaacagaaaaaatactactgaaagacttgagttgaagaaatacaacccaattctgaaaagagtaacagtacacaaagaaattaaataataaagaaagagtataacccatggcaaagaaaacagtagcaagtttgcacgaaggatctaaagaaggtcgtgcttatactaaggttatcaaaatggttaaatctccgaaaactggagcttacatttttgatgaacaaatggttcctaacgaaaaagtacaagacttttttaagaaataagccggttgcataaatagcaatccgaaaaatcctctcactgatattcattgaggggattttttttgccaattttattcgcttcattttttactttacgccagttttattatatctttgtagcataatgtattatacaaataattgtaatcatgggattttttagttttttctcaaaggaaaagaaggaaactttagataaaggattatctaaaaccaaagaaagtgtattcagcaagattgcccgtgcggtggccggaaaatcgaaggtggatgatgaagtgctggataatctggaagaggttcttatcacatcagacgtaggggtagagactactcttaatatcatcaagcgtatcgaaaaacgagcagcagaagataaatatgtaaatacacaagagttgaattcgattcttcgtgaagaaatagctgtattactgactgaaaataattcggatgatgttgccgatttcgatgttccggtagagaaaaagccttatgttattatggtggtgggtgtaaacggagttggtaaaacaaccactattggtaaactagcttatcaatttaagaaagccggtaaatctgtatatttgggggcagccgatacttttcgtgcagcagcagtggagcaattggtgatatggggcgagagagtggatgttccggtcattaaacaaaagatgggggccgatccggcttctgttgcgtttgatacgttaagttctgcagtagctaataacgctgatgtggtgattattgatacagcaggacgtttgcacaataaagttggcttgatgaacgagctgacgaaaattaaaaatgtaatgaagaaagtagtgcctgatgctccaaacgaggtgttgttggtgcttgatggctcgaccggacaaaatgcctttgagcaggcaaaacaattcacacttgcaacagaagtaactgctatggctataaccaaattggatgggacggcaaaaggtggcgttgttatcggaatttcagatcagtttaagattccggtgaaatatatcggactgggtgagggtatggaagacctacaggtgttccgcaagaaagaatttgtagactccttatttggagagaatgcatgaaaagaaaaactatagatatcataacattagggtgctcaaagaacctggtggattcagaacagttgatgcgtcaattggaagaagccggatatgatgtaacccatgactcggaaaaaccgacaggagagatagctgttatcaatacctgtggttttatcggtgatgcaaaagaagaatcgattaatatgattctggagtttgcacaagaaaaagaagaaggcaatttggagaaactttttgtaatgggctgtctttcggaacgttatttaaaggaattagcgattgagattcctcaggttgataagttttatggaaaattcaattggaaggggttgttacaggatttgggcaaagcttaccatgaggagcttcatattgagcgtactcttaccactcccaaacattatgcttatctgaaaatatcagagggttgtgatcgtaaatgctcttattgtgctataccgattattacaggaagacatgtatctcgtcctatagaagaaatcttggatgaggtgagatatttggtttccaatggtgtaaaggagtttcaggtaattgctcaggaattaacttactatggagtggatttatataagaagcaaatgcttccggagttgatcgaacgcatttctgagattccgggtgtagaatggatacgtttacattatgcatatccggcacatttccctaaagagttgttccgagtgatgcgtgaacgagataatgtatgtaaatacatggatattgcattacagcatatcagtgataatatgctgcaacgtatgcgtcgtcatgtgacgaaaaaggagacttaccggttgattgaacaatttcgtaaggaagttcccgggattcatttgcgtacgacgttgatggtgggacatccaggagagacagaagaggattttgaggaattgaaagagtttgtacgtaaagtgcgctttgacaggatgggggcttttacttattcagaagaagaaggaacatatgctgcggctaattatgaagactctattcctcaggagctaaaacaggcacgattggatgagttaatggctattcagcaaggaatttctactgaattaagtgcatcaaaagttggacaaaaaatgaaagtcattattgatcgtatagaaggtgaatattacattgggcgtacagagtttgattctccggaagtagatcctgaagttttaataaggtgtgaaggggataatttaatgattggtaacttttatcaagtacaagtgattgattccgatgaattcgatctttttggtgaaataatttaaatatatttcctgaagaatttgttttttgatctggattgattaatatagcaacatatttttaagattgtaggattttgaataataaagaatttacttctgaactttctcgcagattggggtataatacaaaatatacttctgaactgataacatctctgctgtctgatattactcaggaattgcaggaaagcaatgctataggaatacagggatttggtacttttgaggtaaaaaagaaagcagaacgtattgtcatcaatcccgtcactaagttgcgactgttggttccacccaagttagtactggcgtttaagccgagtcctatattaaaagataagtttaaagaaacatttccgtatgaatgaaaagttgactatacaagatcttgttgaactactggttaacagacatgaggtttctcaagaagatgctgatgttttcgtccgggagtttttcttattgatagaacaagctttggacgctgatcaatatgtgaaaatcaaaggattgggtacattcaaattgataggggtcaatagtcgtgaaagtgtaaatgtcaatacgggtgaacgtattaaaatagagggacatactaagatttcttttactcctgacccttctttaagagatatcataaatagacctttttcacatttcgaaacagtagtgctgaatgagaatacagtcttggaagatacgccaatagaggaattggaggaagaatcagggaatatatccgaaacaactgagcttccgttaataacagagaccgtagagagagaggaagcaaaagcagaggagaaggtggttgaaacagaggcgaatgggaaagtagaaccggaaacctcaaaagggcaggatgttgtgtcgtcagatgtggaagttgcagaagacgtttcggaagttatgaaggaatccgaaaggacagaggttgtagatgatattgacatacttgaaactgttgaagatgttagcatacataaaggtagtgaagctgtagtagaaggttcatccattgctgaggttcgagaagagggtggattggataaagtagtggaaaattctgaagagccaatccagttcactggagatacagggcaagaaactacagataatttaaaaaaggtgatagaagacgaaggttctcctaaattgactgccgaagaaattatagcacgggagattcaaaaagcagaagtatcgactatccctgtaaaaaaggaaaagcgcccaaagaaggaagttaaaccggaaaaccaaaaatctcctgttccttacttaatagtaattatagtagttgttatgtcgctttgcggtgcagcattagtttttatttattatccggatttgttttctaaaaaagaatcggaacagtcaataaccacagagactgtagagaaaaaagaaccgatacgggaaattccattggatactgttgcaaaagcggatactattgtcaaggtggtagcaaagactccgaatcaacaggagataaaacagatgtctgagcgtgtcaatgtgtcggagaaagtagataaaacttcagaaagtgaatcggtatcccgggaaaagagcactaaaacagtgtcaatcccggtcaagccggattcagtgaattatacaattaccggtactaaggcgacttatacaattaaagaaggtgaaactctgactagggtatctctacggttttatggtacaaaagatttatggccctatatcgttaaacataatcggggagtgattaagaatccgaataatgtaccgtatggtactgtgcttaaaataccggaattggttaaaaaatgacagtctaatgtgatcacccgggtgtatacaagtttatacattcgggtgttgtgtttatgttatacaaatacaaaagcgtatgaaagtaccttaatctaaagacttcgcattgttttttaataaaaattagttggaatggttaaagatatagtgtacttttggaatcgaaattaaaaagccttacaacataggctttgctcatattattaaaaagaaaattaaacaataaaataattagtatttatggctgaatcaattgacatccgcgaattgaacgagcggattgaaagacagagtgctttcgttaccaatcttacaacaggcatggaccaaatcattgtgggtcagaaacatttggtagagtcactgttaatcggactactttctgatggacacgtgctgcttgaaggtgtaccgggtttggcaaaaactttggccattaagacattggcctcgttgatcgatgcaaaatacagccgcatacagtttacgcctgacttattgccagctgacgttgtcggtacgatggtttacagtcagaaggatgaaagtttccaagtgaagaaaggtccgatttttgctaattttgtattggctgatgaaataaaccgtgctcccgctaaagttcaaagtgctttgcttgaagcaatgcaggaacgtcaagtaactattggtaaagaaacattcttgttacctgaaccgttccttgttttggctactcagaacccgatagaacaggaaggtacatatccgcttccggaagctcaggtagaccgttttatgttaaaggtgattattgattatccgaaacaggaagaggagaaattaattattcgccaaaatatcaatggagagaaatttaatgtgaagcctatcttgaaggctgaagagattatcgaggcacgtaaagtggttcgtcaagtttatttagacgagaagattgaacgttatattgtagatatcgtgtttgctacacgttatccggaaaaatacgatttgaaagaattgaaagatatgattggattcggtgggtcacctcgtgcctctattaatttagctttggctgcacgtacatatgcgtttatcaaacgtcgtggctatgtgattccagaagatgtacgtgctgttgcgcatgatgtacttcgtcatcgtatcggattgacatatgaagcggaggctagcaatgtgacttctgatgaaattgtcagcaaaatattgaataaggtagaagtgccttaattttagttgagaatgaacaatcctcaattaccaattttcaattctcaattaaatagatggaaacaagtgaaattctaaaaaaagttcgtcggattgaaataaagacgcgtggactgtctaacaatatctttgcaggccagtatcattcagcctttaaaggtaggggtatggctttttccgaggtgcgcgaatatcagtttggcgatgatatccgtgacattgactggaatgtgacagcgcgtttcaataaaccttttgtgaaggtgtttgaagaagaacgcgagttgacggtaatgttgatggtagatgtttccggcagtttggaatttggcactgtaaaacagctgaagaaggacatggtgacagaaattgcagccactcttgcattttctgctatccagaacaatgataaaatcggagttattttcttctcagacagaatagaaaagtttattcctcctaaaaaaggacgtaagcatattctatatatcattcgtgaattgattgattttaagcccgatagtcgtcggaccaacatacgtcttgctttggaatatttgacgaatgtaatgaaaagacgttgtaccgcttttattctgtctgactttatcgatcaggaaagttttaagaatgcaatgaccatagcgaataggaaacatgatgtagttgccattcaagtatatgacaggcgagttgccgagttgccggcagtaggtctgatgcggattaaagatgcggaaaccggacatgaacaatggatcgacacatcttcggctggagtacgtagggcacatcatgaatggtgggtgaataaacaaactgagttagatgaaacgtttaccaaaagtaatgtcgattctgtttcggtacgtactgatcaggattatgtcaaagcattactgaatttgtttgctaaacgaaattaacgggaaagatgaataaatatatattgctgatagtattgttatttctggtttctggcagaattgctgcacagtcagtgactgtggatgccaaaatagactctttgcaaattctgataggagaacaggcgaaagtgcaattacaagtagcgatggatgcgaagcagagggctgtttttccgtcatttacagatacattggtacgtggtgtggaaattgtggatattgctaaacctgatacacaatatttgaatgatcgccagagaatgctgattactcaagaatatacggtaacttcttttgattcggcattatattatattcctcctatgggagtaaagattgataataaagagtataaatcaaaggcgttggcattgaaggtatattcaatgcctgtagatacgttacatcctgatcaattttttggtcagaagactgtcatgaaagctccctttgcctgggaggattggtatggtttgattgcttgctcttttctggcattaccattgctaggattgcttatttatctgatcatccgtatccgtgataacaagcctattattcgtaaagtgaaagttgaacctaagttgcctccacatcaattggcgatgaaagagattgagcgaataaagactgagaaaatttggcaaaaaggacaatcgaaggagtattatactgaattgacagatgctcttcgtacatatattaaaaatagatttggctttaatgcattggagatgacttcatctgaaataatagataaactgctggaatttaatgataaagaagctatatcagatttgaaatatttattccagacagctgatttagtaaagtttgccaagcatgatccgcagatgaatgagaatgatgcgaatttgatcaatgcaattgactttataaatgaaacaaaacaattggaagaagagaatcagaagccgcaacctactgaaatcacgataatagagaaacgatctttacgtacgaagatattgctgatctgtggtatcgtattcctgtcggcagctcttattgcgactttcgtctatattgggttgcaactctataatctatttgggtaatagattttgacttttattgtttaaaataagaaatagtaaattataaatagaatggtttttgccaatattgaatatttgtttttgctgctgttgcttgtgccatatattgtatggtacataatgaagcggaaaaagactgagccgactcttcagatttctgatgcacgagtatatgcgcatgcccctaaaagttacaagaattatctgcttcatgtaccgtttggtctgcgtatcatcactctaatattgattattttggttttggcacgtccccaaacaacaaacagctggcagaacagcgaaattgaaggtattgatattatgttggctattgatgtgtcaaccagtatgttggcagaagatttgaaacccaacaggttggaagctgccaaagatgtggctgcggaattcatcaacggtcggccgaatgataacataggaattacactgtttgccggtgaaagttttactcagtgtcctttgacagtagatcatgctgtattacttaacttatttcaggggatacagtgcgatattattgaagatggaacagcagttggtatgggaattgccaatgcagtaaccaggttgaaagatagtaaagcaaaatcaaaagtgattattttgttgacggatggtaccaataataaaggagatatttctccattgaccgctgctgaaattgcgaagagttttggtatacgtgtttatactattggtgtgggaacaaatggtatggctccatatccggtacgggttggtggtacaacacagtatattaatactccggtagagattgatgagaagactcttactcaaatagcaggtactacggatgggaactattttcgtgctaccagtaattcgaagctgaaagaggtttatgaagagattgataaattggaaaaaacaaagctgaatgtgaaagagtacagtaaacgtcaggaagaatatcgttggtttgcgttagctgcattcttatgtatattgcttgaggtactgttacggaactcaatattgaagaagataccataaaattgataaaaagatgtttcgatttgaagaacctgcatatttatatttgttgctgctgctaccattgctggcagccttctacctttattctaattatagaaagaggaaggctattcgtaaattcggagatccggtgttgatggcacaattgatgcctgatgtatctaaatatcgtccggatataaaattctggttgttatttactgccataggtctatttgctgtactattggcccgtccgcaattcggctctaaattggagacagtaaagcgcaaaggggtggaggttatgattgcattggatatttcaaattctatgcttgcccaagatgttcagcccagtcgtttagaaaaagctaaacggcttatatctaaattggtagatggtatggagaatgacaaggtaggaatgattgtctttgcaggagatgcctttactcagttacctataacaagcgattatatttctgctaaaatgtttttggaatcaatcagtccttcgttgatatctaaacagggtacagctatcggtgctgctatcaatcttgctgcccgtagttttactccgcaagaaggagtgggacgtgctattgtggtgattaccgatggtgaaaatcatgaagggggagctgttgaagctgccaaagaggcggctaaaaagggaattcaggtgaatgtattgggagtaggcttacccgatggagctcccattccgattgagggcagtaacgactttcgtcgtgaccgtgaagggaatgtaattgtgactcgtctgaatgaggcaatgtgtcaagagatagcaaaggaaggaaatggtatttatgttcgtgtagataattctaattctgctcagaaagctattaatcaagagattaataaaatggctaaatcggatgttgaatctaaggtttatacagattacaatgaacagttccaagtgattgcatggatgatattgctcttgttattggtggaaatgttgattctggaccgcaaaaatccattgtttaagaacatcaggttgttttctaataagtagtaatgtatatgtcaagaaataaatatatattgtttgctctgttgctatcgctttctgcgggtgcgtttgcacaaaaagccgagcgtgattatatccgtaaaggcaatcgtctgtttaaagacagtgtttttgtggatgctgaagttaattaccgtaaagcattagaggcaaatcctaagtctactatttccatgtacaacttgggtaatacgttgtcgcagcagcaaaagttcaaagatgcgatggaacaatacgttgcggcaaccagtatagaaaaagataaagctaaactgggacaaatttatcataatatgggagtgttattccagtctggtaaagattatcaaaaagcggttgaagcttataagatgtctttgagaaataatccgaaagacgatgaaacccgctataatctggcattagctcaaaagttgctgaaggatcaacagcaaaatcagcagaatcaagatcagaatcaggatcagaataaagatgatcaaaataaagatcaacaacagcaacaacctcctaaatcagagaaaaatgataacgaaatgtctaaggagaatgcggaacagctgctcaattctgtgatgcaagatgaaaaaggggttcaggataaagtgaaaaagcaacagactcttcaaggaagacgtctggaaaaagactggtaataataaaataattgatgataaaaacttcagatgaaatgagaaaattgattttcttattgattgcactggtagccatgactacgcaagcgcaggctgacggaaaggtagtgtttactgcatctgcccccgatgctgtagtagtaggtgaccagttcaggttatcgtatacggtaaatacgataaaagtacgagattttcgtgtgccttctattaaaggatttgaggtgttaatgggacctaaccgttcacaacgtatgcaatcgattaatggggttactaataatagtattacctttacttatatcttaatggctacggctgaaggagagtattctattccgggtgcaacgattacggctgacgggaatcagatggtttctaattcggtaaaaattaaagttcttcctccggataaaaccgggaatacggcagatggcaaaggaactgcatcgtctggcaatcaaagtggaacgtcttcctctgtttctaaccaagacttacttataactgcgacggccaataaaacgaatgtatatgagcaggaagcctttctattaacttttaagatttacacaagagagtctcaacttcgctttgagaatgtgaagcttcctgattttaagggatttcattcacaagaaatagagatgcctgctaatgcaaaatggtcacaggaacattataagggaaagaactattttacgacagtgtatcgtcaatttgtattgttcccacagcagtctggaaaactgactattgagcctgcacgttttgatgctaccattgctaaagctgtacaatctgatgatccgtttgatgctttctttaatggtggaagcaattatgtgaatgtaagtaaggtgattgtaactcctaagattacggttaatgtgaatccgttaccgacaggtaaacctgccaatttctccggaggagtaggggagtttagtatcacttcttccattaattctaaagaagtgaaaacgaatgatgctatcacaataaagttagtgatttcgggaaccggtaatttaaaattaattgcaaatccggaaataaaattcccggaagattttgatgtatatgatccaaaggtggatagcaaagttcgtttgactcaagaaggactttccggtaataaagttattgaatatcttgctattccgagacatgcaggagtttataaaataccaggagtatccttcagttattttgatatcaagtcgaaatcctataaaacactgaataccgaagattatgagattaaggtggaaaaaggagcaggaaatgcagatcaggttattgccaactttactaataaagaagatctgaaagtattgggtgaagatattcgctatataaaactaaatgatgtgaagcttcagccaaaagataatcttttgtttggctctttactttattggctattctacattgttcccgccgtggtgtttattgtcttctttatagtttatcgcaaacaggctgccgagaatgccaatgtagccaagatgcgtacaaagaaagccaataaagtggctactaaacgaatgaagttagctggtaaattgcttgcggagaatagcaaggaggcattttatgatgaagtacttaaagctctatggggatatatcagtgataaacttaatattccggtttctcgtttgtctaaagataatgtagaagagaaacttagaaattatggagtcagtgacgaattaataaaggattttctgaatactctgaatgaatgtgagtttgcacgttttgctccaggagatgagagtcaggctatggataaagtttattcatcgtcattggaagttatgagtaagatggaaaattcaataaaacgctaatttagagaagaataagtcatgaaaaaaatattgtttattgctttgggtttgttaatggcagtaacttctttcgggcaggattcgttaataacagattctactcagatgatacagggagatactgtcagtatccataatgcagagttttccggttccaaattagaagatgccacaaaagctgagggagatagtgcatatatcagaaatgactttgcgtctgcaatccagatttatgaatcacttttgcgtaaaggcgagtcggccgatgtatactataatcttggtaatagctattataaaataaatgagatagcaaaagccattttaaactatgaaaaggccttgttgcttcagcccggtaacggagatattcgtgccaatttggagatagctcgtggtaagactgtagataaagtagaagttgttcctgagatattctttgttacatggacaaaggcattaattaatagtatgagcgtggattcatgggccatatgggggattgtgagtttcttactgctaattgtctctctatatttctttattttctcgaaacaagtggtgttgaagaaagttggttttattgcaggcattatctttttgatagttgttgtaatggcaaatgtttttgcttctaagcagaaagaagagttgttgaacagggatactgcgataataatgagtccgagcgtaacggttagaagtacacctagcgaaaatggtaccagcctatttattcttcatgaagggcacaaggttaacattaaagatgattcaatgaaagactggaaagaaatccgccttgaagatggaaaagtgggatgggtgccggttggttcaattgaaattatttaagaatagaatctataaatatttcatcaaagtccgtcctcaataatctaagatttattggaggcggactttattgtattataacaagttatcgttgatttagattgttttagcgaaaaaagagaaacttttgttttgttttatctttttttttccttaagtttatagcgtgataataaagtcacatagtattaaccattaaatttatgagacatgagaacaataacatttaatgaactccgtaaaattaaagattcattgcctagcggtagcatgcatagaatagcagacgaactcaatttaaacgtcgatacagtgagaaacttctttggtggtcataattttaaggaagggaaaagtgtcggaatacatcttgagcctggtccggatggtggattggttatgattgatgataccactgtgctcgatcgggcattaagaatattggatgaattaaatatgagtaaagaagaagctaccgaatctgtgcaggtttaaataagagataaagtcagaatcccaattggcaaaacaattgggatttcttatttgttgaattcaataaataaacgaattatggaagagaaattagtaactttagctattctgacttatacaaaagctcagatattgaagaatgttcttgagaatgagggtatagagacgtacattcacaatgtaaaccagatacagccggttgtttcatccggtgtgcgtttacgtattaaagaaagtgatttgccgcgtgcattgaagattaccgagagttctgcctggcttgctgaaagtatagtaggagagaagacccctaaagtggagcatcgcactaagaaggtccttattccggttgatttctctaactattcaatgaaagcttgtgaatttggtttcaattttgccaaatcttttgatgcggaggttatcttgctacatgtctactttacaccaatttatgcttcatcattgccatatggagatgtatttaactatcagattagtgatgaagagactgtgaagaatgtattgcataaagtacatgatgatctgaatactctgtcggagaagattaagcaaaaagtagcatccggagagtttcctgatgtcaaatatacgtgtgtcttgcgcgaaggtatcccggaagaagaaatactcagatataataaagaacatcgtcccagaatcattataatgggtactcgaggtaagaatcagaaggatattgatcttattggtagtgtaactgccgagataattgaacgtagtcatactacagtgctggctattcccgaaaatactcctttcaatcgtttcaatgaagtgaaacggattgcctttatgacgaactttgaccaacgtgatttgattgctttcgattcattcatcaatggacttagcccatttcatttttctgtttctcttattcatttatcggatgtaaaagatacatggaatgaaataaaattagctggtattaaggattatttccaaaagcaatatccggatcttgagattcattatgatgtggtgatgagtaatgattttctgaatagtttggataattacattaaaacaaatcagattgacattatcacattaacttcttataaacggaatatattttcccgtttgttcaatcccggtattgctcgtaagatgatcttccattcagatacaccgttgttagttattaacggatgatcagacacctaaaaaaataagctttaaattaatggaataatcaacattatgtttaataagaaagaagcaatttactatatataagtaaattgcctcttttatttaatccctatttccatcttgctaattttgccttctttagctcttaaaaaaataagaacctgcatcctgacaggttttagtcatttcattcaccatgaaacgaataagaaatagatttcacctatttctctttttgtgttacgctattgttcaggatcagatcaagcaaaaaaaagaggctgcccaatttctcgaatcaggcaacccctttcacaaaaatctttgcgaaaaaagatctatttgatcattacatcattttctcgatttcttcgaattccggtcccatattcaagttgtaatatacccggtaaagaccttgtaaccacaaatctttctgatcaggtttcagctctcttgctttttcgtaatacggtttagcagcttcgtagaatttcttgatctcagtttgtgctgttgcataattcgggtcattgatatctgccggtgctttgtcagcatattcttgtgcttgtaacaggtataccaaacctaaatttgagcatgcttctgcatatgcaggatctatgtcgagagtctttttatagaactcaattgctttctcataatctttcatattatgatacagatatgccttcacatacagatataatttgttattcggatctttagccaacatatcatcagcaaactgcattgctttgtcattttggttagagctgctatagtagtcaaccagatttgcgaagaaatattgattttcagggaacttaacaataccttcctgcaatttttctacccatttagcagtatcacctttagctttgtaagcatctgtcaacaattgcattgcaaattggccattttctttgtctttcagagcatattgagcatatttcatgacagcatctttgtcacctactctatctgcagccaaagtggcataatatgctacctgtggcaaaatggtgtctttttccagcaagttttctttctccatcataggcagtgtagctgcatctacataagctgcaaaatattttaatgcgtcttcgttcttatttaaattgaagtattgaataccaccgttaatcaagttaggacgttctgccagaattgtttttgagttggcgcttctgtatttgtttttaattttacccttttcattaggaatctgtgccagttcgtcacatttaacgtaataattgtacatattcagtacgctattgtataccttcaatgtatcataaggttttctcagataagcattttccatctccttttcgttgattcttttctgaatataacctgctacgtcccaagttgccgcattatcctttgtttcagggttagttaatgcttcgttaatcagttgttcagcttttgcgaagtcaggttttacttctccggcaatgcttttcgcttcttttacatttttctcctgagcgaatgcaaaacttactgccatcagtaaaaccattgaaaataatactcttttcatgattgttgtttgattaattattaatattatgtctattcttctgtttcatttaccagtgtattcgtttccggatcgcttggaatatttccttctctttcttcttccggaacttcatcttccaggctttcggatgtaactttacatacagaaccgatctggtcgttacgtttttcaagattgatcagacggactccttgagttgcacggcccatgatgcggacatcagctactttcagacgaattgtaatacccgatttattaatgatcatcaggtcgttttcgtctgttacagacttgattgtaaccagtttacctgttttttcggtaatattcatggtcttcacacctttgccgccacggtttgttttacgataatcttcaatatcagaacgtttaccatagccttgttcggagacaaccattacggactctgtctcgagatccttaatgcaaatcatgcctattacttcatcctgtccatcgtcatccagtgtgataccacgaactccggtagctgtacggcccattacgcgaactgctgcttcatggaaacgtattgcgcgtccgttacggttggctatgatgatttcgttgtttccgttggtcatacgcacttctattactcggtcgtcttcacgtatagtaattgcattgacaccattctggcgcgggcgtgagtattgttccaaagatgtcttctttataacgccattcttggtacagaacagtacataatgactgttaatatattcctggtcattcaaactcttcacacgcaaatatgcattaacagcatcgtccgagtcaatgttcagcaagttctggatagcacggcccttagagttctttgttccttcaggtatttcatataccttcagccagtaacatttacccttttgagtaaagaacatcatcgtgttgtgcattgttgccgggtagatgtgctcaacaaagtcttcatcacgggtttcagtacccttcgagcctactccaccgcggttttgagcacggaattctgtcaatggtgtacgtttgatatatcccatgtgtgagatggtgataatcatctgatcatccgcataaaagtcttccggattgaattcttctgatgaataaacgatttcagaacggcgttcgtcaccatatttagctcttacttccagcaattcgtctttgattactttacggcatacttcatcatcggccaggatactttccaaatatgctatctgcttcataacctcctcgtattcagcatggagctgatcttgcatcagacctgttaattggcgcaggcgcatttcaacgatggcgcgtgcctgaatttcgctcaggttgaagcgttccatcagtccggagattgcatcgtttggtgttttggcggcgcggatgatacgaattacttcatcaatattatccgaagcgataatcagaccttccaagatgtgtgcacgttctttggccttacgcaggtcaaattgagtacgacgaattaccacatcgtgtctatgttctacgaagtaaacaatcaagtcgcgtaaattcagcattttagggcgtccgttgaccagtgcaacgttatttacaccgaatgacgtctgcaaggctgtcattttatagagcttgttcagcactacacttgcatttgcatcccgtttgatatcaataacgatgcgcataccttcacggtcggactcgtcgttggcatttgatatgccttctattcttttttcattgacaagatcagcaattgctttaatcaattctgccttattcacgttgtagggaatctctgtaacgacgatcttatcatgtgtttgtccggattcgatttctgctttcgcgcgcataaccacgcgtccgcgtcccgtaagataggcttcacgtacgccgcttatgccatatatatatcctcctgtagggaagtcgggcgcttttacatattccatcagttcctctacggtcacatctttattgtcaagatatgcttcgcaggcatcgatgacttcagacagattatggggcggcatgttggttgccatacctacagcaataccggaagcaccgttaaccagcaaattcggaatacgtgtcggcatcactttgggttccatcagcgtattatcgaagttaggttcgaaatctacagtctctttgtagaggtcctgcatcatttcttcacctaatttgttcagacgtgcttcagtgtaacgcatggcagcaggactgtcgccgtctacagaaccgaagttaccttgcccgtctaccagcggatagcgcattgcccattcctgagccatacgtaccatcgcaaaatatacagaagagtctccgtgcgggtgatacttaccaagtacttcacctacgattctggctgatttcttatagggtttgtctgacgtatttcccagttccatcattccgtagagaattctgcggtgaacgggcttaaatccatctctaacatcgggaagggcacgtgaaacgatgaccgacatggagtagtcaatgtacgatgacttcatttcctcctcgatgttaatctttataattctgtcttgttcaagcatttaaaaagattattaattatacatttgcggtttatcaaaaaccacgctaaagtactacttttccttgatatacgaaaactttaacgaagaaagttttttgctttttgtaagagtgccctacccttattctttaggtctgtgacacccgggtctcgtaccctccgacacccgggtgtcaggcatcacgacatccgggtgtcggaggtgcttttatcagtatctaatgtttttttctatacttaattgttttattatattataatgtataagaacaaaggaaataatggcacgacatttgttatataataaataaagcaaatgaagcgcatgcaaacaatatgaaatgcgtatatttgccagtgaataacctcttagaagaaggaagataagtatgaataatcaattctcacaaaaagtttccgatattatcgtatatagcaaagaagaggcaaatcgcctgaaaagtagctatatagggcctgagcatttgttgcttggtatgcttcgcgatggtgagggaaaagcaatcgagatattgtctaaactcaaaacaaacctgaccgacataaagaagcagattgaggccatactgaaagagcatgcagacgacatgctgttgcctgatgccgatgttccattgtcaaatggagctgcaaagatattgaaactatgtattttagaagcacgagtgatgaaaagtcaagttgcagatacggaacatgtactgctggccatccttaaagataaggataatctggcagcaacggttcttgaagcgaatcatgtgaattaccagcaggtattcgaacaattgtccttacagccggatatcagtgccggcatgggatttacagaagatgatgatgacgaagaagagatgaatcagtcccgttcgtcccatggatccggtgaacgtcagcaacaggcgcagactgcctccaggaagccgactaatgatactccggtgcttgataattttggtactgatatgactaaggccgccgaggaaggccgtcttgaccctgtggtgggacgtgagcgggaaatcgagcgcctggcacagatattaagtcgccgtaagaagaataaccccattttgatcggtgaaccgggagtcggaaaatcggccatagtggaaggtctggcacttcgtattatacagaaaaaggtgtcccgtattctgtttgacaagcgtgtggttgcactcgatatgactgcggttgttgccggtaccaagtaccgcggacagtttgaggaacgcattcgttccatcttgaacgaattgcagaagaatccgaatgtgattctgttcattgacgagatacataccattgtaggtgccggatcggcagccggatcgatggatgctgccaacatgttgaagccggcattggcgcgtggagagattcagtgtatcggtgccactacccttgacgaatatcggaagaatatcgaaaaagacggggcgttggagcgtcgtttccagaaggtaatggtagagcctactacagctgacgaaacgttgcagattcttcgtaatattaaggataaatatgaagatcatcacaacgtaaattatacggatgcggcattggaagcttgtgtcaagttgacagaccgttatataaccgaccgtaacttcccggataaagcaattgatgcactcgatgaagccggttcgcgtgtacatcttaccaatgtgagtgtacccaaggaaatagaagatcaggagaagttgatcgaagaagctaaaaataacaagaacgaggctgtcaaatcacagaatttcgaacttgctgccagttttcgcgataaggaaaaagaacttgctgtccagttggatgtgatgaagaaagactgggaggaacgtttgaaggataatcgtgagacggtggatgaggaagaaatcgcaaatgtcgtatcaatgatgtccggcattccggtacagcgtatggcacaggcggaaggcatcaagttggcaggcatgaaagaagacctgcaatcaaaggtgatagctcaggacgatgctatcaaaaagctggtcaaggccattctgcgcagccgtgtcggactgaaagatccgaataaaccgattggtacatttatgttcctaggccctaccggcgttggtaaaactcatttggccaaggaattggctaaatatatgtttggttcttcggatgcattgatccgtatcgatatgagtgagtttatggagaaattcacagtctcacgcttggttggagcgcctccgggatacgtaggatacgaggaaggcggacaattgacagagaaagtacgccgtaaaccctattctatcgtattgcttgacgaaatagaaaaggcgcatcccgatgtgttcaatctgcttctccaggtgatggacgaaggtcggctgactgacagttatggcagaatggttgacttcaagaatactgttattatcatgacatcgaatatcggaacccgccagttgaaagagtttgggcgtggagtcggttttgccactcaaagccgtcttgacgataaagaattctctcgcagcgtgattcagaaggctctgaataaatcgtttgcacccgaatttataaatcgtgttgacgaaatcatcacctttgaccagttgtcattagaagctataacgaagattatcgatattgagttgaaaggactgtataacagaatcgaatctatcggctataaactggtcattgaagacaaggctaaacagtttgtcgcttcaaaaggctatgatgtccagtacggtgcacgtccgctgaagcgtgccatccagacctatctggaagacggcttatcggaacttatcatttcggctgatctgaatgaaggagatacgatcactgtctctttgaatgaagaaaagggtgagttggaaatgaagaatgaagccaaaacggctgaataatccgactgtttctttcaaacatacgtcaaaatgtcagaccagcatggtctggcattttttttgtctctattcaggcaataaagaaattcaattattaataaccaagatcatttaaaaaatatacgttattatgcaaaaaggtaatattggggttacaacagagaacattttccctatcatcaaaaagtttttgtacagtgaccatgaaatcttcctgcgggaattagtatccaatgccgttgatgccactcagaagttgaatacattggcttctatcagtgaatttaagggcgaactgggtgatttgaccgttcacgtttcattaggcaaagacaccattaccatctccgatcgtggtatcggtttgactgctgaagagattgataaatatatcaaccagattgccttttcgggagctaacgatttccttgaaaaatataaaaacgatgcgaatgccatcattggacacttcggacttgggttctactctgcattcatggtttccaagaaggttgaaattatcaccaaatcatataaagaaggtgcacaggccgtaaaatggacttgcgacggtagtccggagtttacacttgaagaggtggagaaagcggatcgtggtacagatatcgtattgtatattgatgatgattgcaaggagtttctcgaggagtcacgcatctctgccctcctgaagaaatattgcagcttcctgcccgttcccatcgcttttggtaaaaagaaagagtggaaagacggcaaacaagtagagacggcggaagataatgtcatcaatgacaccattcctttgtggacaaagaaaccgagtgaattgtcggacgaagattataaaaaattctatcgtgagctttatccgatgtcagacgaacctttgttctggattcatttgaatgtagactatccgttccatctgaccggtatcctctacttcccgaaggtaaagagcaatattgatttgaataagaataagattcagttgtattgtaatcaggtttatgttacggattctgtagaaggtattgttccggatttccttactctgctccatggtgtgctcgattcaccggatattcctttgaatgtatcccgttcttacctgcaaagtgattcgaacgtgaagaagatctctacctatatttcgaaaaaggtatcagaccgtctgcaatctatctttaagaatgatcgcgctcagttcgaagagaagtggaatgatttaaaaatctttattaattatggaatgctcactcaagaggatttctatgataaagcacaaaaattcgcccttttcaccgatacggatggcaaatattacacctttgaggagtaccagactttgattaaagataatcagacagataaagataaaaacctgatctatctgtatgccaataataaggacgaacagtttgcctatatcgaagctgctaaaaataaaggttacaatgtgctgttgatggatgggcaactggatgtggccatggtaagtatgctcgaacagaaactggagaaatctcgcttcacccgtgtagacagtgatgttgtcgacaacctgattgtgaaagaagataagaagagcgatgtgcttgaggcttcaaaacaagaagctctgtcagcagccttcaagagtcagttgccgaaaatggaaaaggttgaatttaatgtcatgactcaggctttaggcgaaaacggctctcccgtgatgataacccagagcgaatatatgcgccgtatgaaggaaatggccaatatccaggctggcatgagtttctatggtgaaatgcccgatatgtttaatctggtattgaattcagaccataaattagtgaaagaagtattggctgatgaagaaaaagagtgcagtgctgccattgctcctatacagacggaactggaagatgtgacaaaacgtcgtgatgcactcaagaaaaagcaagaaggcaagaaagacgaagatatccctactgcggagaaagatgaactcaatgatctggataagaaatgggatgagttgaagcagcagaaagattctatttttgccggatatgcaggcaaaaacaaagtggtacgtcagttgatcgatctggcgttgttgcaaaacaatatgctgaaaggtgaagcattaaataactttgtaaaaagaagcattgaactgatttaagcagccgctttttaatttcataatatcattcaaagagcattacgtgcatgaaaatgtatcgtaatgctcttttttcattagaaatgtatgtcagctgtcggtaaattggaaactattgtatatatttgaacgatgatttaaccctctatatagtgttttgctggaccttatgaagaaaaatcttttattgttatttctttttttactgtttttgccaatgcttgtccaggcacagaaagtcggattggtattgagtggcggcggtgctaaaggactgacgcatattggaattattcgtgctctagaagagaataatatcccgatagattatataaccggtacttctatgggagccattgtgggctctctttatgccatggggtattcgcctgacgacatggaaaccttactgaaatcagaagatttcaagcgatggtattccggtgaggtggaagaaaaatacatgtactattttaagaagaatcttcccacgccggagtttttcaatatacgcttttcctttaaggactcgttgagcctgaagccgcagtttctgccgaccagtgttgttaatcctatccagatgaaccttgtctttatcgatctgtatgcgcgcgctacggctgcatgtgacggtgactttgataaactttttgtaccatttcgttgtatcgcatcggatgtgtataacaagaagcagctgattctgaagcgtggtgatctgggtgacgccgtacgggcttctatgagttttccctttatgttcaagcctatcgagatagacagcatgttggcttacgacggtggaatctataataattttccaaccgacgtgatgcgtgaggattttcatccggacatcattatcggtagcgttgtatctactaatccgggaaagccgaaagagaatgatctgatgagccagatagaaaatatggttatgcagaagacagactactctcttcctgattctgccggtattttgatgactttcaaatataatgatgtaagtctgatggacttccaacgcatcgatgagctcgagaaaataggatatgaccgtacaatgagcctgatggactccatcaaaagccgtattcaccgtagggttaatgtggataatatccgtttaaggcggttggtgtataaaagcaattatcctgaactcagatttaaaaacatctatatcgacggagctaatactcaccaacaggtgtacataaagaaagagtttcatacctcggacgataaagaatttacgtatgaggatctgaaacggggatatttccgtttactttcggataacatgatttcggagattattccccatgccgttttcaatccggaagatgatacgtacgatttgcatctgaaaataaagatggagaatgaattttcggttcgtgtgggaggtaatgtgtctacgaccagctccaatcagatttatctgggacttgcataccagaacctgaactattattcgaaagagtttacgcttgacggacagttgggcaaaatatataataatgctcagttcatggccaaagtcgattttgccactactatcccgacatcctatcgttttatcgcttccatcagtactttcgattattttaaaaaagataagcttttctctaaaaacgataaaccggcttttaatcagaaggatgaacgattcctgaaattgaaggtcgctcttcctttcttatccagcaaaagattggaattgggctttggaattgcgcagatagaggatcgatactttcagaacaatgtgattgattttgataaggacaaatatgataagagcggatatcgcctgtttggtggttccgttagttttaatggcagtacactgaactccaggcaattcccgattcaaggtgcaagagaggccttggttgctcagatatttacgggaaatgaaagttttcgtccgggggttaattcggagaataaaaagcccgtaaaagaaaagcattcgtggttacagttgtcatatatgaaggagaaatatcataagatgggtgctaattggatattgggatggtatctggacgcagtttatgcctctaagaacttctcagagaactatacggccactatgatgcaggctagtgagtttgcccccactgcacatagtaaattgacgtataacgaagctttccgtgccaatcaatatgttgctgccggaatacgtcccatttatcgtttaaaccagatgtttcatgtccgtggagaattttatggttttttgcctattttcccaattgaacggaactccattaataaggcttattatggaaaagcattttcccgattcgaatatttaggagaaatttcagtggtttgtcaattaccatttggagctatctctgcatatgtaaatcattatagctcaccaagaagggagtggaatgtagggctgacactcggctggcaactgtttaattaccggttcatcgaataatttatttgcaaaaaaagttccccaaaagcttgcaaattcaagaaaaggccgtatctttgcacccgttaaacaaaaacaatggtcgcgtagctcaactgaatagagtagctgactacggatcagccggttacaggtttgaatcctgtcgcgatcactttaaggtttaacaaatggccgcgtagctcaactgaatagagtagctgactacggatcagccggttacaggtttgaatcctgtcgcggtcactctaagaaaataacgataaacggtcgcgtagctcaactgaatagagtagctgactacggatcagccggttacaggtttgaatcctgtcgcgatcacaagaacctccataatcaaattatggaggttttttgttttccttgcattatctcttttattggatcatacctaaattctgagggattcctctttttaattggcagtctgtactgagtccggtactaaaacaagcctaaaacctccatattcatcacgatagtttggcacgtcatagtcaatatatgacactcggcagccttttgcagtaccaccccaactaccacctcgcaagacccggcggaaaaaggcagatgtaccattaaatggccatccgggatggacagatttaccgttttgagagtattcttgagtgtaccaattgtcacaccattcccatacattgccactcatgtcgtacaatcctaattcattaggctttttcatacctaccggatgtgtagttcctttgtctccatatttacttttttgataattttcaatataccaggcaacttcatcgatatcattacttccgctgtatttgtatttttcactatacttgccaccgcgtgcggcatattcccattcaatatcggtaggcaggcgaaatgttttgtttgtaagggtgttcaatttgcttataaacttttgcgtgtcattccaactgatatactctgccggacaatcttcacatcctgaattgtatgattgatcgaaatcagtccccataactgctttccacagtttctgggtaacttcatacttcccgatataaaagaacggtagagtttcctcatgcgttggtttttcattgttttcgcaatcattaccttgctcacttgtgcctcccataataaaggttccgccttctaccggaatcatttcaaagctttctccatttacagtaaaagaaagagcaggcagtcgtttctggtcggatttgtgttgaatgcaaccggtagtaccacctaaaacaagaataaaaactaagatggtaaatatattctttttagataaatggagtttaatatttaggagtgttttcatttatttgaatattaaattattagtaacctgttaaatgtatgaaatttaattaatgtagtgaccttataaggtgtatgatataactttgtttaacgtttaggaattttataatggtggtgtttccactctataccgacagtagcaaaggaaaagcgcagaagaatgaaactgtaacagctttatctcgttgaaaaacaataaaaaagtattgttggctattcgttgcaaacggtactttccttatatttgcaatacagaatatcaaggatatatggcagagaagatttaagaataggctatgaatatagaagaatttagagaatattgcctttcatttaaaggtgtgcatgaccggatgccctttaaaaaagcaacatctgaatatgacagagatttactcgtcttttatgtaatggataaatggttctgttttgtgaatatagacgcattcgatttctgtaatataaaatgtaatgccggacagatagaggatttgctagacaaatatgaaggagtacaaccgggctatcacatgaataaaaaacattggattagtgtctattttgataaagacgttccggataaaatgattaaggatctggtaaagcaatcgtatgaaattgttgtatcttccttggcgagacgagagagggaaatattacaagctatgtaaatgacaccattacttatagatatggagtactttggtgtcaaaatctatttttcatcgggcattcatatactgaacgaaaaaaataaatatactgcatgaaacagcttattgatttagaaaattggaatagaaaagaacattttaaattcttttctgcttttgacgacccattctttgggatcactactttggtcgactttacgaatacctaccatcaaagtaaggatgagaaaaagtctttctttttgtactctgtacattttctgctgcaatgtgtaaatgaagtagaggcttttaaattacgcattgaaggcgaacaagtagtgaaatatgattttatccatttatcacctaccataggacgtgaagatggaacattcggtttcggtttttttgaatacgatgcagaccttgaagtatttatacaaaatgctgaaaaagaaatagaaagagtgaaaaacagtactggcctgtctttttccgaaaatataggccggttagatcttatccgctattcggctttgccttggttcgcattttcagagatgaaacatgctgtttcttttggcagaggtgattctgtaccgcgcatttccactggaaaattaataaaagagaatggtgcatacctgcttccaatttcaatttccggtcatcacgctcttatggatgggcgtaatgtggcagaacttatcgagaagttagaaacaacaaagaaataaatatcatataaatatactaaatgggacgcttcagctgaattaggaaaaataaaggagaatgtgtcaaaattctgtggtaagttatgacgcactctcctttattccgtaagttgatgaaaaaattattgatacctcgggattactttggtcgttaacattttatattcagttcattgagtactttacgaatcgcttcaaatgtggtgatgcgtgtcggtactagtggtaaacggagtttattctcgatcattcccatagcgttcaacatggattttactccggctgggtttccgtctacaaataagaggttaaacagttccgtaaatttatggtgtatggtcagtgcattggcaaagtcgccctgcagcgccaaacgggtcattctgctgaattcacgtggaaaggcgtttccaataacagaaatgactcctacggctcccaatgtaatcagcgggaaagtaataccgtcatctccggaaataacgtcaaagttagccggtttgtttttaatgatatcatccatctgggtgatattaccagaagcctctttaatggctataacattctgaaagtccttagcaatgcgcaaagtggtctctgcggtcatattaactcctgtacgtcccggaacattatataatacgatgggaagctctgtagcgcttgcaattgctttatagtgctgataaattccttcttgtgagggtttattgtagtaagggacaacggataagatagcatctactccggtgaaatcgtcgtttttgagtgtctctacaactgcgcgtgtattgttacttccgactcccagcaggatggggattcttccgttgacacggtcgattaccatctttttgattttctttttttcttcttcactcaaggtcggagtttcggctgtagttcccagcacacacagaaaatctgcattattttgcagcagatagtctaccagtcgcattaacgcatcgtaatcaacgctttcatcctctttgaaaggagtaatcagcgctacccccattcctttcaatctagtctgtatcatgagtattaataataatctctaaatattttgctcgcaaaagtacgaatattttctttttttacagcaataataatatataaaataagattattgcagaaaaatgttacgatataagctttaaaaattcctcttcgttcataattttaattcccagtttacttgctttttctaatttcgcaggtcccatattgtctccggccagaataaaactggttttagaagagatgcttcccacgttcttgccaccgtgtttttcgataagatccttgtattcatctcttgaatggtgggtgaatactccactgatgacaatggattgtccggccaatttatcggtatgtccgctcaagtcttcttcaggtctgtatagttgcaatcctgctgtttttaatcggcctaccaatttacgatttgattcattcgcaaagtagttaaggatactccgagctattttttcaccgatttcatcgatattgatcagagtttccagatctgcattttccaactcttctatgtctttaaaagatttggctatttttttagctaccgtttcgcctacaaaacgaatacctaatgcaaaaattactctttcaaaaggtacctctttgctctgcatgattcctttaatgatgttttccgcagatttgtctcccatacggtccaagcctctgatgtcatctgtcgtcagttgatagaggtcggccgtgtcacgaatcagtcctaaacggtagaacatgtcgacggtttcaggtcctaatccgtctatattcattgctttccggctgatgaagtgctctatttttcctttgatttgtggtggacaggcggtctcattcggacaataatgggcggcttctccttcgtatcttatcagcttactgccacattccggacagtgagtgatgaattttaccttttcaccgatcatgaagcggaccgacgtatccacaccggttattttggggatgatttctcctcccttttctacgtagaccatatcgcctatatgcaaatcgagtccttcaatgatatccgcattatgcaatgatgcgcgtttcactactgtgcccgaaagttgtaccgggtcgagattggctaccggtgttacggcgccggttctccctacctgataggttaccatgttcaagcgggtcagtgcacgttcagcctgaaatttataggcaatggcccagcggggagacttggctgtgaacccaagattcctttgctgcttgaggctgtttactttcagtacgattccgtctgtagcaacgttcaggtttttgcgctctacgtcccaatagttgataaagtcgaagacttcttgtagtgtctggcacttacgcattaacggggaaatcttaaatccccatttggctgcttcctgcagattttcataatgtccgtcagtcggcagattatcgccaagcagataatagagataggcatccagcttacgggaagccacgatggcggaattttgtaatttcaatgttcccgatgcggcatttctcggatttgcaaagagaggttcttcgcgggcctctttttcccggtttaattcttcgaaaacttcccatggcatcaagatttctccacgaatttcgaaaacttccggataattatctccatgtaggacgagaggaatactccgaatggtctttacgttgtctgttacatcgtcccctttttcaccgtcaccgcgggttaccgcgcggatcagtttaccattttcgtaagttaaagagatagaggtaccatcatacttcatctcgcaacaaatctcaaaatcttcattcaaagctttacgcactctgtcatagaagtcggttacttcattctccgaatatgtattcgacaatgaaagcatcggatatttgtgcgctacttgggtaaaattcttattgatatcgctacctacacgcatagtaggcgagttttcgtctttatattccggatgttcctgttccaggtcctgaagttccctcattaaatcgtcgaattctttatctgagatttccggggcattcagcacataataattgtaattatgctgatggagttggagacggagttgctctattttttcttttacagtcatatattcttaggattgttttaggcaaaaatacgggtttctcttcaaatatttgtacttttgcgaaaaattaaagattatgcgtatcgatattataacggttttgcccgaaatgattgagggctttttcaattgttctattatgaaacgggcccaggacaaaggactcgctgaaattcatattcacaatttacgtgattataccgaagataagtatcgccgggtggatgactatccatttggaggttttgccggtatggtgatgaagatagaacctattgaacggtgtattaatgccctgaaagcagagcgtgattatgatgaagtgatatttaccacacctgatggagagcagtttgatcagaagatggctaatagtttgtctttatccggtaatcttatcattttatgcgggcattttaaaggtatcgattatcgcatccgggagcatttgatcacaaaagaaatcagtattggagattatgttttgaccggtggtgaattggctgccgccgttatggcggatgctatcgttcgaattattccgggtgtgatttctgatgaacagtccgccctttctgattctttccaggataatttgttggcggcacctgtttatactcgtccggcagaatataaggggtggaaagtacccgagattctgctttcagggcacgaagcgaagattaaggaatgggaacttcaacagtcgttggaacgtactaggagactgcgtccggatctgttggaagattaacttatgttgtatataaaaaagaatgcctttctaatggagaaaggcattctttttttatgaaatatattattaataaaaggaatagtctttgagcaaactcatactttccgatccggggtgcttcgattgatttcgtgagcagactgagataagcgtatccgcatttggatagcattttaaagtcaaactgcagcgaaggggtatgatgtgtttttgactatacctcaagtgcacctataatttcagaaacagacttgcatccgtgtctttccaggtaatcgtttataccatctataactttgatggtgatagccggatctatgaaatttgccgtaccaatctgtatggctgaagcacctgcaagcatgaactcgacagcatctttccaattcatgataccgcctagtcctatgaccggaatatttactgctttagcaacttgccacaccattcttagtgcgatgggttttactgctgcaccggacatgccgcctgtcactgttgaaaggatggggcgtttgcgctcagcatcgatggccattcccagcaatgtattgattaatgatacactatcggcgccgttggcctcggctgcccgtgccatttctgctatatctgtaacgttgggagatagcttgacgataagtgtctttttgtaagcagaacgcactgcttgtacaacttctgatactcctttagttgtcaccccaaatgccatacctccttgttttacattaggacaagagatgtttaattcgatagcaggaattttgtcaagttcattaatgatctctgcagtctttacatagtcttcaatggctgatccggaaacattcacaatcatgtgggtctgaatgtctttgatacggggataaatgtgatttgagaaatattctacacccttattttgcagtcctacagcgtttaacataccggaaggggtctctgccatgcggggatacggattaccttcacgtttgtgaagagtagtaccctttacaatgataccgcctattcgcgttatatcaataaaatccgcaaattcctcaccatatccaaatgtacccgaagctgtcattaccgggttcttcatttgtagtttaccaatgtttacacttaaatctgccataatagtttatttatattgaaaacaggaccttctttacaaacgcacaaatgcccctctgtggtgttttcaacgcaacagaggcaggctcctatgccacatgccattgtattttccaatgatacttcgcaattgatatcgttacctttggcatatttggctactgccatcatcatgggtttcgggccacatgtataaatctgctcgaattttattttattcagtatggaatgttgggtcacatatcccttttctccatggctgccgtcttcggttgtagtatagacctctccgtaagcggcaaaatcttctaattggagcagatctttgttgctgcgtgcccccaaaagaaatgttggtttactgccgtttttagcaagttgttcacccaagtagagcataggggcagtccctacacctccgcccactaataatagcttatcagaaggcttttcgggcattgtgaagctatttccgagtgggagtactacattgataatctctcctcgatttacttgcgcaagacgttttgttccatcacctacaagttggatcagaaaccatacttcgttgcgttgtctgtctacataattaatagaaatggggcgacgcaggaaagtggtgggtgaaccatctatccgaatttccgcaaactgtcccggtagcatttccgggaggacggtctgagaggtcaatttcagcagcacatagttggtatgcaatctgagattctcagttactgtcaggtctaaaataaattttttcatgtattgttgaaagtaaattcgtattcgtcctgcaaagatacgggaaattgtgcaaacagtgatttatctgtcttatttttctcctctgaatgtctcatacgtattatcatcgaagaaaattcttatttcagttatttttctggaaggcttttctatgtatctaatttcttgttttacaatctctttcggggtgttttgggaactttctaacggcatttccctgcgattttccggagtaactgtcccgttgggcggaattatggcattctcagcaaataaggaaggttgaaaatcagaagctgattggatgctttcttcggatatattgccttgcccatacaacagccattccaattttacatagttatatttctgatgtactttcataataacatccaaactggggttgttccgcccattcaaaatatgagagagagtggattgctgaatacctatgctttcggcgaaagcaccggaagccatattctctttttccatgataattttaatcctatcttttatttccatatcctttgaagatttacaaatgtatgacttattagttgattcacaaaagtaaagcgtttatttagcttcgcacaaaagtaaaaaataaaaatcacaaaagcaaattacaaatacaatattaatattttagatttgtaaagagagtgtgatatattgctcttaatattttgggtatcgatgtgtatgattgtaatattcattgaatttttagtttatataaaacttatatatgtctgaaaaacaatcacttttatgcgttactatatgctttgatgctctttatatcacaaatgtttctgtatcttggactattacctgaatattagattgatatattgttttttttcttattgagtatttaatcattagctggtattaaaataagtgttaaccactctcctattacatccacaattgtaaatgtatatatgtaatgaaactgtaatcacaaatgtaattcatgattttattgtataaaaacaaagatattacttttgtgaatgtgtattgtgttacatacatacttcacaactgtcatatcctatcgttaaatatgcaacaaatagtagatatttatctattttttcttgtcactggagaacccttcaagtaaaatttgtcactcatagttttacatataggctataatgccaaaatattgcattatttccatataaatgcccgtttaaatgaaattattcaattctgagaggctttaatttattataaataattgatctacagtattatatgtgcgttttgttaggctgattttttttctattccagaaaatatagatactttatgtatgaaaatgacattatgatacaggttatgatattctgttagcatcatgataaggctatgaatattcattggtatcttcaataagggttagcttcattgtgtttctattatatagtatgtgttgtattctttttatccttttctgcctttgggataaggaatgtatcatactgcttttactgagaaatctattttatgggaaatagacccttattttgattaggttcggcattaaggaggcagaatgacaaaaggctaaataagaatgtaaaaaaataggttagttactaccagagaagaaggtatttgattatggaggatacatttactccccataccacacttcgattttggtaaaagtatgatatagggagcagatactgaaataaattgttttttaatgaagaatcttgaatactaattcacgaagaatatctccatcgcttatcgaggtattgcctacacctttcgattttgcgtctgcatatcgtatttctcctacaatttgcattgtcttcactccagtgtatttccgcattgccgtcaggtagtcgcgggcctgccacggggttttaagccctaacatggtagccactccctgttctgatttatccggtgcatagtaggccaacattaggtttgagtaaaagttgaatagtaaagaaagcgtcatttgtatcggatttgttttaggattttcttcaaagtattttattattttattggccttgagtacatccttttcgaccagtgcactacgcaattcaaaattattatagtctttacttatccctatgtttttctctatttgttcaggagttacgcgtttctgaccgccgggtaatgtgatgatcagtttttccagttcacccgtcaaacggctaagatccgtacccacaaaatcagctaacattgcggtagctttaggctccatgtctatccctttacgtttcatatatgaactgataaatgcaggcagctgtgcttcttttatctttttggattcgaaaagaatacctgttttttcaatttctgcagctaacttctttctgcggtccagagcgccatgtttatgacaaaccactaatattgttgagtttaacggtttttgcaggtaataagatagttcttctatattgcggatggcttgtgcctcttttactatcactacctgatgttctgacatcatcgggtagcgcttagcggcattaatcacagtcgccacatccacatctgcaccatatactacggtcaggttaaactctttctcagtatccgtcagtacgttgtcggtaatgtaatcggctattaagtcgatataatacgattcttctcccatcaaatagtagatgggacgatattgcttggccctcagttctttgaggatgtcatcgcaagtcagttcttgtttggccatataaatataagtgtggcgttaccagtcgaatttcaggtgttttacagttttcttttcatcaatgatcattcgtagcgaggcgatgcctatctctacatgctcctctacatagtttttggtaacgatgttgtcgcttttatcagttttcactccttccggaatcataggctggtcggatacgagtagtaaagctccggtcgggatatgattggcaaaaccgcaactgaacagagttgccgtttccatatcaactgccattgcacgagttcttttcagatactctttaaaggtgtcatcatgctcccaaatacggcggttggttgtatagactgttcctgtccaataatcgcgagcatagtcacggatagccgatgatacggcacgctgcagcataaatgccggcagggacggaacctccggcgggaaatagtcgtttgaggtaccttcaccgcggatagcggcaattggcagaatcaggtcacctattttattttttttatcgattccgccacattttcccagaaacaggcaggcttttggagagatggcactcagcagatccataattatggcggcattgggacttcccatgccaaagttgatgattgtgattccttctgcactggcagagatcatattggcgtctttacccaaaatgggaacattaaatttctctgcaaatatttctacatacttgttgaagttagtcaacaggatatactctccaaagtcttccaggttacgtttggtgtaacggggtagccaattagctacgatttcttgctttgttttcataagattccattaaatttgtgcttccaatagcaggaagccattatttaacttacaaaaatagtaaatgttatcgttaaacctaccagtatttgacactaaaatcgccactcgaaatggaaaaaatgttattttcgatgtgattcgccgtcgttatgtcgcattgacccctgaagaatgggtccgtcagcactttgtacactttcttattgttcataaggggtatccgtcgtctttgatggcaaatgaagtgctgctgaacctgaacgggactaaaaaacgatgtgacacagtgctatacaaacgcgatcttagtgccagaatgattgttgaatataaagctccccacattgagattacgcaggctgtttttgatcagatcacccgctataatatggttttgaaagttgattatctggttgtcagtaatgggatgcaacactattgttgccggatggattatgatactcaaagttattcgtttctgtcggatattccggattatgacgctttataaaattaacaatgttaatgactctttccggcatctattatcctctttccaggaagttaatatcgtaaatgcaagaagttaattgtttatcattacgaagttaactttaacacactattaaagttaacttcgtaatgatggattgttcgtataataaacggcttgtaatcaatacttttgtttcaaaagctaattttcattgtatcggtatggcgctaagatgaaaatgcttggttgactttttgacaactataaagaagcctattgacacccgaaactctgtccggtgacaataggctgtgaaatgaaaaagacgttttttacaatagagaacttgaaatagaggactatttctttttcttgcgatccaatacgttttcctggaacttttgcatcagctcgtagaaattcgggatatatatcgttgccagtaacgtgttcagggccataccgaaaacaacagctgcgccgagtgcgatacggctttgcgccccggcccctgtggcgaacagaagaggcatcactcccaatacgaatgcaaaagaggtcatcaggatcggacgcagccggacatgcccggcttcataggcggcatcgcgaatagagttaccttcggcacggaagtcgcgtgcaaattcaacaatgaggattccgtttttcgcagaaagggcgatcagtaaaatgatgccgatctgagtataaatgctcacaggggtccccatgacagaacaacctatcattgctcccaataaagccattggcaatcccataattgctgataaggggcttgtccagctttcgtattgggctgccagtaccaggaatgccaccaataatgccatgatgaatacgatggtggttgtgttgcctgcttgcgtctcctgataggctaccgaggtccattcgtagccaaactcgttacccagttggtccttaatcaggtcttccatttgctgtattccctcacccgaactgcttcccgaagccacgttgcaggtgatagatgctgtcgagtacatgttgtaacggctgatctggtccatccccaagcgctcttcgactttggtaaaggatgaaaatgggaccatatctcctttggcgttggggacgctgagtttcagcacgtcgtcaattactttttgagcttgttctccggcctctatctttacctgatagatacgtccgaattgaacaaagtcattgacataggccgctcccatataataactcagtgtagagaatacgttatccaactgaatgcccataaactgtactttatcgcggtcgatattcaggaaatactgtggtacattggcctggtacatactggatatggatgcgagagcgggttgagtgtgataagtagccatcagggtttcgacagcccgttgcatttcagtcggccccaggttattgcgatcttccaattgtagctgtaaccctcctgaagctcctaatccgggaatggccggaggtaccattgcgaatatctgtgcttcctggatgccataagccatctcgttgaaacgttcgaccacagccgcagcagtatgctcttttcctttccgttggtcccagtttttcaagacaacgaaataagtacctgtgttggactgttcgccacctcccataatagaaaatccgctgataccgatatagtcttttacttcaggataactgtccagaatctgattgactttccgacccacagcctgtgtgcgttccagacttgaagccggtggcaactggatgacagctatgaagtagccgtcatcttcatcagggacgaaggttgaaggccatttcatgaacaggataacagccactgccgtaataataccataagagatcaacgcaaggccgggacggatgagtaatcccttcacgatacggtcatatagattctgtgtcttatcatataccttattgaatcccttgtatatgaagaaattggatggcttgttatgctccagaaacagtgcgcataatgccggggtcagtgtcaacgaattaataccgcttaatacggtagatgcagcaatggtcagggcaaattgcttataaagttgtccggagatgccgctgattaatgtggtagggataaaaactgccaataataccaataccactccgacaattggtcctgtgatttctcccattgctttggtgacggcttctttgggagaatactgtcctgtctccagcaaacgtgaagcattttctactaccacaatcgcatcatccaccactattgctacggcaagtatcaatccgaatagagttaaagtattgattgaaaatccaagtgccgccatgactgccagtgtaccgatcagtgataccggaatggtgatacatggaatgatgacagcccgccagttctgtagaaacaggaagataacgagtaccaccaataaggttgtttccagaaaagtaacgagtacttcatcaatggatgcattgatgacatcggtcgtatccaaggtcacgttatagctgactccggccgggaagttttgtgcaagctcctgcatttttgccttgactcctttagagacatcgagcgagttcgaacccggttgttgatagatagcgatggcagcagtagggtgtccctttagtttggacactacgttgtacgaagaactgccgaggtcgatgcgcgccacatcttttagccggagcattttccctccttcttcagttcggataataatgttgccgaactcttcgggagacgtcaggcgaccttgtacattcaaggtatactgataggcattattgttgtttttgccaataggctgtccgatataaccggcactgacctctatgttttgtgactggatagcctgatagatttgtgccggcgagaggttacggatgcgcattgcttccggatctagccagacgcgcatgctgtaattgcccgctcccattacattgacagcccctacgccgggtacacgtgtcaattggtctaccagattcaactgagcgtagttcgtaaggtaaagcccgtcgtatacagagtcttgtgcctgcatcgtgagaaacatcacaatattggacgattgcttctgtaccgttactccctgaacgatgacaggttccggtaacgaagattgtgctacgcttacccggttttgaacttgtacagtggccatatctatgtctgtaccgacagcaaaagtaatggtcaacgaataggcacccgagctggacgctgtagagctcatatacagcataccgtctacgccatttacttgctgttctatgggaatgccgacagtctgggctacggtctcagcatttgcccccggatagaaggcagatacctgtactgtaggcggagttatctccggaaactgtgcgacaggcaatatatttaatgttaccaatccggccaccacgatgatcaatgccagtaccgtggcgaatataggtcgattgataaagaactttgaaaacatgcagttaacgattagaggttgatgactcgtgattgactgatacgggcttgactttcatgccatcacgtactttcatcagtgctgtggtgacatattgttctttgggcgaaagtccgctctttatctggcgcaatgtgtcattgaccagttgtcccggttcgatatgcctgtagcgtactatattcgaatcgtttacaatgtataggtatttccccaactgatctgtaccgatggaagcttccggaacaagcactgcttgttttgcctcggcataaggcaatgtgatactgacgtatagtccgcttttcagaatacctttcggattatccagattggcgcgcacgttgagtgttcctgtgttcaagtcgacattgggcgataaataatccaatgtggccggatagttttgtgtgccgttctcacccaggcgcacgatgacatttttggggagttccttttctttaccgttttgagagagtagcattgaaagccattggttgtcggcaacattaaaataggtgtacatgcggtcgtctttatagatcgtagccaaagtgacaggttgtgcggctccgctgatatagctgcccacatcgtaaagcgagcggctgacagttccgttgaaaggggcacggatatagcaatagcccagattggtgtgtgcagtattcagagtggcttcggcattgctgactgttgcagtggcttcggctacattcgattcagcttgtaatacttgtatacggctgaccgcatcactttttagagcctctttcatgcggctatagttgttacgggcatattccaactgtgcaagtgcggttttcagttgcgcttcggcttgagttacattatctttgtagatcgttggttcgattacgaataagagttgcccttgcttcacacgagttcccggtgtgaaagaggcggactgcaaggcaccgttgactctggctaccagatttactgtttgttcggtagtcagatatcccggataatcttttgttagggtaatgttttgtacgagtggatatgccacactgatttccggagtaggcatccctcctctttcggtttcttttttccctttacatccgctcattatcaaagggaggatgaggaaaatatacattagttttttcattatgacaagtctttatagttaattattcaggtttccggaccatccgcctcccaatgcctggtacatagctatcagttggagtagagaatatcctctggcttgaaccagctggttttcataactgagcagtgagcgttgggcatccagtacgttctggaatggggtcaatccttgtttgtaaagttccagcgagagagtcagggtctcttgtccctgattgcgcacttcgcgcaaagctactatttgcttgatagaattccggtaagcgttcatagcgttgtctgtctcttgtacggcggtcaatactgtctgattgaactggttgatagcttcgtccaattgtgctttggccaatttggtagcattcactagttgagttcctttaaaaagcgtccaactcagggccggagcaatttcataggtcatacttttatgatgggtcaggtctttcaggtcctttgctgcataaccaaccgatccttttagaaagacctgaggtaaccagtccgacttagacgctcctactaaagcggcttgtgcattgacgcttcgttcggcactgcgtatgtccgggcggcgaagtaacaaatcggccggaagccccactccgataggttccatataatccggtaatgttccgggagcggttagagctggccgcacttcctggggataagtacccaatagtatggcaagggtcgtaatgtattgattaatgcccgattcgatttgaggaatcgatgctttggtgctgaagaacaccgacttagcctgtgccacatccagtttagatacgagtccggtgttgtatcttacttctgtaatttttaataccgcctcttgagatgcacagttcttttgcactacggccaattcttgttgcaactcccgcaggttgatgtatgctgaggctacctgggcacaaagtgatatcattgtgccggtatattcttctttactggccgcaaagttctctttctgggcttttacgcgattgcgtatgcttccaaagaggtctaactcccagctcatattgagcgaggcatcataataatgttgagtcgattgtggcaagtcactggtgttgccactgctttgctggcgggtccatccggcattcaacccgattgttgggaaaaaatttccacgttccattcttaagttggcttttgccatattgatacgatcaatcgcagtcagtaccgaataattctgcttgactgcaacggagatgagtgagtcgagaacggggtcctgaaatgctttccaccattggtcgtccactggcaatacttgctgaaatatttgtgtatcttcttcccatccttgtggtaatggtttgtccagatagcggctcgtggcctgtggaaaggcaacggatgaaagaaacagcaagaacgtgatacttcctattcgtagtttcataagcttaggttatttagaaatgaaaacataacaacgaaaagaagtatttgtttatccgctctgcaagagaatggctacactcaaaagggaatctgttttctttaaaaagtaaatgggtatttcataaacaaaaacccataactttactaaaattcaataggaattatagtaaaattatgggtttaaatagtattataatatgtctcactagtcctccggaatcggactatcgagctttattcagcttttcttctgatagctcttttggtggtaaccggtgcttcttctactttgtgttctatttctacacctgccagttccgggtcaatcatgatacgtccacagtattcgcaaacgataatttttttacgtgaacggatatccagttgtctctgaggcggaattttattgaaacaaccaccacatgcatcacgctgtacgtatacaatacctaaaccgttacgcgaatttttacggatgcgcttgaaagattgaagcaggcggggttctatctttgtctcgagatcttttgctttgtctctcaacttctcttcttcctgtttggtctcttcgatgatttcatccagttcattcttcttctggtcgaggtctttctggcgttcttccagtgctttggtatttttctctatttcttcagatttctcctgctcttctgcagtaaattctttaattctcttttcgcaaagttccatttccaaagactggaattcgatctcttttgtcaggaagtcatattcgcggttattacgaacattgtcctgctgtgatttatatttctcaaccgaagctttggctgcttcaatttccactctcttaccggcgatagctgatttgagttcgtctacttccgacttgattttgtcgatacgtgtactcagaccggcaatttcgtcttcaaggtcttgtacttccaatggaagttcacctctcaacgttttaatctcgtcaatcttagataatgttgtttgcagctggtacaaagctttcaacttctgttccactgtcaactctttcggttcatttttagcttctcttgccattttacttataaatatttaatgggattcgtgtttaccttactaaattggagtgcaaaattaggaaataaatcccgtattatagaataaaaaatttcttttgtatattgttcgctttcgtaatgtcctatttcagcaagcaaaatgtcagtttcacgaccgaaatagtcgtgatatttaatttcacccgtgataaagacatcagctccgctacggactgcctgcggaataaggaaagctcctgcccctccgcaaagggatactttctgaatcaggcggcctgtaagtttgttgtgcttcaaacatccgacttcgaatattctctttattcgcttcaggaattcgagttcggattcaggttcttccaattcaccgacaattcctgatccgacttgggcccaactattgtggagaggatataagtcataagccggttcttcatatggatgtttggaaagcaatgcacggataacttctcctttcttatattcaggcaggatcgtttcaatccgcacttctgtttcgtgatgaagttctcccactgttccgcagaaaggatggctcccttcctgtgcacggaaagttccctccccttctgtattataactacacgaatcataattgcctatacatccacatcctgctgtgaacaaagcattacggacttcttcagcctgggcagacggaacaaatgtgactaattttatcagactgctttctttagggtcgagtatacgtacattttttaatcctatcttctcggctattttgaaattgactccgcccggagcattatccagattggtatgggccgaataaataacgatgtcgtttttgattgctttcagaatgcatcgctcaacgtaatctttaccggtgattgatttataacctttaaaaataagaggatgatgggatataatgagattacatccggacgcgatggcttcatccaacacagcttcggtaacgtcaagacacaacaaagcccctgttgtttccgcatctgtcaatccgatttgcaggccggcattatcaaatccgtcttgcaatggcagaggcgcgaaccgttcaagggcgcttactatttctttaattttcatttttagtagaaaatttgcctgcaaatataagaaaaagatagcatcttgccttgcttttattgattttttaatatatttacctcctaatttataaagactcaaaccaatgaaggcatttttaccgttacttttctcttttttctttattatttcatgccagcaacacaaagaagctactatatctcctatcgatgaagaagatgaattgcaagaggaggccgatagccttccccgtgcgacagccattttttggcttgataaatatcatatgaaagagctgaaaaaggacgatgtgcttactttccgtacggctaaggctaaagtcgtcattcggaatgatgggacaatcgatcttctgtcgtttgtggaacaacagcctgggaatgcacaacgatatatccgttaccgactgaaagatttcaaggttaagaaaatcttgatggataacggctatatcaatccgggtgaacaatacgtccaactccgttatatacctgcacttgcaaggcgcgttaaatagtgatttctactatgtttccttcgggatcaagaatagcactttcaaaatagccgtctccggtggttcgtggctcactctcgataacaaaaccatccttacggagttgttctgtgagttccaatacagcttctttgctaccgacagaaaaggaaaaatgagctaacccgaggcagtcttttaatgcaggtgttgtgatatcttgtctttgcataatttccagagaagcaaatccctgatcaaaactgatgaaataagattcaaatccttttttaggattgatatacttttcattacttgttccgttgaaataagtgatatagaaatttctaagttcctctaaacgggtagtccagatggcaatgtggctgatgtgcatattcctgatagtatcgattaattattaatatttgcacaaatataggtaaatattgatagttatgctttgatttatatcaataatcatgcaattatcgcttctttatcattttgttcttcattgcatatttctcatcgactacccggtcggtaggatagaatgtaaatgccatgcgccaacctgattcttgataaataaattttcttccgctggcaccatgagatattttatcgtacttttcttttaaaaagccgcttattccttgaggaatagcctttccgatttgcaggaagtctacggtaataaaaaatcccgggatatgtatttcacttattaattgtaaaatggagtcggttgatgtcatagtacggctacttttgagattctttggttacttgcaaaatacgtccgtattcatcgaacgatttacgggatgccagcgagatggtgatcattaatgataacatagaggctgtgaaagtaatgaccataatcatcatttgatattttatggcaacgttcggactgctgcctcccaaaatttgcccgatcatcgtgcctggaagtgctactaatcccataaccgcgatattggcaatcagtgggctgaaagatttgataatcgcttcccgtatgaatggtgcctgtgcttcctgacgagtggcaccattgcccaacaggtaacagtacaattgctgttcacgtttcaatccactataataagtgttcaaggcaatcacgttgcttgataacatatttcccattaagattccgaaaatgggaataaaatactgggcgctgaatacattatccagttgtaatacaatgccaataaagtacatgcccaccagcacaacgctacagaggaaacctactgatatagggatcaggagtatttcacgtttaagtcctgtacgtaccaaagctgtttgtccggctacaaaaatcatgatgataacccacaggaagttaatccatgggttattccacaggaaaaggtatttcaggtacatacctatcaggaagagttgcacgatcatgcgtgctgtccctatcagggtggctttcagtaatccggttttgaacttccaaagataaaaaagtgggattaccaataacagtagccctataagcagattaaagtaagatatatcaatagttcccatatactacagtgtgattagctggttacatccgtaagcgaatgtccggtcatgagaaacggcgagtatagccgttcccttttctgcctgattacggaagaaagctaaaactttgtctgtggaaccggcatcgagtgcagatgtcggttcatctacaataatcaaaggtttttccagcatggctgcaacggctatcataatgcgctggcgctgaccacccgatatttcgcctacccgtttctgatagagctctttgtccagtcctaattcatcaaaacaagtgaaaagcttttcttcggaaaaagagatgtgtcgattggctttcaatgcaaaaggaagcgatatcatttcttttacccattcggagggcagggctaactcctgtggaatccaagctatatgtctgcgtatggcatcgatagtagtaggttcaagcaagatacctcctactttgattttgccttttcttaatgggacaaatcccataattgcattgagtagagaggtttttccacgtcctgattgacctgctatgcaagctgtctcgcctttatttagtcgcatacaaaattccgagaagagtatatcctcgccaaaagcaatgcatgcattgtctatttgtaacatcgtgtatctttaaatctatcttgcaaagttagtcaaaattcataatatgtgcgggatttcttttatctttgtgtcactaattaatgaacgagatatgatactgaacgaacgagacagtcgccacgaacatgtattaaatgtggcacggcagatgatgactgctgcccgtacggcccctaagggaaaaggaattgacatcatagaaactgcaattgttaccggtgaagaaatacagcaactctcggatacgttgaaagccatgttcgaagagtttggtatgaaattttttttgcgggatgcagataatattcttcaggctgagtgtatcttattaataggtacgcgtgagcaagctcaaggattgaattgcggtcattgtggatatgctacatgttccggacgttctgaaggtgtcccctgtgcgttgaatagcattgatgtaggcattgcaattggttcggcatgcgctacagcggctgatttgcgcgtagatacccgtgtcatgttctcagccggattggctgcccaacgtcttgagtggttgaaaggatgtcatcaggtaatggctatcccggttagtgcttcttccaagaatccttttttcgatcgtaaacctaagtaatataggtagcgagtggcatttattactattggtgtagtgtccgttcgctatttatgatttattctttaaaaactaaaaaaaatgggaataatggttggtcttcctacttcaggaggcacagagaaagatttgcaattgaactttggtttaactgttaatgatcaagtagagatgttagcccccttcttgcctgcagagtggtttctgcaaagtggtatacaactaacttggccgcatgccgggacagactgggcatatatgttggctgaagttcaggaatgttttataaatatagcccgtgagattgcgaaacgtgaacttttgcttattgtcaccccctatcctgaggaggtgcgtaagcagatcattggtacggtgaatatggataatgtacgtttcctgaagtgcgacacgaatgatacttgggcgcgcgatcatggagcaattactttgatggatacaggtggagcaagtttgctggattttacttttaatggttggggagaaaagtttgaggctcgtttagataatcagataactcgccgggcagtagaagccggtgcactgaaagggcaatataaagattgtctgaattttgtactcgaaggtggttccatcgaaagtgacggagccggtactttgctcacaacttccgaatgtttattgtctccacatcgtaattcgccgatgaatcgtgttgatatagaagaatatctttgcagagtattccatttacaacgggttttatggctcgatcatggatacttatcgggagatgatacggatagccatatagatacattggctcgcttttgttctccggatactattgcgtatgtaaagtgtaccgactctgaagatgaacattacgaggcgctatgcaaaatggaagagcaattgaaaacgttccgcactacatcaggtgctccttatcgtttattggcattgcctatggcagacaaaatagaagtagagggagagagattgcctgcaacgtatgccaattttttgataatgaatgatgttgtactttatccgacttataatcaaccggaaaatgataaattggcgaaagaagtgctgtgtgaggcttttccgacatacgaagtggtaggtattgattgccgtgcacttattaagcagcatggatctttgcattgtgtgacgatgcaatatccaacaggagtgattaaataataaattaaagtatgagaaaaataaaagtaggaatcattcaacaggctaacgcatcagatattaggataaacctgatgaacttggctaaaagtattgaagcatgtgccgctaatggcgctcaacttgttgttctgcaagaacttcataattctttgtatttctgccagacagagaatacggatttatttgaactggcagaaaccattcctggtccttctaccggattctattccgaactggcggcagccaatcggatagtgcttgttacttctttgtttgagaaacgtgctccggggctatatcataatacagctgttgtctttgaccgggatggaagtattgccggaaaatatcgtaagatgcatattcctgatgatccggcttattacgagaaattctattttactccgggagatattggctttgaaccgattcagacttctttaggcaagttgggtgtgttggtttgctgggatcaatggtatccggaagctgctcgcctgatggcgttgaaaggagctgaaattttgatttatcctactgctatcggttgggagagtacagatacagatgacgaaaagaaacgtcagcttaatgcttggattatttctcagcgtgcgcatgcggtggccaatgggcttccggtgatttcagtcaatcgtgtcggtcacgaacctgatgcgtcaggacagaccaacgggatattattttggggaaatagttttgttgccggaccacagggtgaatacctggctcaggcgggaaatgaccgctctgaaaatatgattgttgaggtggatcttgaacgttcggagaatgtgcgtcgttggtggccatttcttcgtgatcggaggatagatgaatatgggaatttaacaaaacgttttattgattgaaatgatttctctctctgataaaaaaaaatcccgtagagttttttacactctgcgggatttttcattatcttaagcactattttatctgaatgtaagcttcttattaacgatgaagtttactgttccgtagataaacagccccaggaattgtgccagatactcgtttacatctccacactctacaagtgtgactaaaaacaagaactgggcactatatgccaatccgaaagcagaacagaagaacaacatctgcttccaaatgttgttctttttattttcaatcggaaagatccaatatttactccaaataaagttatgaatttgggctactatgtacgctgtaatattggccggaatgtaatcgtatgacaattcatccatcatcaaccaaataacaaaagctgtgattaatgcattgagcgtaccaattacggcaaatctaaaaatgcgtaccgactctttcacttactccttaatatctacaatcaggttcagttcttccagttgtgacggatcgagtgctgcgggagcatccaacataacgtcacgaccggagttatttttcgggaatgcaatgcagtcacggattgagtccagtccggcaaaaagagatacccaacgatctaatccgtaagccagtccgccatgaggaggcgcaccaaacttgaaggcattcatcaagaagccgaactgctcttgcgcacgctccggggtaaatccgagtaattcgaacattttgttctgcaactggctatcgtggatacggattgatccccctcctacttctacaccattgattaccatatcgtaagcattagcgcgcacagcagcaggatttgtatccagcagatggatatcttccggtttgggtgaggtaaacggatggtgcatagccattaatctgccttcttcttcgctccattcaaatagagggaagtccacaacccacaaacatgcaaatgtgtttttatcccgtaatcccaattgattacccatttctagacgtaattcacaaagctgcttacgagttttcatggcatcatctcccgataaaatcaagattaggtcaccgggtttggcaccgaatgcttccttcaattgttgcaaaacttcttgtgtatagaacttgtcaacgcttgatttcacagtaccgtcagcttcgatacgggcatagaccataccttttgcaccgatttgtggctttttcacaaattcggtcaaggcatccagttgcttacgggtatagccggctgcaccctcggcacaaataccgccaatatatgtggcattatcgaatacagagaaaccgtgcccttttaagatatccattaattcgacgaattgcataccgaagcgaatgtccggtttatcgctaccgtacaatctcattgcttcgctccaaggcatacgtgggaatggctcggtcagttcgatattacggatcaccttaaacaggtgtttggccattccttcaaatgtagtaatcacatcttcctgttctacgaaactcatttcgcagtcaatctgagtgaactcaggttggcggtcggcacgcaggtcttcgtcacggaaacatttggctatctggaaataacaatcgaaaccggaaaccatcaatagctgtttcagtgtctgcggagattgcggtaatgcgtagaattgtcccggattcatgcgggaaggtactacaaagtcacgtgctccttcaggagttgaaccgatcaataccggagtttccacttccaagaaacccagtttatcgagataactgcgaacctcgatcgtcattttgtgacgtaattccaaatttgaacgaacagcactacggcgtaaatccagataacggtatttcatgcggatatcatcaccaccgtcggtgttgtcctcgatagtaaaaggaggagtaatggctgagttcaggatattcagttccgaaacgatgatttcgatgtcaccggtcgggatatgactgtttttgctgaaacgttcgtttacggttccgacaatctgtatgacgaattcacgacccaatttattggcacgttcgcaaagctcagcgtctatttcttcattaaatactaattgagtgataccgtagcgatcacgaaggtcaacaaaagtcatacctcccattttacggctgcgctgtacccatcccgacagcttgacttgtttattaacatcggagattcttaactctccgcacgtgtgcgttctgaacatatttaatatattatttatatttttgttaaagtagtctgcaaaagtacatattaattcggattccgtgttatttccaaaggtctattttttagtaagtttttgtatcagctgcttattcttcttcagaataactttatttttatgtgctatatcttctactatagcttcgtttatcaatttaataccgtttacgtattcttgtgctttttgtaatacgttgggattatctttttttttatcaccaggtacaacgacccgcagtcctttctgaatcagttctattttgatatcttcgtcagcctgcatcggatcgccgtcaaaatggacaacacccggcgaactgcgatgaatacataactttttgcaacggaaagttttaatgcgactgttttggtcaattgttttattgaagagctgaaaggccagtgccggaacatctaataccgtaaacggttcgagaatggttacatctaacaaaccatctgtcagagtggcctgtggggctatataagcattgttcccgtattgagaagcgttgccgcaagcaatgagaaaggctttatatttggaagtaccgtcttctgtttccaattcataagtttcaggttgatactttagactttcctgcagggttttctctagataagtcagcagtccacgtttgccggcattagcaaatttcagacttacaaaagcgtcaaaccctactccgcaagtacaaaaaaagtctgtgccatttatttttccgtaatctatgatatcgattatcccatcattcaaaatttcaagtgctttacgcggatccattgaaatttgaagatgccgtgctaatccgtttccagagccgcaagggataattcccaatgctgtattggtgtgtaccaatgaacgggcaatttcattaattgttccgtctcctcctacagcaactactatatctgtatttttatctgccgcatctgctgctatttcgattgcatgtccggctctttcggtatacacaacttcccaagtatacatttccttatctatcttttcatccagtagactcagaacaagttccttactttgtgtacccgaaattggattaacgatgaatattatttttttcttgttttcgctcatgcaagttggttccatcatttatatgttgtggtcggcaaaagtaatataaatatcttaatttttgccctttcacagctttctaaaactataaagagtatattttttcatagaaaaagaacagctaaaaacatattttgttatctttgccccctgttttaaacacttgttaaggaaaaaggatttagactattatataaaagatagtcaataagcgaattatataaataactattcatgggattattacaagagaagttagctaaatacgacctccctcagcagataaaggctaaaggcgtatatccatactttcgttgtatcgaaagtgaacagaacacagaggtgataatgagtggcagaaaggtgttaatgtttggctcaaactcatacttaggcctgactaatcatccgaaagtaattgaagctgctgttgaagctacccgcaaatatggtacaggttgcgccggatcgcgttttctgaacggtacactcgacctccatcttcaattggagaaagaattggccgaatttgttggtaaagaagatgctatcatttattctaccggatttcaggtaaatctgggtgtggtttcgtgtgtgacaggtcgtgaagattatgtgatctgtgatgaacttgaccacgcttctattgttgaaggacgccgcctttctttttctaccattcttaagttcaagcataacgatatggaatctcttgagaaagagttgcagaaatgtcgtcctgatgcagtgaaactgattgtagtagatggagtattcagtatggagggtgatattgccaatttgcctgagatcgtccgtttgtctaaaaaatatgatgctaatatcatggtagatgaagcgcatggactgggagttttgggtaatcacggacgcggtacttgtgatcatttcggattgactaaagaagtggatcttattatgggcacattcagtaagtcattggccgctatcggtggctttattgcagcagacgagtccatcattaattatttgcgtcacaattcacgttcatatatctttagtgcaagtaatacgcctgctgctacagctgccgctcgtgctgcacttcagattatgaaaaacgaaccggaacgtattgagcatttgtgggatataaccaattactctttaaagtgtttccgtgaacttggttttgagatcggacatacctccactcctatcattcctctatatgtacgtgatatggagaagacatttatggtaactaagatgttatttgacgaaggtgtgtttgtaaatccagttgtgcctcccgcatgttctccgaacgatacgttgattcgtttctcgttgatggctacacactctaaagaacagattgattttgctatcggtaagttagtgaaatgtttcaaggcgcttgatcttttataatccattatagagataaataaagtcagaatttatatctataggtattagttttgaccttattcttttaagcgttggaatgcttaaagaagaggtggtaaggtgaaaggctttattacctctttcttttttaaaagaaattactctcttgtatttctactacttctgaagtctgcatttgtttattgcaggtgaaaccagaaaagtgttggaaatggaagattatatttttaccctaaaaatcagtgtcttattttaccccttgtttcagtctctcagagaggctatctttattatatccgtaccaaatatcagaaattcttccatcaggcgttacaagtacataaaagggaatgccatttgctttgtaacggatatacaatccgaatgcttctttgggatcatttagagtgatccatttgatatttttttgagagaactttctccatgatttctcatcatcaatatttataccgataaaagtaattttttctttccacatatcggataagatttccatctcaggaagtgattcaatgcagtgttcacaaactctgctccaaatatcgagtaaaaggtgatatggaagtcatttgcatgaatatagcactcaattatgcaaatgtgtcaagaagtaaaatgaatcaagaattactcagatttatcgggtacatctcttttaattgcgtatccgtgttaatctgagtaattctgtctgaggagtgttaaatagtaacttctgttacaacttgaccatcgaataaattaattacccggtctgcgaaacctgcatcatgctgagagtgagttaccataacgatggtagtgccttccttattcaattcgctcaatagtcccataacctctttaccattttttgagtcaagattaccggtaggttcatcggcaagaatcagtttagggttggctactacggcgcgggcaatggcaacacgttgttgttgacctccggaaagctgttgtggaaaatgcttgcttctatgggtaatggccatgcgctccattgctttttccactcgttgtttacgttcagaggccggaatacccatgtagagtaagggcaattcaatattttcatatacattcagttcatcaatcagattgaaactttggaatacaaagccaataactcctttgcggagattggtgcgctgcgattctgtatatttggatacttcttttccgttcagataatactctcctcctgtaggattatccagtaaaccgagaatattgagaagagtagattttccacaaccggaaggtcccatgatggcgacaaattcgccctcttttacctctacgctgacgttatttaatgcccatgtttcaacttcttcggtcttgaagattttttgcaaattgattgtcttaatcataatcgtaattttttaagagtttatattattattcgttttttattatttctgccggattgagatgcatgattctgtagattttataggctgttgttacaaagataagtaaacctatcagaatgaagaggtaaatcccccatgtaaatccggtaatactgctgatcgggctatccttggttatgtctatcacaagcaaccttaataatggataagtgatggtataggccagtatgaattggattatatatgcttttccgaacatcaaagcaattactttcggagttgcgccgtttattttgcgaatagcaacttctttctgccggctgactgtgtccatagagatagctgagtatatgctcagtataaccagaagagcacttatgatgcctaatagcagtgaggcatcgcccatcaggtctctgataccttgtgttgtacttcttcttatatccagtcgttgtatatcgagtggcaatgactctgggacgtaattacggcataccctttctatttctgatttggctttaccaaaactgatatcgtcacgaaaacggatataaattacggatgcttcttcagtcgggaagaaaacagaaatattgtattgattgtgttctgagatgttctccccgtaacaagccttgtatgtacctgctatccgatagttctctttacctaattttacatttccgcttacagaatcattttccaactgcttttgaaaggcttcgctgatgtaaaccacgttacttgtatgaggttcgacgatctctccccggaaaggaatccggaagaactggaagtaactgggatctccttgtctgactctgatagtgagagtacggtgatcggcagactcatagtcactggtcagaaacgaattatagttgccgctcattaaaactgaactgatattttccactcccggcaacatctttatttgtgataaaatcgcatctttatttttgccgagagtaacactattcatttcaaggcaaagcgtggaatttgtttctttgtctgatagaggaaggtacaaaacgcttcctacactattgaataaatgtatagcgatactcatacccagaaaaaagatacatacacatagctgtacgcacatcatgatgttgcgaaagaggtgccggtggctgttagttttcatgtgcccggcaagaccggaccgttgcaaacgccggatgggatatagcattacaagggtgcagatcagtaacagccctatataaagtttaacttgaatgccatatagagtttggatatctattggaatcatttctttgggcggaatataggttgtcagtagtaaacaggtacattcggataagaccagcgagagcaataaagaaaatgtcagcatccagaaagcttcggtgaatagaagggcaaataaacttttggggctggcacccagacttttccgcagggccagttcacgattacggttgtagaatgactgtatgatgaactttagaaagtttatcatacccgataacagaatcagagaggataagaaggtaatgaatgctatgcctatcattcgctgcggatcgtgatacgagtcagcttctttgttcgcaatgaaatatgccatttcattattatgaagagttgttatcccctttaggctttcattggctttattcaatccgtctgctgtttccagtgtaccttctgtgatgtatccttgttgtctgttctcttctctcaaatgagagaaatagatatctgtttcaacatttagtgttttgggaagattcctgataacattgacaactttatagtatgtgcttttatctttttcgctttccttcaacttgactattttcagtaatgtgcctaccgggttgctctttccgtatactttacgggcacaactttcggacaacacaacttcttccggagttgtgggaagaacattgccatataagaaggatgcattataatgtgaaaagaaattaggatcagtatccatatatgagatgatgtaaggcttttcttcctgctccctattgatgaatacaacttcgtcttctctttggaaagagtggaagcagatttgcttaatacccggtatgggatgttctgtcagggttcggatctcagaaaaattgagactccacccccatcctcctacttcgtggttggaattgatcatccggattgaaatcctttgttcgaaattgggcatgttacgtgatgctccatctatttcattgataaaaaagtggatgatgctgaaacaagtcataccaacggaaagacaaatggcagaaataatgctgtgtgtcttatacttcagcagattgcgtattgctgttttgagataatgctgtatcatatagttcattttctctgatttattcgtttttaattacttctgccggattagtccgtgcaatataatatatttgccagctgattgtagctgttattatgcctattaatagcatgaggggacccatccaaagccatggatcggcataatcaaacaatatggctcgatgctggctgccgatgaccatgacgaagaggctaattaaacctcctactaccgaagctattagaaataaaatcaggtagtttttagcaaacaaccaatagatgtccggtaaacgtgcaccattaattttacggatggcaacttctttttgtttacggatagtgtcaatgctgatagctccataaacgccaagtaccgtaatcactaagcaaatggaagagcagacaacgaacagccacatcaccgagatagttcctaatccggtttgttcctcatataaactgatgaactcgaaaggttcgttctgtggtagatattgattcatccccttgctcatttctgcttttacttccttgcgaggagcatcagggaccaatcgtatatatattttcccgatttcgtcattcatggcagaaagtggtaaaagagccaattgctttgcacttggagaatcgggacctatatggactaaacctttaaccggatatacttggttttgaaaacgaaaagactcggaggtagaatctgcttgcaaagtttggtataattgttcgtttacgtaacaaaaaggttctcccggtttgtgatggcatttgatgttcattaaattaaaataatcatccgaaacgaagcagagttcggtaaatccatactcttggctgtaatccctgttagtgtaggctgtttcggcattccaacggcgtgagtgcaggaagtttatcagttccggttgatgctctcgaatacgatcgtatctgcctatatttactaccataatttctttttttacctctgtgctcagattgggattggctgagagatcgtattctttcatttgcatacggatgccgactgtacctacaatgaatagaaaagagaagagtagctggacgctcagtaacgtgttacggattatgtgacgttgtccggtagttgtcccccccctcaatccttgcgctattgtcttatgggcaatgtgccaggaagagatgaatgagatcagtaagctgataagcaacaagcctcctatatattggcattcataaacccacaatcgatgtgtatctatgtataagtttctttgtatttcattagaaaatgtacttataaaccaaggtagcaagctctcagtaatggccagggtaattattccacagatcaggatgatgacagcctgttcaaggaatagcaatatgaaaagtccccagtaagtagaacccagcgtattacgtagactgatctctttgtaacggttggcaaatgctcctatactgaatgaaaaatagttgatcatgcctaccaataaaaccaatagccccaaaatagccacccataattcagcgcctgccttatgttctgtctggctatccagcactatttgtggtatccattccggatggttgggaaaaagtcccaatttaggcagtaattgtgaaatgtgttcggcatcttccgggcgtttgagcagtagtttgtgtatcccaaatgaagcattttcaggtagtggaagaaaaacatcgtagctgctgtgataattattcatccctgccggatagggcttgataacggcaataatggtatgtattttgcctctctggttaaggatcgtttttcccagcggcgaaacgcctccacagaattgtttgacaaactcagtcgttactacagcttcgttacccgaaataccaaactgttttaaggagccgtctatacattctgtaggaaatactttgaaataatcagcattacattctgttttgtccactttacaatataccgtttcatctaatgtgattgtagatgaagaatttacataaaaagcaactgcttcaaatttgtctttacctattttcttttcaaaatcctctatcggaatatttacttggtaagatctttcttttatgcatatttctgcttgattttcgtaagttgccaaatccttgttacctgtactgaaaatacgattataatagttgcatacactgaaacagagcaaaccggcagtgattcccaatatagatatagcagtttgtactttgcgtttagccatctgcctgaaaacaatctttaaataatgtagtatcatagatatattgatttcttcgttttaattattgttgtgtaaataccgtgtgttttaccgttaaacttctcttttatagtttcaataaatatgccaaactgctaaatgattgtatctttgattgttaggatctctctgttatctctgtttctgtgtgatattgcacgattgcagtgcgaatacgcactgcaatcatttattcacttttcaccgactccgccggattgattttggcagctactaccacttgtcgcatgaccgagataataacgatgatgcaggtgaagaggaatacacatacaaacagccatccgtgaatatcagtatggtacgcataggtttccaaccaccttttgataaataaatatcctaaaggcagagcaattgcgttactgaccagtgtcagccataaatattctttcagaaataagtataggatatctgaaaattgtgctccgtttacctttcggatggctatttcttttttacgctgttcggtagagagcgataccaggaagaaaacgccgaaagaagaaatcaggatacagagtactgccaataacaggaagatacggaacatcgtcttttccggacgattgaacagttccattaaggtggaaagttgaatgatctgcatatcctcggagatttcttttttgctgtattgagaatagattctcctggcgtattgcagtgcttgtttttcattatccggatgtacctttatatagaaatacctgaatccattgtacccccttgctgcatcagcattgttttgatacataaagaagaccttcgacagcgggtactgcatcggacagtagtagaaatcacgtaaaataccgctgattctggtgggtactgcatgattctccgaatcttcgtcatcactgagtataagacgtcctgtcagtgaaggaatgttgagttcgcgggcaccggtttcgttgataactatatctcttgtcccctgatcctgtatccattctccttctttcatcttcattccgaaaaaggaaaggaaattcttttgcacaacgatgcaattatcttctgttgcttcatctacattattacgtccctctatgggaaattgagtgataaaactgcaataccactctcctcttaaaacaaggagaggctgtgtcagggccgttacgtcatcgatggctgagttttgttttagtgcttctataaaaggggtacaatcagtattgtaggttgcatcgaatccgaggtcgatctgccagatgtgatcggtgaccagtcctttgtctgtacggctcatgaatcggtactgactgtagaacatgcaagaagtcaggaggaataaagagccgatgaagatttgtccgattatcaatccgtttctaagtgccagcgaagttccccgactgtttcgtttcagcagaccgacgatgggaaccgtacttaaaaccagaaatatcaggcagcataacggataaatccaataggatgctttcagtacttcttgccgggtgatactctggatgactccattataatagctactgctctctgctaccaaactggtgtaatccttataaaacggaaacaggaattcgataaatgccattgaaagcaaaaatgctatgaacagggggagggtcaattcaagtaagtttttccctatcaaactgtagatggaagcaccaagagtggaaaaagtggcattatagcgcgcttttcgttgttgctggccaatgaatagaacaagcagattcattaatgcactggcaaaggccaatattcccgccgtagccaaaatccggatatgttggagcctgcctttcagctcaggagagcagcgggtatgaatttcgggtaacggacgcaaatgaaagcgccattcagaatatttactccatttggtatcgggttctttgactctgtaggctgctatctttttacttagatgtgcagcatcggccgaagggtgtaaccatacataagtcgtatttcttttgacttgattgggggatggagtggccagaatcaggtattcaaatttgaaatcactgttttggggataattttccattactcccgcaatggtatatgataatttgtcgttgattttcaactctttccctacgcaactactgtcaccaaagtagaagttggccattttttgagtcagaatcacatgatttacgttaaatggaactttataatagctcccttcgatcagtttacattgaaagatatcaaagaaagtggagtctattttcattccgatccaactttttgtatccttctcaaattcgtattttacttcgctgacatggcaaactttagctatttcagggaaagtaaccagatctttttccaccatctgatgtatctggtttaattctccgacagatccgtcggctgttttaaatataccggtggtagtcaaggcataagtccttgaactttgagggtggaaactatcaaaatgatattcccagtgatgccaatacccgcctaacaagaaagctgtaaaaccgatagacaagcctacaatgcttaagatattctgtaccttatattttaaaaggtttctacatgcaattttaaaataatgttgtatcatattattagatttttttattctgtttttactacttccgccgggttttcacgggcggctttccatactctccagccgatacaggcggttatgatgataccgattcccgtaaagatagtgacatacatcgaaacgcctatgctgatttgttcgacataattctccagccacgctttcatgatcatgtagctgaccgggaaagcaaggaacgaggcgcagagtaacagtatcaggtactcttttataaatatcgagaggatgttgccaagtgttgcaccatttactttcctgatagcgatttctttacgccgttgctcgcatgccaatgtcactaaagagaacactccgaatacagcaatcagaatacagacaatagctacacaactcagtagtttcaaaagggtctgctccgatttgagatagttgtcataggtctcctccatattggataatctgattttattttccagatattctttctgacatagctgttcaatgtcttttttaagtttgggccattcgccttctctatactttatcagtacatcacctttgcccaggtcgaatccggaaaagcctttggctataaatgcgataggttttatgggagtggtaggcgatgtcgtatggaagtcttttaccaaaccgataacggttgtccctgttccgttgggtctgattagttttttcccaatcggatcattccatccgagtgctttggccgctgcctcattgattacaatagtgccggcatccctctctccttctttcagcatctttccttttaaaaggcggatgccgtagaactgtgctaactcttcactttccatcagtacttccatatcgatctctgcatctccgggttgttttccgtcccaatccttgaagtgcatagccatggatgcagttttgggtagcagcgaaaagtgtcctttcagaacctgagtgacataaggaaactgctctattttatcagcggcaggcaatagattgttttgcggatacatgcttagagtcgctatatttttgcgttctataccaatatctgtggtgctgagataatagagctgcttcatgatgacactgatgcagaagataaagcagatactgatagaaagttgaaaaacaatgcttatcttacgtcccagatacccgtatctgtttacggtcttttgctgtatgttactttgtagcgtttgtttgttgaagtagaaagttacaggcaggaatgtggcaagagaacatccgatgacgagggcgaagtataaaaaagattcccagtaaacatctccttcttttactcccgacaattctttgaacggagacaataccaattctatcagggccattcccataagtcctgcggccaacaagatcagcagatattctgtaacaagcagggtgaacagatggaggtctgatgaaccgcatactttacgtaatgccaattctctgcttcgcatccgtaaacggctgacaaacaaagacaggtagttgatcagcgaacaaagaataactaatccgcctacaatcgagaagaataggatatagctgaactggatggcattttggtcggccagtacagtatagtggcacttactgatgggcataaccatcagattctgtatgccgcccttgctgtctgtttcgagtttcgtttgttccagttttttctgaaaagcttcggcatttacttctttgtgcaattttataaatacatggaatcctccgtgataccatgcattatgccattgacgtattcctcccgttaaaatagaaaaaggtaaattggtatgacggttccatccgttgacgatcgcacatacggttttaggggcaccatacagtttgatttccttcccgatcggattttccgtaccgaaaagttccttggccgcatgctctgtcagtgctatccgctcttccgattccaggaaatcaaggctgccggagagtacttgtatcccgaacatatgcatgaagcaagagtctgcattgatttcatacagttgccggatagcgccatcgtctactgtcacttcctgttcataaaaaagaaaaccgcaggcatcttccacttccggaaactgcttttctaaagaagtggataccggatatggaattgttgttgtaacgcctgtgtcacttaatgccgatttctgatacaccaaatgaatacggtcaaaaccttcatggaaggtgtcgtatgtcatttcgtaacgtatccataagacagcaagcgcaaaacaggtaaatccgatagctaatcctaggatgctgatgatactctgagtcttgtatttcagcaaattcctacatgcaattttcaaataatgtcgtatcatattattagatccttttttattctgtttttactacttccgccggattttgtttggctgcattccacactctccagaagatactgatgacgatgatgataccgatacctgcaagcaggacgatatatatccaaaatggggtggaagtttgtctgacgtaactttctatccacactctcatcattccatagcttgccgggaatgctataagagccgcgacaagcaaaaggacgaaatattctttgatgaacatctgcaggatacttcctatggtggctccattcactttgcggatagcgatctctttgcgtctttgttcgcacgacaaagttacttgcgaaaagatgccgaaaatagagataatgacgcatacgatagaaacgatccccaacagggtcatcaacgcactttcggaacgcagatatttattatactcctcttcctcgttataaagtctcaagaacgaagagggaaaatcttcttctttcattttccggatcgtatctttgcaggcctcccagctcccttccgtaaacttaaaaagaatactggcacgagaccatagatatttctgctcttcagtgcgtacaaaggcgagagggcgtggagcgatagtgggtggcaggtagctgaagtccttcaccactcctactactgtataatatgtccgattgtgttcatattctgagtagaactgttttcctactggatttctccatccgaacgtcagtgctgccgtttcattaatgatgacatctccgggagagttcttttcggatagccactccccttctgtcaactgcaatccataaaagtcgaagaactctttgcccgaaggtatcaggccgacggaatatgtttcatcagtggtttcattgagtccgtcccagccgttaatatctgtatacatcataggtcctgtagggactatcgggaagtagtggggaggcagagcttcagtcaccataggtaaattggcgatcttagaactccattcattaatatctcctttcatccagacagcaacattgcctatattgtggcgttctattcccagatctgtatttttcagataatagagttgtttcatcataatagtggtgcagaagatgaagcccagactgatgatcaattgtgctatcagtccgagccggcggaatattccgcgctggggacttccttttttattgcgaatactactctgtaacgtacggcttctgaagtaatatagaggaatttgtgaaataccgaaagataaaacgatgactgccagtatgtaaatgatgacttctgtatacagcggggtagcttctgatatctgagccagttctatgaaatggggtaagcaggcctcgatgaaagccatgcccagcagagaaccggctagcaagacaatcaggtattcgacagatagcaatgcgaacaacgaacggttggtagatccacaaacctttcggagtcccagttcacgaccgcgcattcgaagacggctgacaaacagggtcagataattgaataatgaacatacaatgaccaatactcctgccattgcaaaatagcgaatgtagttgaatgaaataacgatctcgtctttttgcagataatcagaatagcggagcgaagtaatcggggtaaaattcaatttacctaatgtactctctttctcctgtgaggaagcatcgaggctgcttatccttttttgaagagctgatttgtcggtatccggcaagatgcggacaaatatctgttctgaattgctttgccagcttggatggtggcgtgccggaagcaaggccccgtatgaaagatttgaatgttgcgaccatccgctgacaacggcacacactttacatggccggcttcccaactcaatctcttttccaagaggattttcgttgccgaaccattttttagctaccgcttcggttatggctatctcgttgctctttttctttagaaaattgacattaccttgcaggatacgcacatcaaacatgcgtataaacgcagagtccacctcaatggccaataaatccccacccttgtctttgaatcgaagattggttttgaacggagatatgccacatatatcttcaatctcagatatgttcttccgtagatactctatagccggataaggcattgagttgctgagcgttccgtctgtgattgtgagttgtgctcttaccaggtagatgtcgtcggctctccgatgaaaggtgtcgtatgtcatctcgtagcgtatccatagtgtagcaagggcaaagcaggtgattcctacagctagtccgataatgctgataatactttgggttttatatttcagcagattgcggaaagcgattttaaaataatgtcgtatcattcgggttcttgtttttacaaatagtgtttcaagaagtatgccaaaaagccaacttgttgaaacactattatttatgtgcttgtgatgttaaaacacactgtgtgaattagcacgatcatagtgcgcatgcgcacaaaaatacaaatttactactctcctttcaatactttggccggattgatattggcagctttccgtatttgccatatcagagtggccagtgatatgaaagcagtcactatggcggcaattgcaaacagccaccaggatataggagctttgttggcgaatccttccagatatttcgaaatgatataccaggacagaggtgccgaaatgatgaatgccattcccaggataatcgagtatttctttaatagaagcggatagatctctttcagggtagcgccgtttaccttgcgtagtgctatttcacgatatcgctgacggatgtcgaacatggacaatccgaacagtcccaggcaagatataagaatggcaatgatactgaacagggagtatatctcgtcttctaaaaagctgtattcaaactcaccttcgcccagtatttcatcgcgcagctttttcaggaaggcaatggcttcttgcttttttccgggaacgatttgtgccatcaaccggtctctgtagctgccccgcggatcttcgtaaacgataaagagcggaggagtggttttcgataaatggccgattttgaagtccttgatcactccgataacctgatatggaggattcttcttcatttcttcggattttgacaaggaccaccacaatctcctttcaggctgaatcagggctgtttctatattatctatttccagaagtgatttggccgattcgttgatgatcattttataatcagtccattggtcgacagaatcattccataggcggccttcttttagctgaaagccgaacagttcaatatatttattgctcaggctgctgtaaataacttgcttgaactcgtcccgctgtgcattccgcacattgatataattgtcatccagctgattcgggttctctccatattcccaacggataaagagcggggaatgatccatctcttctttgatgtaggccagattacttttctctctctgcttccgtctctcccactcttcgtctgatatatttatatcatacgaagagcgttcggcgtataactgacattgaatgatgtccttggtggtatagttcagatcggcagacagcatgaagcggacttgcttcgtgaaaaagagggaaacaataataagtacaaaggtgatgatgtattgaacgaataaaaacagcacacgggatacgatggaatgtcctcccgcatttaccgaacggatagatacggaaggtgaaacgtagttgtatctgatgaatggataaatagaagtcaataatggcaacagaatcaggattcctacggataatgtggcactaaattccgtattggaggtttgcggtatccggagcacatgttccatcatgccaccggttatttcgataatgcaccaggatatgcatagagccatgcctgtcaggataaagttttcagtgaaaatctgtgcgaatacatcctttgcgccggcaccatatacttttttgactccaaactctctggcacgcttgagcatcatcaccgtatagatgttgatgaaattgaacaagccgattatcaacaaagcaatggtgacaacggcaagtactaagatattattgtagttgcctttccggatattgttattataaacgcggacagtcttatcgaaatagaaatcttttaatggaaagaactgcaggcgggtcggtgcatccatatggcaccttaacttcataaacttctcgttcttgacgttcagtttcttaaagtccgttccgggtatcagttgtaccagactattgcttaaacgcgaccatgaatgttgcaatcgttcggatataataaggtcgaaatctaaaaagcttttcgtcgtcggctctcctattactcccgtaactgtgacgatgtcccccgtgctgtaagtcattgttttcccaataggattctcttttccaaacaatctttcagccaatcgccgggtgatgatggcgtcattcggagacttcagagatgaaatgccggacacggacggatagggtaatatctgcagaaacacactgtcggtcactacggtttttacattatatatctgtttccctactgtaatcctgtcttccggaaagttaatccatcgggtacttttcaggacagacgggtcgttcagcggatcgataaagttggggtcgttattcctatcttcattactgcttattgtccgccttccatcttcgtactcgatatatagcagataggtgttttcaaggtctttgcagaaatgatttacggtaacctcctgatggatataccggaggatgataagtacacaagccagactcaaggccaagcccagtatattgatgaatgtatatgttctgaaacgtgccagagccttccaggccagccttatggttttcatgtttgtatgattttgagtttgattcaccacggagtaacacagagtctgatagagttttaacctcttgcttattaagatattaagagagaactatctctgtgtaaccctgtgccactctatggtgagttcgattcatttttatattacttaagtattaattcttctgcctcgccaaaggtatcatatcctgttgtaacgacataatctccgggctctaatcctccggtaatttcatattgttgcggattctggcgtccgatggtgataggcgtacgtacggctttggttctagatgcattggctttgtaaatccactgtccgccagtggcctgatagaagttgccgcgtgggatgacgatggcttgttcaggctgtcccaattcaatctggacacggaaactcttacctacacgtacgttatcgggcatttcgccggtgaagaccagatcgacgtcgaacatgcggtcttttacctcgggcacaacttttgtgatgcgaagcggatactttttaccctgatagttgacagtagcaggcagtccggtggtaatgcggtcgatgtagtattcgctcaatgaagtatggatcttatattgatcgagtactttgatttcggcgatactttcactggagcccacctgctgtcctggagtaactttcacaaagctcagctgtccgctgataggtgcttttactaccagattgcccagacgctctgtggcccgttcatacttcttacgctcccgctccatatcggttcgtatcagatctttgcggatgatggtcacggccgaatcgtggcgaagaccttcgcgttgcagttcggcattcttcaccttgtaattgtattcgtcttccgacacttcgagttgtgctttactcttgatgcccatgcggaattcttctttgtccaacgtgaaactttttttcaggcgtgccagttcgtaattggtttccagcgtctgttgtttcaggctcaggcttttctgttccatttcgatttctttctcctgataagtgatgcgttgcttctcccagtcgtcccgctggtcttcgatgctacgtagcaagtccagattcgagagggtcagaatcgtatctcctttctggagcaaactgccttcctcggctatgatacgctctacgcttcccgcttcacgggtgtttactttaatggtaagaataggctgtatcaatccttccacatcgacgtattccataaacttgtcatctttgacttcggctatctgtatgttttccgactcgatgcggagcttgcgcggcccggccgacaaaatgatgacgtaaacaaggaaagcgacaaatgcaattcctccggctatgtagaatttatagcggatgtaccagggtttcttttcaattttaatatccatattattttgttttttcgatttgcagtttataattccggtcagtctatcagcaggtcataattctcggtaagcggcgttttgccttcaaagtcgaaaagagtaaggctgcgcaacgtgtaatacagactccagtagttgtaaagagccgttatgtagttgcggcgtgcctggtccttctcggtgatggaagcgtttagatcgagaatggtagacttgcccagcagataaagtttgcgggccacgtcgctgcgtcgttgagctgtttcatcggttcgcgcggctattctgacccgctgggcctgaagattaaattgtttcaccagtttgcgtatgtttagttcgaaatcggtcttgtcttgttccacctgtgtgtacacaaggtcgcggttggagcgtgccacgcgcactttgcccttgccccgtccccagtcgaggatgggtagtgctacactcaggctgacgtactgctggtccaatggcctcttgtaggcgcttcccagcttgtcggcagtttgtgtcaggccgaaacgcagataaatatccgctttcagtccggcattggcacgggcgtacgacacgttgctttcgctctccagtttccggcgtatcatgttttgtatttccggactgttttcgttggccagtaataaggcttcgtgcagttctacactgaagttgggtacgtggtcattgattttcaccttgagttcctcgtcactctgaatgcccagatacgagcgtagctcctgcatgcagttgtccatctcgatacgggcattcattcggttggtttcttcggtcagtttgttcagttccagttgcagcatttcgttttcggtgatggtaccgatgttgtagcgtccctgggcatattgatagagtgtgtctgcgttagcgtaattggtagtggcggtttcgtaattgctctgtgcggtggcaaggttaaagaatttttgagtagcacgcgtggctaccagttccagtgtttctacatacgatttctttgcttcccggtagcggaccggttcgatgcggcgatcccacttcaggctgttatatccgaagagcgactgacgatagcctatattaataggtgaagtctgccaggctgtcgtgtggtcgctgaagatatccattcgttgtgctgccgtttccacaaacagtgaaccgccggtccatggaatgttctgtgttaaattcagagtaaggtcggtgctgagcatgttttgttctacaaacttcacggttccgtctcccagtgttaccttattgatagcccggttcaggttcgggtccgaggtcaggctcaaggcaggcagatagttcgccctgtaatatttatagttccagtaggctgagcggaaactgtggcgtgcggtttgtgcgtcgggtgactgaagcttggcaagctttacggtttcgtccagcgagagctccatcgtgcgttcctgtgcagttgccggaaagatataactgcatccggcaatgataagtatcgttttcaagttcattgtgcatttctttttctataaaccattcaaaagccgtgccatacgtgtaatattttgtttattagtagtttgcatctttattccctattgctttcgtgtgcatatacgcacaaaaatagtgcgaattagcacacacaacacatggatataatatgtacctttgccctcaggctaaaggtaagtgaatatatccggcttactttagcatcattacatggtaagataagatgtacgagatgtataaccggtacacgacgagttgtacaactggtgcatgacgagatgtacaactggtacacaacgagttgtacaactggtatatcctatcctttaaaggaaagtaaattagctcgtaatataacatggaacagcttggaaaaatattaattgtagacgataacgaggatgtgttgttcgccctcaatctattgctcgaaccttatactgaaaagattaaggtggctactactcccgatcgcatcgaacacttcatgactacgttcggtccggacatcattttgctcgatatgaacttcagtcgtgatgccatcagtgggcaggaaggatttgagagtctggaacagattctgaagatcgatccgcaggccattgtgatttttatgacggcttatgccgatacggacaaggctgtgcgtgccatcaaagcaggtgcaacggactttatccccaaaccatgggaaaaagagaaactgctggctacactctcttcgggcatgaaactccggcagtcacgtcatgaagtgaatatgctgaaggagcaggtagaagtgctgagcggacagggtggacccgaaaatgagattatcggtgaatcggaggctatgcaagaggtgttttcaaccatcaacaagttaagcgagacggatgccaatatcctgattctgggtgaaaacggtaccggaaaagatgtgattgcccgcttgctgtaccgttgttctccccgatacggtaaaccgtttgtaacgatcgacctgggcagtattcccgaacagttgttcgaaagcgaattattcggatacgagaaaggtgctttcaccgacgcacgcaaagcaaaggcgggacgcatggaagtggcgacagggggtactctgtttctggatgaaataggtaacctttcgctccctatgcaatcgaaactgctcactgcgatagagaaaaggcagatcagccggttaggctctactcagtcggtacctatcgatgtccgcctgatctgtgcgacgaatgccgatatcagggcaatggtggatgaaggtaacttccgtcaggatctgctctatcgcatcaatacgatagaaattcatattcctcctctacgggagcgtggtaacgatgtcattctgctggccgagttctttttagagcgctatgcccgcaaatataagaaggagatgcacgggctgacgcgcgaggcaaagaataagttactgaagtataattggccgggcaatgtacgcgagttgcaacataccatagagcgtgccgtgattttgggtgacggctccctgctgaagcctgagaactttcttttccactcttctgtccggcaaaagaaagaggaagaggtactcaatctggaattgctggaacggcaagcggtagagaaagccatgcggctgagcgaggggaacatcacccgggcagccgagtatcttggcatcacccgttttgctctttatcgtaaacttgaaaaactgggcttatgaaacgctattccatcagtgtggtgctgcacattctattgttggtggtgctctccatcggaggatacttgctgttctgttacgaattatggttcagcactctgattgtgggcatcctgctgatcgctacaggcgttcatctctattccatccagatgaaattggcaggtatgatgagacgactgacagactgcatccgcttcaatgacatgacgcagaactttcagccgccgtttaaaagcaagatgatggttgaactggcagacgaactttctcagacgcttaggttgttccgtggacgcctgctcgaggaagagatcaagcaccagtattacgagaaccttttaaataaggtagatacggctgtggtggtgactgaccgttcgggccgggtggaatggatgaaccgtgcggccgtggcactggtcggacaagaatcccggttgcctcaggagtggctgaccacctcctggaacgagacgcaggtggtacgtatccggcagcaaggagcctcggtagagatggcggtatcatgtactttgtttgccgcacaaaataaggaaaggctgttggtcagcctgaaaaacatccattcggtattggaacgtaacgagatggaagcctggcaaaagttgatacgggtattgacccatgaaataatgaactctatcactcctatcatttcattatccgaaacattgagtgaacgcggaatacccgaacggctcagtgagaaagaatacggagtgatgttgcaagccatgcagaccatccatcggagaagtaaagggctgctcggttttgtggaaaactaccgtcggttgactcgtatccccactcctgcccgcacattggtagcggtggacgaactcttttccgacctaaggaaactcttccctgattcgttcattcattttgcggcaacacacaggggggccactctgtacattgatcgtgcccagatagagcaggtgctgatcaatctgattaaaaatgccaaagagtcctgcggacaaaatactgcaccgcagatagaagtagagttggaacaggtccccggaaaagtttgcagtctcacggtgcgtgacaacggcgaaggcattcttccggaagtgatagacaaagtatttgttccgttctttacgaccaagccatcggggtccggcatcggacttagtttatgtaagcagatcatgaatctgcatggcggcaccattacagtctcctcagagatagggaaaggaagctgctttacactgatgtttccgggaagataggggctgttaacccctatccaatccgctcatgtccggattgagttcttttactgcgtcgcgcacttctttcttggtggcttcgctgtaggttccggtttgctgtacgggaactttgtctttaagcactttttcagcctttttttgttcttctgatgaagttttctctttttcggtattcataagtccgatctcctttcttttattaataatgatataaacgccattacagatggttggttcactatgttttagttattttctgtttctaattctttgatttctttgttgaggaacaccgataatatggttcttacgacgacaatacctcccagaataatcagttcgttcattgtaggttccaataccgttttcaatatgtccgaagcgataaggaactccaaccccaatagcaggtaagtgccgaacacggctctcaactttcggatattggtcggggtgtaagctccggttattctcttcagttcattgataatgaaagaaataatggcaataagcgcgccataagttacgattagcaaactgatgacgctgatgatagtagcaagtagatttaaaaattgtgtaagcataagagttgttatttgggtagtggataaagtgggttacctgtttcgtctatttcggtccagtcctttacgctgacagagggaatggaaacagaactgtctataaacaaggctatgccggcaagggcaataagccgtatcggtttgggagttttcaatctcatgacattcgtttttaatggtgatatttctgtattatacatttgaaacggcatttagttcactgctttcggaaatataacttgaaataccgctttaaaatctatctaatagtatcaaacttcattaacacggagaactttttctattttttattgtctttatagcataataataaaatgtagaacatatggcaaaagtaattaacagagatgtacctatcgcagaagagaataccactcttaccggccagccggcaacaaatatgtatgacgattggagtgaagagatggaagaccgtgcagacaatgtgtatgatgataccaaaaagaaatctgccggaaacaaaaagtcaaaagagaagaagctcaaggagatagatgaagtagtaaaagaggatcttgagtaactgttctctgtcgtttgtttggtaaaagagtcccgattccatcagaaccgggacttttttaatgagtaatcctctttttttatttcatattcaaatatatgacggacagggtgttaaaaaataaatatcaaaaaaacgttcctccactattgtatattaaaaaatagtccctatctttgcaccgcttttgaaaggaacttccctataaaacggggtgtagcgcagtccggttagcgcacctgctttgggagcagggggtcgtgggttcgaatcccgctaccccgacaaagaaaaaggaagttctctttttttacaagtatttcggggtgtagcgcagtccggttagcgcaccagctttgggagctgggggtcgtgggttcgaatcccgctaccccgacaaagaaaaatgctgatatttaagttttagaacttgattattggcatttttttttctgctaatagtcattaaaaaaaaagagtttaattgcattatttggatgaattttgggcatttcggatgccgaatcatgcaaaaatcatgcaaatcttgagtatttattatggcttctattaaattgtatttcgacaaacgtgtgaataggaaagatggaaagtttcctcttaaaattaatgtcacacacaaaaggcagcaggccttaatcaatcttggtgttttattatctccagatcagtgggattccacaaaaggaaaggtgatcaatggtcctaacaagtcattccttaatggctatatctcccagcgagtgcattgtgctgaaacggaattattgaatttaaggattgccggaaagttggacttaatgacaggaaaacagctcaaggagcatcttcaacgaatattattgaggggaaaattagaggagaaacaggaagaaactggatgttcttttgtgcagtattatacaaggtttgtggaaggaaagaaaaatccccaaacgaaggcagtctaccaatatacacttgatcgcatatgtcgttttgtggatgtaccagataagtttagatttgaagatgtgacctatgcttggctaaagagttttgagattcatctttcagagacctctaaagttaactcgattagtattcacatgagaaatatccgagctgtatttaatgatgctcttaatactgaaactatttcatgttatccatttaggagatttaaaataaaacaagaggcaactgcaaaaagggcattgactccagaggaacttgtgactctaagagattatccttgcgaagagcatcagaagcaatatgttgatatttttatgttaattttctatcttgtaggcataaatactgttgatttatgtcgtttggagaaaattagaaacggcagaattgaatatcgaagggctaagactaagaaaatatacaatataaaagtagaacccgaagcagccgagataatcgaacgatacaaaggaagtaagtatttacttaatattcttgagcgttacaagaattataaagattacgctcacagacttaatgaaaacctccaagagatcggaagtgttgaactagtagaaaaggtgattaatggtaaaagaagacgagtaaaaaaacgctttcccttatttccagagctaacggtttattgggcgcgtcatacatgggcgacaatagcacataaaataggagtgtcaaaagatgttatttcattggcccttggtcatgaatttgggtgtaaaactacaagtatttatatcgattatgatatggagaaagtggacaaagccaaccgacaggtgcttgattatttagagaacttgaaatgaaatactgttgaagaaaagaataatattgcctacgtttcccaacgtaggcaatatatactgaatactaagcatgagagtttttttagtccttgctctaagaaatagatttttaactaaacttcgcttcatgcgatgtagtggagaggggatatatatatttgaagcaaactcccctctctttggttgatacacactggatttataatagagggataagtcttgtttcacaacaatctaataaattattacttgcgtgttcccggccatctattcacattcaaacagcccaatggtcatgttggtgttattaattatattgcctgcgtttcgcaacgtaggcaatacactgtacaattttgtttagcgtaaaaaacatcttcgcttcttcattttgtagaagcagtaccaacaattataaaattatactatgcaaaagtgaaaaatgtaatatcatacatttactatatacagaaatctctttttctgttttcctatcttttacactaactaaacataatcgagtgttccgtttcccaacgaaatattaaccgatgcaaatataatattatataattaaaacataatatatacttgggtaaaaatacacctttttagaaaattttatttaggattttcctgttttaaagatatgcactttttcaaggaatggggagtaccaataaatagtgattagcacgcgctctttaagttagcaaagggagatctgagacacgggaaggataaatctttaggtgaggatatgaaaacaaaatcccgcctcttatcactaagaagcgggatagaataaaaagattactatttatgaatagctttctcgagaatgaccgatagtgcaagaggggtaatattaagccattcccatataaaacaaactaccttccgcgtttctcaacgaggattttgtggcaaataatttaatgaaagattttttagaaaaaagtgtacatataaattataattcgctttaaacctacttttttaattcctgcttcttatcactaagaagcaggacactattaacacatttacgcttggagaaggtactaatcactgttttgccttcaagaggtatttattcccctctttttcgtacttaaagattaaaaaaagaaattgatttcgtcacatagtgaatgaaatgctttccttagcaatctttttcattcacaggttcccctttttcattcaacaatacagttatctcttcagttgattggtcttctttgattgctgttacaattatcttgtaaacctttccgttttctttttcagcaacgaaagcctctttaactatagttccttcgtaatccttggacaaagtactcttgactacttgcggaagctctttgacagtaatctttgtgaatttgtcttgagatgtttgttgattctgttccatagcggggagcttaaccggttcttgtgcaaacgctactgcgctgcccatccccataaccattgtcaatgctactaatactttcttcataattacatttttagtatggataattaaaactaactttatctatcaaagagcaaggtgtatgccaaagtcttataataagtataatatgctgataaatagattattatataatatgactaaaaaaaggattgtagaaaaagtgtagaatcgctatacatattgtggcataattccccaaaatcaccttgtgtatttcagtagatgaccttgtatattcgataaataacgggacttttatctatagggaaactaccatatccattgaagtaagttattaaataggggtaatgattttccaaaacaaaccccgcctcttatcactaagtggcggggatacatataaaaatttaacttaaacactgagtggggatcatttattagtgaagagatatgtatcccctagtgtagattggagatttttcttctccttttctataaaatataagcaactcccgcgtttcacaacgaagtgtttttatggcgaataaatatatttttgcacaaaagtatttcattaatacattcctgcatactattattggttaaaaaagttaaactatggagaactctactttaatttacctataattaggtattctccgttgtatctcatttatattttgtcgtaatacctcataaatgcaaagtgttttcttctttcgagataccctgcttctacctcttttaccttagcctccatctccatggccgacgacatatatgccctatggccggctctgcccggatctgtcattccttgactccaaaaataccatacgaaacttatgaaccactctgccagataaagtatatagaaactcaaagggcataaggtcagcatccatggagtaaacaggatagccggtaaaacagggagtataaaacactcaaaatactgtttttgatgtatttgctcatgtcggatcaatgcaggcggacattcttctttccttcttttagtcaggataatgccaaataacatgattgtcgaataccccggaaacagcatgcgttttgcaagccggctgttataaataataagtttcatgtcgatgtaattttaatggttgccgcaaagttcgcatactcttttcagggcgtaaaggacatcctagttcttacggaacttggaaaacacctcggacggggagtgaaagcaaagcgaattaaaaacagtagaaatcatttaataaattacgattagtatggcaaaagcaagttggtgcaatgtaagccccatgtcaggaagtgagaacgggactttaacaatcagtgcggcagcacatgccggacgggaggcccgcagtacgacagtgaccgtcacggctaaaaacggaacgaagccctcggccagtatagcggtatcacaagccggcgtaggagtgcaattaacgatggatacctctaaaccggatttacccggagaaggagggtctgtcactattaacgggaactctaacagcccgacattgaaaatatcggttcctctgattaactttccgggggttaccgcttccgcaaaattcaatgctccgggaattactgacaaagtgcttgccgcctcagagacggttactatcccaggagaccccggagcgaacggttcttatgcgttttccatcaaactggaaatagcccgcaatccgttgcccacaccgttagctcctaatgttgacgtgactgatagtgcaggaaaaatggtaaggtgccaatttaaatgggcagcgggagcatctgctctttcggtgaacaagtcctcgctatcgcttgtgaatgcagggacaggacaaacggtagacgttacctccaatgacgaatgggcagtatcataagaaaaaaggataggttgcgatttagacgtttcctatcctttctctttatatccgattaagagacgttccaatcatcattggaagtaacatttacggtttgcccggttccaccgttaaccaatgacaaagaggacttgttcactgaaagagaagacgcacccgctttccaagtgaaagtacattgtttagctgaattggtatcatccgtcagcctaaaagtcactacagcgtcaaccggaaacatcgaagcgggaaaagttaatgtcgccacaaagttaaaacgccccgatgctccggggtcccccggaatagccacattatttcctatattcccaccgtttaccgccacttttacataattatcgtctataggcatatctactcccataactcttgcggtacaggtccactttaattttgaactattagacgttccgtttatgttaacgactcctccggaagagggaaggtccggtttgcttgtatccatggttgtggatacccctgcacctgcctgagataccgctatactggctgagggtctcgttccgtttgccgctgttacggtaactactgtatttcgtgctacacgtcctgtgtgagcacccgcactgattgtcaaaacgccatctctcttgcctgacatggggcttacattgcaccaacttgcttttgccataattgtaatttattaaatgatttatttctactgttttgattcgctttgcttttactccccgtccggggtattttccaagttccgtaagaactaggaatcaaaccacctcccacatgatatttgattcgacccgtaccctgacctgccctccttctgagggtatttccacctccccgggcagaagttcgatgaaaggcggggcgttctccccgtccatgtccggggtgtaattggattcccgctcggcaacctcgatatcgagcaccagggatgtcggctccttcatgggttcttcataaccgtactcttcgcaagttaccagtacacgccttcgggcggttccgttaagcagccggatatcatccgaggagagcaggtcctgaatgaatttcagctctgtttttctcttgaatcctgtattcagcttcattttttgcaggaggtcgggccttggacgtccggttatataatcaccgccctcttcatcgaatgtccggtagttttcatcatccccccggtcaagggagcaaatcattttccccggcatttctatcacttcatagcatcccaaagagtttctgaagagaaatgacagtccgttttctgacacttccccgggtgtgaaagagatgtcaaaggcttcttcggccggcaccaatacccggatgaatgacacgatctggttatacctgtggaaaaactcccgccggatccgccctatgtttaaagcataaacttctccggctgtcccttcaggcagttttattctgtttccatattcggattccacctgtatccttttgtccggatgaatgaagatcaggggggagacttcggtttcccttatcgcaatatgcttcccgcgggtccgcgtggtaaagaggaattgcgatgaataatccctgagccggttcaggataaagtccgttcccctgccggccatttcccttgccgcctgtttgctgatccccccgcatatcaccttgccggtgagtgtccgggtctcccgcccttttacctcgagcgtgtaaccggccataaaaccggatacgggcaggatcagatcctccgagtcctccaagggtccggaagtaacgaagggctgcaagatttcggcaatgtcgaaatggatcctgtcgccaaaaggtacgtaggaggctgaaaacacctcctgtgctccaaccctgagacggatttcaatttcggcctccccggaggtttttacctcaaaggcgatagggtttgccacaaaggcgatctctccggtttttctgataatctcgaaactcatacgcacttatgaatgatcgtgttattaatggatagcggccgcgttcgggtattctcaagcagaaaggatcgcctttccacgccgggggttgtcataaaccggtaaaagtcctccggggtcttgtcagccccgtatctttggcggtaaatcccgtaaagctcccgtgtattttccagggagggcgccgtcactatcttattttgattttttgtttccatgctgcaaaaatgaccgtttggcgcggtagtttaaaggacaggatttatatctttacggcaatgactcccgccctgtagtttacaacctcctcctgtgtaagccccggtggatacggtctgtatttgagcttccccttataggtgtacatgatcttccttctgtcggcaacatcctgcaaggatggtggcgggtacatgtcgaaatcaccctcttccggcctggtcagcacctcttttgccacgacatcgaccctgatgatccccggctgctcccgcaactcctgcaccctgagttccatatccctgtcgaaataggtaaagaccttccatgtcgcctgctgcggagtcatcggcaccaattcctgctccttgtccaggtcgtagggctgcaaaagtttaagggaacgcagtttcacctggcaagggcgtcctttgcgcagcggaagcgcgtacttgaggctttcgaccatcatcctttgtccgtgcagcatgacgggccgggaagtgtccagcttcagcagtccggccctgtccgggttcatctgtaccgcatagacatgatcggcatgcctcaggaccgcgtcgtactctttaaagaaccggttaaacgccccgtcctctcccctgaaaaccagtgaatacctgtaaacattccccccggggtcctgaaaatattcgcctttgggctcccggcagagtgagctgccgaaataatactcctccacaagggccccggcccctataatctgattggttttccccatggcgaagcagaaagccaggggtgtctgcttcttctccccctgctccttggcggcccctctgagggttgtgttgatgttgaccgcccccgccagatatccgggagtcagcagccccgttttaaatgccatggggacacattcgtcctttcccgttatctccaggtattccacaccgggggtgcccttgtcccatgggaaaaagtcgctggatatccacttctttttcttgttcacgatgtcccgcttgtaatatcttccggtggaaggctggtaggttatgtacagttcgtcgggcacgtcccggtcccctgtaaattccgtaatgatccccccataaggcttaaggaatttctcaaaggagtccgccgccggttcggcttccttgaacgatgtgcccgccgagagcttgagctgctttgcgggcgtgtagcttatttccggttccgaggccttgagcggtgtccagtcggcggatgccgttgcgcctatcgaatccttgagcaggcgtatgacggctttccggccggcatttacgtaaaccttggccccggtacggcaaaacagcgcgtccaggaactcgttgacggtacagtccggcatcaaattcctgtagtcgatctctccggtgacaatggtgtccgccacattgttgagcacgaccatcttgctgagctggtaatcggtggcaaagggattctccaccaatgtaaagccgtatgccgagaatatcatctccaatatgcgggataccttcaggaacggcgatatcccgtatcctgcgggaacctttacatctacggcctggcccgatatgacaaccctctcggtccgtgcttccttcagcagggcgtatgtcttcccgtccgaccctatggggttgatgaactccggatactccgtctcttccagggtttcagacgccacctgtatgcggaacacgtgataatccgccggggtttggtagcgcatcacttcctccaggtgacgggcaagggctgcgacgccttccgggtatttgatgaccggcagtcccggaagttccttgagtgaaacgtttttccaggcttcatacatcaggctttcgtcaaacccgatattgcatacgatgcccgactccgttgacacggaggtgatattgagttttcctgtccgccggtaaaccccgtcggtcaccaccgccgcggcgtcccgctttggcgcattgcggatatccggccggtggatgtaatccaccatcgaaagattgtgcccggttgccggcaacgtcgatgcgatcgtctggctgcccttgtcggtgtatatgggcgacgtgttctctatctccacgctgaaatcccggggaaggtcgaatatccctttctctgtctgaatggttaatgccatactggttgtattattggtctgttcttgtaaatggtttctctgaactcttctgtaaatcctgagccgcgttgatgtcgctcagcaggacgtaactttttgccggccgggagaggttccttgaggccctttccaatttctccgccgcccggttcagacggtcgatgtcctgtccggggcgctctctctccgtgaccttccctccctcgtagtacccgggccatggattggccgatgtccggttgcggcgtatgctttcgatgacctttaccatgttgaccacccgcttgttcttcatttccggcaccggaatgacgtactctcccctgtggacgacgcccgccacctcgtagcggtctccgtccccggtgtaccccccctggtcatatcccccggaagcgttcaccaccctttcggcgcttacgggtgtggagccggacgctccggagagcgtcatgctctttaccttttgtctttcagcattggccgctgccagctgggcggccccggttactcccatcagtgctgccgccaccggtcctgcgatcggtcccagttgcgagagcgctttcatgatggccacggccgtgtcggcaatgatctggctggcttttacggcaaactgcacgtcggcgtatttcttctcgatctccagcttcttctgcgccttctccgtttccaggcgttcgacctcctgcgcgtttccctgtgccgcggcgatctcggcgtcatatttggcctccatgttcgcgatctcggcgttttgcagggccgagacagcgcctgaaaacaggttggaataataatcgaaagcctctttccagaactgtatcttgagcatcttttcggcctttgcatatgcttcggcacctatcaacccctgttccttctcccgcttgagggccgccatctgcatggcatagcgttgctggaatccgagcagcccgtacttctccaaaatcccgtttctgcgctcttcagcaccccgggttatgttcagttttgcggtgctgtacgcttcttccagctccctttcctgccgggcggcctgatcctttgtgacaagctcgtttttgagcgcattgcggatcagttccagccgggcctggtatgacgcttccagcaccttgagctgaaggtccgtttcatccggcagattgaaaaggttgaactcttttttgaaagaggaaagcatggtttcgatcgccttttgctgcgcggccctgtctttggcgttggccagctccgcctccaataccttttgcccggagagtttgacggcctgtattttcacatcccccgtctgtagctccagggcttccacatccttccggtattccttcaggataccgagtctttcccgggaattggactcctccaggctcaacagcaacatatcgcgctgctgctgcgtaatatgcaggtttgcataattcaattctatctgtgccctggcggccttgtacgtatcctcctgtatggccagttttttatcccgctgttcctgtagcagggcaacctcgttttcatccagtttccgctgtaactccagtattttggcggagctttccgtcatttttgcccggatgccggccagctgcctgagtctggtccgggcggtctttttctccagcccttcgaggatacctagcctttgggtgtgaaaccttatgtcttccgccagcacggccttattgtattgcgcctgtgtctgctgctgcctctccttgttttcccggatcttgagcagctccttttcatgcctctcattcagggccgagaggaccttgtcggtctgcgaggcgaatccgtccgggatttcccggatagtccccagctgctgcaacgctttaagctcctcgttcaactgttggagtttccggtttttggcggccagcagggccggcgtcgaggcgacttcccgctcagcctgggcaatctcttcctttttggcctggataaggtccttggtttttgcctcggattgggtatcgaccttaatgatatcctgctgtgaggccgtgatctcctgcgtaagtttcttttcttcctggttcaaggcttgtatttgatcgaattcccttgcaaaatagtcatggatgaccccctccgaccaggtgtcggaatacccctttaccgctacggacaaagaattgaaccctttggcgagccccagtttgaaactgtcccagagattccggtttgcatggatatccttacgttgttcctccagtgcccttttttctttctggatctcctccagccttgagtttgccgagcgtatcctggccatggacaacaggttgtccgtgtagtccttcactgcggccgtggcttccctggtgttgattgtttccagcctgagaccgccaaggtattcctcacttaaggcgttgagcctttttatagcctccatccgctgctccttgcttattttctcgttgcgtgcgattcccaggagggtattcagttcccgggtttcggtggctacggtgtcggcggcctgcgcccgcacccggtgcaggctccgctccgctttttccgtcgccgtaagttccctgcgataagacaccagcttgtatgtcagggcggcgaccacggtggccactatggccagcgggcttattttggtgattgcataaaaagcctgcatggcaatccgggccttgttgatattcccggtaagcaccgccttggcggcggcaaacagataagtggatgcggtgcatgcctttaccaggatgttgttggacgccaccgaggcattatacattttcatggcggcagcgcttctgaggatgtttcctctctgcatggccacaaccgaggcgtaggccaggctgaccgccttgcccagcattaaaagcccgttccatgttttttgcagaagaataaccgttttataaaccagaataaaaccggtaaccacggagataagcgtaatgatgctttttttatgttccaatacccggagcgccacatctgaaaaaccgagcttgagagactggaagagaccgctccatttttcttgcaggggaagcaggagccttccgatttccatctgcctgttttgcagctccgcggctttttgagcggccttgtccgcagccgacacgtaattctcccccgcttgcgcgagttgcctgtccacgattgcagccaccgctgccatcagatcccccgttttggccatctcctcgttgacctccgcggccgacaggcctaagttgtcgagtatcagcagtgatttacgacccagtccggttatgatcgagtcagtcagataatccacgctctgtccggtctgctgtgcttttaaccgggcaaactgcaagtatttccccaggtcctcgagcgggatacgaaagtctttggcgcgtaccgcggcctgcatgagctccaggtcattcaccgtatctttagtggctttcctgagctccgaaagtatccccgggcggtcgagtttgtcaaaagcgcgcctgacaccgtcggcgtttgccgccagtctgataccttcggacatccaggacctggcctccgagatgctgtttgcaaagaaggagccggcactggcacctataccggcgaaaaaaccgactaccgcggatttcatcctggtaaggctgaaaaatgactctttcaccgcctcggctttgggccttagctgctccatcgcctccttggtctttgccagttccgcctccagacgggcgtactcttggggttgtaacgattttaccgtattgtccaattccctgcgaagctgtctggcctgttttgagagctgggcatacgatttgtcggcgttgttcagacggctttcgagcaggcggagcttctccccgttttccgagatggtacggttgttggccttgagttgcgcattcagttccttatactccttgctctggagttttccctgcatggcaagattttccatggaggatttcaggcgcacgttctccgccttgagctctttggtgttgttgcgcaccttcagcatctccttctgcaacccgtccgcattgaccgaaagcgtccaggtgatataatccggttgtaattttcccataacgttatttttaaggacaaaaataggcgggccgtctcccggacaaaaggacaatgtgtctttaggaatccgtacgtatttccattctttggaaagcttcctgtaatccggcataaatacggtcgcggacctccttgccatatccgtattttatggtctggagcgaattgttccagaggattccccatacctggcggttatagatgccatagtttccatgtttcttcatatccaggaagcggatatagagggggatgttggaagtggcgaccaccccccgcccggaaaacctgacgctgtaaacggggttgcgtaaggcgctgagcagccggccggtagtaccccgcaccaggcgtccatacccctgttcccggacaaggctccgcccctgtccgacctgagtcggatagatggcagaggtatacaccctttcggtggcgatcaggtattgcgcctcgaaaatggcccggatatccctttcgatattctcccggacaaactcttgttttatcagatcctcgttcatggcgtttcgaattcaaatcccaggctccatccggcaaagaccgaataaaatcccgcttcgggaatggtggataagctcgacaggtccagacgggagagcaggtgacatcccgcagccttgtcatcgatcatctgcgctttcatcttctccatgacgggctgcaactcctttaacacctgataagtccccttacgctgcggatcggtcttgtccatcaggaacgctacgcaaaggtttaattccaacaggttgtccacatccggggattttcctttggcgcttgggatgatgagtagcagcgccggtagttcgtccgctttaagcccttggaccaaagcgcccatgtcggggtcgaaggtgacaggcaccaccttctttatttgcggaatcctctccgttatacccgaccaatactcttcatattgctgtaaatctaccatagctgaacagttttagagttttaatacctgttttctgtttttgcctgtgcggaatgacacatgcacccaggagaaatccttctcgtcgatcagctggtcgaaaggcagttccttgcggatgatctcgaaaagccggcggtttccctccttgctgcctacggtaatatcggcggcctgacccagtaggtgctggctggaggtcgccccgttcacgcttctgttcagcacagcgctccggtaaccggaacttacccggatgggcttcccgtacttttcacggagcgggtcgaggacgttttccaccagctctgtcaggttgtgaaccacctcccccgtaggggtattgtcaatcccgcgcgccacggccgtatcgctgtggcttaattccttgattgtaaaatacttcattgcttcttattgttatgtaacatttcaaacctgcatttataaatgtatagcatcacatcccagaaaggggtgtcgtttacctgtctgaaatcaccgaaaacacccgatgcggccacgtcgtacgagattcccacccagccggtattgtcccctgcattcccccgcccggatttctcgaacaggatcgagaagtcgatgtccttcccgttggttgaaatggggacactgtaaatcagctcccagaccgcgagaaagaagatgtatgcgtggaagcagaccgggaaaggaggagtgccggtttcctgagggccctgtttcttataaagcagtctgcctatggaagatatcagttcccctatatcttcttcatttccctgctcccgggcgcgctccatttccgccatcacccccatgcactcgataaactgtccgaaagtaatccccgagagcatatcccccgggcctttccactccttataggcgggcagcaggttccggccagttttcaggcgggcgtcgtaaaccgtcatcccgtcctgcgaggtgatatcgaagaacccgtccagggcggggagttgcgccaaaagttcttcctgtatttctccccggcacagaagaaggctgtgcttcatccccagaaggcaggaaagcaacttgcagcgcatctggaaaggagaaatctcccctgcgttcatcattaataccaactccaggtaacggtaatactccttgggtgataattcctccagggagtctggaatctctttcttttgattgctgtatgtaatttctttcatagtcagaatgttatgccttttgattgaagggtgatcgagggtacatacagatccggttcgtccggtgcggcgtcgagcgccgcgaccaggtcctccagcgcggcaagatcccgcatggcatcctgttccaggctttttgccactgtcttgcgcgcttcggcttccgccctgagcttttcacggacgcttcctgcaagctgcacctgcaccacaccgtcgggcaggacctccacgggcaaacgttccacggccttgctcatggacagcagggccagcggccggcagacggcgtcgcggaacccctctgccacctgctggcccgctaccagcttttcataacggccgtacgtgattatcgggatgatatgcctctgttgcacctcccggatgatgggtgccagggtcagaaacagccggtggctgccggttacatagtaaaaatcaaatgcctccttgctactcaggagcaattccgatacagccttccttttggggctttgtatccagaaatcgaacttttcctgctccagatatgctatcagggcatctaccgactcgtaggcctgactcaggatgttggcttcatccttgtactcctgtaaggccgtcagccctttttcgtgctcccccaggcgcttctgcctgcctgtgttcccatgctgcgcatccagtgtggggatgattttcagccaggtaaacagcgctacggactgctgcaccattcccaacaggcgggtgagcttgccatccggatcgacgcttgccgattggtagaagtcgagaaccttgtcataaacctcctgccctatgatggcactcaggcgacgtacgcttaaaggtatgtacggtttccatttggagaagtccgtgcgggcatcgatcagacccagggcgtcgaccagttcctgcgtgccgtttgaatctttatcaaatatcagtttcatcttttttatcacttttttcagattgcattaaaaaataccgcatataaatacatgactctttctgcgtttaggattatttcgtatcttagccccgcccaattaatatcataacacgaatcccttttcattgcgtaatccgtaaaatcggattaaaggttcggatgtaccttttgggcacgtagtgataggggttcacccttttggaaatatgccatacgaagaaaaaaacggttatggaatccttctcaatgacggggatacactccctgtcataccggatgtagattatgacattcccaccgaaacaggtggaacggaaagttttggtgatcaaatccggtagacattcccggattcaccggaaaacaaccgtaaggacaaagaccagtacggcaagaaccagccctgccagcatgaagtttatcgatacattgctgagcctggctctttccgcatttttctcgttttgggcatctattttatattgcaggttcatcaactcccctgccatgatataagcgtacttattggcgaatctgttttcttcaaaatacctgcagttctttccgatttggaagttttccggtgatctgcccgccggcatcaccccatgtggcctcataaccttaaccacataccaaagcgatattgcggtgaaaaccacaattgccatgccggcattgatcaatcccatatcccgggttttatctatttgggtgagtacgtacccgaccaccgctatctctaccgcataatatatactgaacagccggtatgccctgtcggtaatcagggactcgatttcctttaaatcggccatccgtttgcccgcttcttcgtgataaagccgtataagatctttgtcaagggtcttcaattggttatagtctataaaaaaacggttcatgtatcctccttttttgtttttatatattttctttcatcctgtttgcgggtgatacactctgttcggattccaccacactccggtaaagccccacctgtgttctgcttcccggataattggcccgtatgtagtgcatcaacggtttgcacaggatcatgtccggtatggccgtctcactggcattgtacaccttgatggagtacagtttttccgaccctgaggacagcttgttgtccatgatcaggtttgagagcaccggatccagtccgaatccggatgtggccgcggcatcggccttgttggcgatcttgatctggctttcgatataatcccttattttcttgtcgatgggggttatcgtccagccctggaagtcattggcgtccgcatcccagaacctggtcgtgtgcatgtatttgcccacattctccctgccggtcactcctgaagcgaacttctccatggcttcatccttgaattcctcgagcattctggccgaataaggcacccccttacgcttgcatatttccctgatcctgtcctctgccgcgtcccaataggcctgcgggctctctatatgcaggctcagtgccgacgcgttggcgttgtaggctgccagcaagggggcgatggtgcccgccagttccagccacgggaaagcccccaggaaacgcggcgtactgatgaaatccctgcaaaaggagtatatgttgaagtagccgaccgacaccggatggcggaacgggtccgccggattgaaaacgggatatttggccagcctgtcggggtcggggaagggccagtcgcccacatatacgttctgtggcaaatcgtgtctgtcatcgggatattcgaagcggcatttcctgtaagggacatgttccagcctgactatccttccatcctctccgatacgcggtccccggttacggatgaactttacccagaacccttgcatgtgcaccaggtccaccaggcagcggagcatatagtcgcggtaatcccaactctccagatccgcctgtatgacgtcatcgagtatccatttgcggtaaaagcggttgttttcggagtcgatggcctcctcaaagaagcgggggccctctccccactgcaatccctgtattttacccatgataccctcaccgccgtagaagttatccagcaggcgttgtacgtcgccgggaaggtcgttattggcacccatgggcacgatatccacacccgcgacccgtatcttgcgggtctgccagctctccgggcggctgaagctgatggaagaaggagaccatccctttcccatggcgaaggagataagctgcccttccccggtatctataaatccggtatttccggttcttctgatttccataatctacacataagttttaattccgttaaaactggtcacaagaatctgccagcaattgatggccctgcccgtatcggtatccaccagaaagagcttataagaggcattctcaatctcttcatccgaagccttcgggcgaagccgggcgtggttgagccttaccgtatccccgccgctgtgtcgctggcggtcatatttgcggaaagagagggaaaatgtctccccttcttgggaaaggcgtttcatccgctcgatggccgtataaacgtttatcctttgaatatccttttccatagcgctttgatttcaggcaaacgtttacatagcatacgcagcaggaggtaagcacccacgatcaggccggccggtaaagcgatgcttcggagcagtgatccgggtgctgtcttccgatcgctccggagctctttcctgttttcctcttcccggtgtgtgcgtagcagcaaggaggaatccgcccgcctgctttggaaggagtagaccgccgcggtggaccccgattcctcatgaagcgcggtcccggtaaaagagatctgtttgacggggggcaatccggtttgtgaggataccggttttccggtgtcgaacataaccacgatccggtcctgccgggcttgccggatgtaccctgccgaatcggtccgcatttcgccttcccgccgctcgaagttacccttgatttccaccaggctgtcggacattatccgtctgtccgttttctcccggaccgacttggagctgccacacccctggaaaagggcgcacaggagcagggcgtataaaacatgtttcatatcactccttttttgaggttccgttaaaatagtccgcaatcgccttggcagcttccgcgggcgtgtctttgtatttggcgatttccacggcaagcagggccacgtcggtgagctccttcttgaccttatcctccgccttttcccgtatgctcttgatctcgatggcggctacaaagaacgcccccgccagggtaacgaacgggaacgtaggaatatggtaatcgtaataactgttgagaaaccagctgcaacccatgtgcatacagtccacaaccaccaatgccagcagcaggttataataaccggccactttctttacgcttctgcgataccggtccgaggtgatcctttcaccgcgctgccgggccttgcgtactccgctgataaaatccagtatggagaaaaccagcggcgtaagaagcaggccgaataaaatacagcccgccacaatcagttctgtcaatcctttcatccttttgttttttaaagcaaatttgcccctttcagggtacaggataaaggacaaagccgacatcatgcaggtcggtatcggatattagccggacaggagcgaaaatacaggtttgaatagatgtgaaaaatgcaacaggcattcttaaaaataataaattgacacatcctaagaggcaacaacggttatatcacacagtaaaaaaagaggctgggaaaaggccatttttaagaggaaaaagctaaattccatcccaaaaacgagattttttttcgttttgccttgatttttgcacgaaattcatttaaagcgtgttaaaaacatcgtttttggacataaaattttggtcttcctttcgttaatttgcttgtaataaacctattaactgtttttacacgcgcaaacacttgcaaagaattccttccgaagaccgcgccgctcagaagccgaaaggcaattgcctgagggacaaatggtgaaatatgattacattaaaagcaggcaggcagaaggggtgggaacaaaaaaccgcttccggtatttccggaagcggtcaggcaaaacaaggcaattgcctttcttatccccccgtcaggtcatcgagtccgggcatgtagggaccggacctgctgcggccggacttgcccctgatggcacgcctccaggccccccgcatcatcaggtacttgaaggcgtcggagaagttcgtggagagcatgggcagtttcttgggctccagcttctcggacttcttgaccttgtagatgatcttctgctgtcccttgtaacggatacccgcaggcgccttctcgatactggagatggtctcgcgacagttcaccgcgtcaacaagcaaagtggggagggcgtcgttgtcgcctgtcatcagctcctgcatgaaatcgtactcttcatcctggcggatattggactgtttgcggctcatcaggttgacaacccatcccgtgcggttaccgtcaccgtctatctcgatggcctgcttgagcttgcgggcgtaatcctctttctgcttctcgaagttattgcccgcccggtcgtaatacaggttcagttccttctcctcatggttaaggaagaatgccaggaactggtcggccagctgcctgaaccatccgggaggaagctcgtaaaagttcttgtgaaggcggtacagcggtccgtcctgctgtcctactatcagggacagctggttaccgaagtccacgccgccgtcgatgggctcgccgcgcctgaggaaacgcagatccaggcagctttccgcaggttctccgtaccgtgtcccgtcggtatacttgtgcctttccccgaaagcgatatagaagcgcgtgtcacggcgaagccccggacgcatccccactacagacttaaggaagtcgtggagttcgagcgctccgtcgagaaggcgacggacgtactcaggcgtaaggatgtcgatgttggtaaaactcgaggcgttgatgaagtaggtctgccccttgcgcatcttcagcagccccgcctcgtaccaggcgattttcttcttaagagccccgcagtccgtccgtgtccttcccgcttttaccaggcggacgcgcaggctgttcagctccgcagccgcctgggcgatacgcaggatgcgctgaggatcgaccagacagacgtaacggaagtaccagtcatactcaccctccagcacgtcgggcatgtcggtggtaatggtcacccccagaaaatagtggctgcatccgtagcgtatggcatccccgcgcaatacgggcatggcccggttgactttattgtcgggggcgtatttggattcgtcgaagaacaaatgaacgaccgatttgcccgccagaagggaggggtggtccagggatcccagaaagataatgcatccgttgaagaaagagaccgtgttcttgtaatcgtcgacgatcacgctgcaacgcctgcgccaggattccggtggccggcaggacgatacatagtgcacaccttcatagagtcccatcagttcccagccggtcttgacggccggcatgatattatcccttaagttggtatatgtattccccacgaaagccaacggcgcaccgggcatgtcatacacgcaatcggccgaacgccgcgcttgtatgacggtactcttggccaggccgcgcccgccgacgacaaccaggttggtggtgtctatccagtcggtgatgaccttgatgatatgggagtaacgaacctccacatcatcggtggggttattgtgcatcctgccctccgaactcttccgcatcttccaacatcctttttttcaggtcgaacttctttatgcgtgcatcctcctttaccctctcacgtaccacggaaggcacctcgggaatggagtcgatgaacgcctccagctccttgcggtccgtatccggaacgcccatatcggaccggtcacatgtatagatcaccacgggtttcctgtctaaaagttcctggggtatctcctgttcgtcacatgcgaagcgcaaccggagcctggccgcccgctcgagtatccgggaggcttcctcccccttgcccgtcaggaacatggaatcggcccacttctccagtttttcggcatagaggttggcaaaagcctgcgggcgtatgttttcctggctgtagaagaaattgacggagtcggcgtatacctgccgtgccatccagtcggaaagcccgtatacctcagacttgagcagccggatgatcccggcttttgtaatcaccttcccgttatacctcatacgggcacgcagtccgcgcaccatctccatcaggtcgtaatacgcccgctgctcctcgggaagcgagtccagatcaccggtggcgaggatacgccctatctgtccgatatccgctttttcaaaatccaccctcgagggcttaacaaaattcgtcttcatcgatttgcttcactattatttcaaaactcctgcggccacgcactttctccagcagttccatggcatccaaatcccctgaaagtgcctgttcttgcagttttagctccactccggccccggccttcaatgctccccggcgcataagggaatacacggtggtcccttcccttccggcgtcaaagacaaagctctccgcatccagccccagataagaggcgatatcgtccggagcatatcccagggaggccatgcgctccacctcctggcggagttcaaggtccaggaaaaaggtgtccgccggcaaacgctccatattattcatataaattcattaaacggttattacaagagaggatctcgttatccagctttcgtgcctgcatgcccgcttcactgcggtcgcagggatgaaggtaacgggtccccattttcagccaggaggcccttttgatttccagcctccggcgatgaaaaatcagtttttttttctggattccatttcagcctccagcagatttttgcgttccgtccatttgagggtcttctccatggccttggccctcttttcttcatccggtgccttttcgagttcgttttttcccttggatatgttagacttggcattacccagctgcttggacagttccaggtccgtcagggaggagatttcctgtttctccctggcctgccgcatggcctgcgcctttccgaggatttctccgttattcttataatactccaactcttcccacatttggcggttctccaggaagttctccacggccgttttagcccaaaggtaagtctccccggtggccacgtcatccggtgtctcgaccagcatgcggtggctttcccgatagaggtcataagcggagaacatgtccgctacgagcaccttgagttcgtccggacagtcaggttgtctcaggaatggaaactcctcccggaagcggatggccttacggacggtttccggtgcctccgagtacttgctttgtgcgttttcgagttcttccttcagaccccgcacctgctccgtatccggactttgggagagccgctcttttacaaaatcgtcgcttaccagtttttccaccgttacccccaggcgtgaggcaagggcgataagcaggtcgtccgcatacatcctgacaggggcagggctgacaggctgttccgccttcgacggaatatggtgcgccttcctgtgcatgccggcaaattccgcctcgctcatgccggaaagcttgcgcagctcctcgataagggttccccttgtcatctcacactccccgagctgccggaacttggccttcagcatacggttgggaccgaactgctcatacagggctaccccttgggagtaatcacgcggtccttctaaataggaaatgatttgctctttcattgaattgaattttaaatgatacgccgtaaagatacccgataccggctgcggtacaaaggactgaaaaaagacaattgccttgccccgtaaagggaaaacaaggcaattgcctgaaagtggaatggtcttgatatcagaccatcatacaatcctaagggcattaaacctcgaatctcgactgctccacacactggatggctcccccgccggcatcgaaggccttgaaagtaatctggctgcccggtgaagcggtgaacgtctttccgtttttcagcatgaaaactgtctgtcctgccttttcgattgtaggagctacgccggacaccaccccgagcagggtgaacaggtcgccgtgtttggcccccttaatggtagcgatcttggccgccccggcgcttagctggtactgcccgcgacctttaaagggaatttccgtagccgatgcgggaacagtcgccaccggctcttcgtgtgggatggtgcctttatagataccgatatcgtctcctttgcttatctgcgtgaaggtgaactccgaggcgttgccatctttatttccggtataattgaccgacatttccaaagggttgcaaggggaacccaggatatccggatcctgcccgttgcagtattgcaggatagctatgcagtggcgtcccagccagttggtcttgaactcacgaacctcctgtttgttacccggatgttttcccttaaccgaaggggtgaagcccttggcatcggtttccccttcaccgttggaactcagctccacagtaccgggagttaaatacaagtccgtggagtaagccgacggctttaccgcgatgtcaccatccagcaccactccggcaccgtcacggggagggaaatagaccagatcgtcgatgtcgatcagggtgagcacgtctttggggttgataccgtttccgggattgcccaccggtctgggaacggaagtcttaacgtaattattcatatatctcgattttttaagtgatgaaaaaccagggggatctcccccctggtgataaattatcagccgcgggccacttcatagaattttccgtcatcagcctttaccagcctgatgaatttccccgtaccaagggtcatctctgaggtaagcacaaagttgcctcccgtagcaatcttgctggcattcttatccccatttccatgaatggtataggtcttgccgggaacagcgtcggtaaaattcgttattgcggtaggagctgtgttggctcccgttacgaagacgtcacctcccttaagcgatggagttgctttatcatccgggaattgcagggctcccgtagctcccgtctcacggcccagttcgatgaatttcccgtcctggcgtttcatcaggcggatcatatcgcctttcttgggttcccaggctgcggagatcaggtcgaatttaccgcttttgtcaatctttacccccttgttcacgcttccgcatttcagggtaatgacacttccgacctcggcattctcaatgtcggtaattgccaaaaggttcgtattgccggccgtcacgatcgaggtatgggagccggccgacggctgggcgtccttgtcagcttccacgaaataggaagccgggcggtcgtactcgttgcagaagatcatctgacgggtatagtccatatcttcctttttagcgtatttgaatccgacggcataagcccacacggactctttccagttactccataccttcagcgtccagtcctgctgctcgatgttgaaccgggtcatttcgccgctctggtgctcgaacaggtgtatgttaccctccatcgtccagaagatgcggtggtggttgtcagcgttgggaaccggtatgagcttcacggacggatactccttcacaaacatgatacccgccttatagtcctggttctggccatagtgcatctcattgtatttatggtaccacacgatcatgtgtgagggcatatacagggccagggaacccgagtcgcgcaggaccgcaggaatcatggaggtgcccaggtagatcttctcaccgatattttcaggagaaagggtacccagttcaaagggttttacctggtaaaccagtttgccgttattgatgtcaatgtgtccgttcaccttcttgttgaggaattcgtacagcccgtcggcagcctccatcgcacgtccgggcttgttcaggtccggttctttacggacgccgttaatacgtcgctgttcgcgttcattgtgcagctttttggcagtctcggccagaatgtactcgatgaacgaccatttgatgacctgcgacccttccttgttataagaaccgatccatgatttttcaagtgccttgaggtctttgaacttatgcgcgaacatgacgctcgacatgcgcagcgtttcattgtcgaactcgtaattgcctttcgttacattgtcgaaatcactggcggtattgtcagcctgggagaactcacccaaccagatgtttgtcagcacggccaggtcctgatatcccgattccagcgggaagatactctcgatggaaggaagcagggtcaggaaagactgtaaacgctcctgccaggggatgcggtagaaggctcccaggtcctctttcaggcgggagtaatcgatcgaactggcagtgggcacttgaacggtcaaccccttgcggtaaagcatctctgcgcgcaggcgctggttataagggcggtccattgcgaacatctcccccgagaggccgcccagttgtttttcgtcatcccaattcataacaatatctttagcgtccggttccagacgtgcatgctgggagcccttccccccgtcctgctccgcaaggccggaaagggcctggatcttggtctgcaaaccggtgatttctgtttgtttggcggatacctcctgtgaaagttcccctttctctttggtaagcacggcgatttcctcctgggccgtaaccagcttggcagtcatatcagccagtaatccttgtattactgcgttggaggtattggggtcaggaccactgcctttcgtgcccgaatccccgtccttgcgggaagaatcctccgggaatccatccttcagggcctcacaaaagccattgataaaggtgtcattgaaattcaatgccttaagtttctgcttttgctcttccagcaacgcgtctttcttgtcggcgtccttactccaggcctcgatacccagaatggcctttacggccggaatgaatgatgcgaaataatttttcataaacaaatttacttttatagtgagtattaaatcatcttgttagcccgctttacggttttctgggcggctacccacaggatggcatcctccaggcttccgtaggcatccacataccccttggccagtgccgtatcggcaaagaaagtctgccctctgaacaggggatcctgcgcgtcatacttcactcccagatttcgggcgatggcctgtgcaaaaagatggtggtaaaacgacaggttctctttaattaaggtgtcatcctgcttttcttccttgtcgcgataggcgcggttcttcaggtccgcactgtcggggtaaatgtcctcgatctcaatccccatttgcgcgtaatactccttgaagctctggaaagtgtagaccaccccgcaggagccgatttcatccatgggcgaggagacgaatctgcgtgcgcatgcggaaacgaaccagaaatgcgccgaagcgcatacgcccgtgatataggccactatgggtttgggggactgccgtataagcttttccaggacatccacacgcgtaatcatacctccgggcccgttcacaaacagaacgacacccgatatgcggtcgttggccatcgcggcggaaatatatctctccagccggtaggtctcccagctatacagcacgccttcacaggtaagcaccactaccgctccttgagggagggaggcgtcatccagttcccatcggccggctacataggggacggcggcataggcctctatacgcttggcccccagatattgttccaccgacgccaggttgccgtttttcagaccgggcaacagaatggaaaggagctggtggtatctcctttcctcaatggcccacttatcgaaaaaaaattgctgaatcttatccacggtttcttttttaatgcaaaagaaaccttttgcaaatcctttagaaaggactgtgataggcctcgatataaacctgcttaccggataacttgcactggtatttgcccgaaacaatggaaaaagtaagtttaagtggtgtttgcgggctgcctgaaacaatacgctctcccgcttcattcgtataaatggccaccaggtcctgaaggctcaaggcagacaacagctcctggctgtccggccctgtcaaggcaacctcgaacgtatgccctacattataatatatagttcctgaatccgcctgctcggattcgactccgggagtgaatgatcccggaataacaggaatgcgataagaaccatcccgcacggcaataaaagcgcgcggcaggatgactgcaaaatcaccgatacactccaccggaaccaactccagatcacaaacgggggtatagggtctttttattgttttcatactgtataacttattgattttcaaatactccgcatttttccgtcaaaaatacgtcaaaattccgtcatttttccgtcaattttacctcctaaaaaggacaattaactacgcttggtaggtgaaatatatgctactttttcttgtagggccgcttaaggctggaacgtcttacccggtcacgccaacgttggtagtctttcaggagcgcgtcctcgcttaagctgtcaatgcagtacttcttcataaagcagtggactgactgaagctggtcgataccgaaccggtgcttgttctcgtcaataaaatcatgaagttcggcgcgcatcatcagctttagcttcttattgatgatcccctggctgcgctggcccaggtagttgaaacgctccggggatttgccaccggggacgtcaccctgcctgcggtccggcaagacgatctcaagattgccattatcccggggacagttaaccgggcgtttttccagcaggttataaaccagatggtaaacatccagatggtccgcaaagcggacgggcatgctgccttccggatcggaagaatatttggcgtagcaatactgagccaggtgcggctctactgttattttcgtggttatcataagttgatggttttgtttttacttgtttcttaatttgatataacccatttcttccagggtctgcagttccttcatatcctccggtctcacatcggcgggagtttcaccgttaatggtcataccctcgggaagcctgaatctgtcacggatccgtcggcgatggtgggcggtggatttcttctgccaatagatgacgacttgcatggtttacaaggaggctttggcctttacacgggcctgatagacattgtaatcacacaggtatctgccgacagattccgccgccgcttccactccgggcggattgtttccgaagagtaagttgatggcattcggatcaccgccccaggccttccataaggctatcgggtcatatcctgatggcagacaggggaaaaactccaaaaaagcattaaagtcggccttggcccgttcacgtttcccggctataccctgtacgcccaacacaataccggcggcaaaatcctccgttctggaaaagcctttttccacagcccgggccatccgctctgtctctttgcgaatgatcacttcacggcgttccttgcagaaatccgatagggcgaccatgaccgcctgattgtttaggctctttccccagacaagctgcccgcaacttccgttcttaaggcgggtaaagaaaatgcagagctcggccaggttcaggaaccagtatcctgaaagtatcgccagcgcggtttccgccatctgctcgcggctcaattcaacgccggcgtacttcagaacggattccagatggcttgtgataatctgaacggatgtcgaattaccgaagaccacacccacatcagccaatgtagggatttctccgtttgcggcgacatcgtaaagtggggcgcccatgttcagttgggcaattgtcccgccccattcatccaccaattgagaggccgtcgatccagtttttaacgagatctggagaggcgtcagctccttctttcggacacagggtttctgtaactgagacgggctcagaaccgcatgcagggtggtttttactagttctacttccatctttttttaatttttcaagttcaatattcaaccagtttgcgaagtgcgacatggcgtccctgggggacttagttgtctctcctccgttttggagcttacggaagaacctgtccagaaattcataaaacagctccgggctgaaatccgggtaatccagacggatgttcatgcaaaactgctccatccacgggatatttgttcgcagttcttgataacattccgttaaagacttgtccagaaaaagatcgattccggatattttcccctcatgcgcgggagagggagggaaaactgttttagttttagtttttgttttattatagtctggcgcatcggctggtgtatcccctggttggtcggctggcgcatctcccgacttttgggctggcggaactactggaatatctccggtagtcttaccctttccaggcggctcgtctttaaatttcctggaaaaagagtatgaaccgaccgaacgtttgctttttcctgatttataataaagcagtcccgcattaatcagggataaacgcgcccggataagggtcttctcgtcgatattcaggctgaagcatagttcgatgttagagcaactgaaaacgtcctcccagccctcgctattacaaacggcaactaattcgtagaacagtgcctgctcggtagcggttagccgattacgtctgcgtgctttacgcatcttttctgttaagctatatccatccatgtggttattttttttattcatttgaagtataattatcttttagatacagttctttcctgacccaaagagtgttatttagtcaattccgacgtatccaccctctgtaaaggagtgaagtgtatttgaagaagatgattcattttcattacaatctatcctgtgcattggcatattggggcaagatgccgttccaattccgtgatcaatacttcattgcaaatatctctctgttcctgccattcaagaaatttggcttgcaaactctcgtttcctgaacatgatattaattcaagcagctcagattctattttacaaagttttttagtttcaatttgaaagttacttttactcatattctttccggctattcgttatctaatcctatgcaaaattcctctcttgtctcgttcccataattggtatgtagagcattgagcgcattcatgatcttctccgcttcatctgcgtatacttcacaatcccacctaattgtagttttagatggtgactttattacagcaagaagtgtatccaaattgtcaactgcttcttgaatcttatccaggcattcctttcgtgtcataatgttattaattatgaatttaaaaattgaatgaattctctcactgaatcacagtcgtcacaatgactgcatcctatgcacgtacaagctttcttgtatgcttcaacagcctttttctccaactctatctcagccatttgaacggcttgatgagccacggtagaattaatcatcttattgtaggcattatactcaacctccattgtctttacaaaatttcttgcctcttgtgatttcatatttgtactgatttgaatttacttacagtcgttcttctattaaatagtaccattacaatcagagctaaagcaacttttagtaattgctttttgccaacaattattatattattacgatttaacccatcatcagtcataatgctataccaatttttataaggtggtaacactttataaatatggattttactaattattttcttcatttctttattaatttgaattatttctttataactattgccattgtacttatacttgttccgctctctttaaactcacctgcgccaatttcaaatacttgcccgtgtacttcatcaatccattggcggaaagcggcacacttcttttcagaagcaaatttccaatgtggactggtaatggctgcaagcgtgccaccttctacgagccgttcatacataagccttacatgatctatgtcctgattgtttgcgaatggaggattggcgattatcttgctatagctgcccacgctatctttcgcaaaatcttctccaagtagtattacattgcccagcgaatgcagaaactccctgttttcaggcatcagttcataacattcaatcataactgaagggcatgcccgatgaatagccttgataagcgcaccacgaccggcgctcggttccaataccgtatcatcttcatgtatccctccggcaagcataatcagccagtctgcaacgctgtctggagtttcaaagaattggtattcctgttgcaaattacatcgcttaccttctttgaggatagagaagacgcgctcggcattaaacgggaatgtaaagccctgtactttcccaccttgccaggaaccgcccgcttcctctatccattttttggcgtcggcataagatttcttattgaattgcacttgtggaagcttgaggatgttattctcaagcgtgcaatgcttcaatatctcttccacactccatttcttaccttcatcggattgttttccttttttgtccatgggagcatcaggggcgagcaatgatgatacctttgatatgaccttattgctagcgtccataaatgcgttgacgcaggtaagcatttccataagaaaatcgttatctacgtggtccgtttcgtccataacagtcaatccgtccatcatgtcctccagtctgttcaactgctcaacactaccacgtaacgtttttattaaagtctcttttttgttcgtcataacttttttgtaaataaattcttgttgtgtctacgctgccatgacctaaaagatcagccaactgaatcacatccttgtttttcttaagaaacatcttcgcgaagaagtgacggaaagcatgggggtgcatcttcttcttgtcaatgccgcagcaattgccccaatccttcatgccctgagacagtccacgttgtgtcatgggaccaaatctgccaaccgcaagaagtccggtcttaccgtattctttcgcataagccttcacttcctgctgtagctgtctttgaaagaaaaagcgacggtacttgttaccctttccttttaatgtcacttccccggatataatgtcttcccacgtgaattgcagaaactccgacagacgggcaccagttgtacctaaaaccctgataaaaaagtaatagtctttgttggatttagtcttcaagtattccagtaaacggttatattcgtcctctgtaggaacattatttgtgtccagcttacgcttcatcttaggacgcttgagctcgacaggtttcttcatccacttggaaaatctttcgatggccgtaatccgcaaccggatagtagcgggagcgaattttccctcctcaagcatctttatgaatctcctgcaattatccatattgacctcattcgcatattcgaagtatttcttcatagaggtatgatataaatcaaccgtatgcggggaataatcattattatcagtcagccatactataaaatcattcaacatcttcttgttcttctctgaaatggagtcaagtttctccaatggctttaccgtcttttccctgcggccatatccgattttaagataagacaacaaatcgcaaatggccgaacacattaatggataacgagccatgacatcagcgtttttacgcttataactcaaatagccgcgacggttgacctcttcggtactctcaagaaaatccgctacatacttgatatgcttgccaattgtatcataacttctacctgtggtatacaggtaagaaatataattagtcagtatatgctgtctgttattatccatcgtttttaagtattaaatcacaccaggtagcatcattttcaaagaaccattcaaaaccgcccgctttatgcctgcccggctttttattgcagatacagctgatcagagccggattaacacctgcctctttccctgcatcctgaatggaagggaatacgccgcataactttccgtctttaatcgcaactacacttttacgatttagacctgcacctgttttatgccaggaaccacgtcctttggctaaatttttcagacttctacgtttagtcttggaggaatgatacttcattgttttccctttattgtgaggagcaatgcctttcaaaaatctgccgtttatgggattcctcgtagggcgttcaacaggtatataaagttcgctcatttctgatcttgttctacgctaattgattaatatatttcgtccattgctctgccatcgccaaagcaataccctcataagttttacttcttaaatgtgcagtcatcggatcgttaaatgcaagccattttccgttatacattaccttattttgcccatcagcagtttgattattccaatgaccacatttaggtagagataatatatgggtaggttgtaattctgggagttcttttagccataaacacgtttttttactttctggatgtccgtattcataaggctgtatgatctgatctggttttctgatatacgtggacaaaacccctactggattttccatcgctatatgtggtatatcagcattaaacaaatcccacgcaaacatcattgcctcgtattgctttttccacctctcaggattccctgggatatgtctattaccggctaccgttaaatacgtacatggaggatggcatatcattaaatcccaattgcctggaattaataatctcacatcggccattatgtgttttccttcacttttagttttttcggactccgtaggtaataggtcacagctccaagcatcccaaccgagggtggagaaagcatcacgaactgtaccactatattcacaggccactaatactcttttattcatttctactctgttatacgtttatttttgcacgggaaattttccccagttttccaccttctttcatccatgttttatagcattcatcacataatgagttgccgtatcccgaaacataacgttcgctccctttcggtatcagttcgttgcatataaaacactttgtatcttttcgggttactttctttgagaaagcatctccaccttgtctttttgcatgaaaagccatatttactccttttatattagttatacgttaattggtaatttcataaagcacatccacatggttttgccatgtctcccagtcgtatgaccgaataacggttgtcgtccaataaccttcaatacttctctaactgttatctgatcctcgttccatttgaaaacgagaactccgtagtcttccaaaacacgaaaacattcatcgaatcctttcttgattagcctttgccaatcttccggaagtttgccgtacttttgggccaaccaactattcttgccagcctttaaaaggtgcggtggatcaaatacaaccaatttaaatgattcatccaagaatggcatatcggtaaagtcagatacaatgtctggatgaactttcaggctccgcccatcacagagagtatgttcttcatctctaatatcagcaaacaggaccaaagggttttctttatcgaaccaaaacattcggctgccacaacaggcatctaatatgatttttgtttcactcattactattctgttttactctaattgattcgtacatatttacctgtgaggtcgcatgtccttaatacttctgcattctcttcgccgaaagcgattaaaatgctaccacaaccgggcgaatctccacgagtaccgtctgggcgatagaacctaatacgatttcggaggaacttcatcgccgtagctttctcaaagatgatatcttggaacatcttactatcacaacgattaaaaagcaatgctataccgttaccatgctccgctaacttgcgaacaaattgcccgataagaggacgggaataaggaggattaagccaaacacgacccgttcactccttcgttaacccatcatcgctcttattgtacattatcttagctgtctgccaaagtggatttatgggagcgcacgggtcgaggtcaaatttgcctaaactgtctattatttctttcggtgcgtaccattcatcggtagcagcagccgatctttcaaaacttgtgttcatttctttctgaatatactccaattaagaatttggacttacttcaaatgattatatcgttttagagcatcccttcggctatatgcttgtattttcacacccttgatcataaacgagtgaagaggtttgacaagcggtttaaccggtttaggattgaatttcatacgtactattttgcggcatccaaagaatggcgctttctgtatatcattaatttgattgatatgaatccgaaatggtgtttgttcatatttcataatattcatctttaaactattacgaagaagttaaggctttgattaaggctgctctttaacccacttgtaaatctcgttggcggcatcgatagcctctccgtaagatagttcgtttgctgccagcgttatgcaccatttgcgcaatttcatatctttgcgctttctcaaataccggataattttttttatcataatcgtaattttaaaatttaacaagtttattttctgaaaaacatatctccgcttatggatctggcggtatcgtcacccgttaaccgtatgtacccacgactcgaggcgttttatgctgttgaaccgtatgggtacacatccacaatagccgtttccgtaaccgctcctatctgataatcggccatcgtgtctttcattccctcgtccagcttcctcacggcgtcacgcaggtcggcggcctgtaccagcacaaaggagatggctttcttctcggcgccgctcttttcgtccagggtgataaaaaagagcctgcatttaaaccagcggtccgccgcttcttcatcactgacaaaaagttcgctgtaattggcgcgtttaatgtccgataccgtaaactctcctgttataaacggggttacctcttcaataatgcgtgcttccgcttccgtaaaactcaaagcgtctaccagataggactcggtaactttctgaatcattccgttttccatcgtcttttcgtagcggatcttgcattcaaaccaggtatgcattgccatatcattcgatttttaattgctgtttatttctttggtatgctgaagctttcagtgacttgcatctcctgcactcggaactgaaagtaaaatataccttctctcctctcttcagggttctgggataaaaccggtgaacgccataccactcaccgcaaacggagcactgttttatcacacgaccgtcggacaaggtgcgataattgcctctttcccgccgtcggaccaactcgcagccggcgcactcttcatccgtaagcttatacctcctgcaatgggacagggatttctttccgcatttggcgaatgccttgcaatcgatacgggggatggtctggatgatattcataagctgatcattttaagcctcccgcttcgggggaaccgaatcccggggacttctccccggggagtggtttgcaaaatataaaacttaaccggggcacactcccgacggcatcctttagtaccggcattggttattgtttaacatgtttcctgcatttaagcaggactccttttatgatgatcgcccggtccgttgagatcgttccctctttggaccgatgcagtagcgtaccttttttgattcctatatcgttttcgctcagatgttcaaaaatggcgctgagcgaaccgaaatagtagttcttctttttgaagatcaaatgcacatgtattactttcatgttctcaaaagttccatatatgtcatatttggtcgttttccgcagattccatccgctctatctcttccaggcaacggagccatccgggaaacccgccgaggttcttgtcatcgatgtagatattggcgtatatcttgccggatcctttcccgtaccgctttatattttccgggcagtggtcgttcaccctgtcaaagggaatgttgtgctccagcagccagttgattgcatcaagcaggttctttccgctgcggcaggtccagataatgatatagtggcctctttcttgcaatttgcgcagcacttcaccggcatacggttgttcccccaggatatcgggaaagctgcttcgcgcaatcgttccgtcaaagtcaacggccaagatcatgacaccctcctccttttcttttgggacatggccgtgtcttttctgccaatatgaccgcctcttaggcgcagtatttcttttatctcctttatagattcctcttcgaggatactgttcagagcacggaatttaccggatattttcccgcttttcaggcagcccggatcatccgctatcttctttttaagactgagaggcgcttctttcagtttctcaatggtatatgctatccggtctttgccgtcgagttcggggctcggatggcggaatctgatattcagcaagaggctttctaccacatctgtttccctgacgagccttgcgcattcgtccagacccttttttccgggtatgaccatctcccggattctctcgatatgcggagccagcataaatttggcttccaagggtgttatctgtagcacataggccacttgtatatgattcactaacatgggtactcctttcccgtttatggttaataatcttttgaatcgtaaaatccctgattgcgcaggtactccttcaccacatcggaggaggaagcccgcccgccgatccggtcgtggatatattggtacttctccatggacatgcccgagaggacggcatcgttacgctctacatttccggcatagatacagccggcaatggtcgttatcgtaatgattgcgataatgatatgtttggaaagcttattcatgtttgtcatcttgttcttcatttaatgggttaagctcttttttgagaaggagcgtcgggctctgtgcttcctcgtatctctcttcttcgataaggctgtttatcttttcctccagagtcaggaggtatatttttaaaagacgggagtctgtttcgcctatcttgccgcgaagtccggtaagatcctgcctgatccgggattccaaagcccggaacaggaataggatggcccaaaacaggccgatgcacagacacatggacagggcgaggaaagtttcattcataattgtgccctccagaatcttatgatttccttaccttcgtaaaattttcgtgctgactcacggcgaaatccgcattttatgcgtccgctactggtatattcccttaaagtgttgcggtgtattccgagtatttcgcaagtttgggttacggtatagcgaccggtgctgcttactgttggttcttcggatgtgatcatgacttattcctcctttgtttttaacataacgggacagctatcaactgtccgggcataaggtcttaagcgtcgttttatattcacgcactctgtcctttatttcttgggatactttaaatccgaactcgttgtaaatctcaatgacctcttcaagcctggtaatacgttgtttcaattcttctacgttcatattttctcctccttaaaaagcaaagctcgaacctttcataggcctaatgtggaagtttgcctattactcggaacgagcttttatcaatgtctttactaacccttaaatctcgcggaaacttccacgcaaccgcgccgctttcaaattcttatacgaattgttggataaaagaaaaaggctggctatatttgcgaatggataaatgcgtaaatataggtgacgagcgctctcggacagccttttttgtatccgttttcgtttgagtgatttgaatacggggacaaatataatgcgtcactaggaaatttccaaataaacatttggaaatttcctagtgaaataaatattttccctcaaaaaaagatcttatggtacttgaaaatttaaaaaaattcattgattcaaaagggattagcgtctctgcttttgaaaagagtattggtatgtctaataattcttttagaaagtccttaaactctggaggacatattggtagtgataaattagaaaatatcctaaaaatatatcctgaattgaatcccgtatggcttcttcaaggagaaggcgagatgttaaaggaatatggcggaacctccaatttatgtcgagttacttcagtatctatagatgaagagtctttcatatataaaatgtataaagaaaaagatatagaagtggggcagctaaaagaagaaatcggtgtattaaaaacaaggatacaacaactcgaagctgataatgagtcattaagaaatcaggcaggggctgatagggttaccgatactttttccgatctaccattagtagactacgaagaagattatccgcccgtagaacgtccttcaagttccaaacatccgttagcaggaaaagcgtgacatttctttgggtgattattgagaggttaagcaaaggaaacgattaagttattaaatgaaatatggaccaattgcaattaatacaaagcaaaatatacgagatacgtggacagaaggttatgctggattttgatttggcggaaatgtacggtactgaaactaaatatttaaaacgttcagtaaaaaataatattaaacgttttccatcagattttatgtttgagctaacgaaggaagaattcgacagtttgaggtgcagttttagcacctcaaaaagaggcgggacccgatatatgccttatgctttcactgaacatggagttgctcaactttcttcagttcttaacagcgatttggcaattgagattaatattcaaattataagggcatttatagcagttcgtcatttaatctccaatcctccgattgatagagtcgataaactgaaagacgaaatcaaagcattaaaagactacatcgaagaagcatttgctgactacaacgatataaatgatgatacgcgcatgcaattggaattaattaatcaaactttggcggaattgcaggcgaaaaagaaagcggaggaaaaacctcgtaacccaatagggtttatcaaacctaaacactaaataatggatatgcgctgatacccaatgaatggtaaaagtgcataattcttaactttgaaaagagttctagaagaatataaaccatgtatgatattgtagcgcagaggcttagactgtttttagctaagaaagatatcacttgtaaaaaattgtcggctatgatttttatgtcagaggcgacgcttaaaggcaaattgaatggtacaagaacgctagatcttaatacgataatatccattgcaatacggcttgaggatctttctgttgaatggcttcttcgcggtgagggtgatatgttgaaatctagttctggtgtttctattgtatcttcatcagtacctatatttacaggggagacctcgtttatatacagtatgtataaagaagaaagagaagaggttaaaactttattaaagcaaaatggtatattggaagagcgtattcgtcagctcgaggatgacaatagattattaagagatcaagttgtaacagaattaaatctaaatactaaactgtagattattatgagtttaaatgatcgtttacgaattgttgtaaatgaattttttcatgggaataaagcggcttttgctcgagccgcaaaaatatcggaccaaagagcttatagttttttatctgttcggagtaatacagaacctccggctagagttttggagaatttagctaagtatctaccgaatttaaacgcgacttggcttttaaccggagagggagaaatgattcaagataaatccactcctgagatgccgataactcttgtttcggtaaatgaatataaaagtcgattgcagcaaatggaggtaagattggaagctctaagggctcaggtggtattaaaagataaactactagccggactactccgaaaagtagagaacaagactaaatagcttgaatgatattttattttggatctatctagcccgtatttttatttgcattatgctatagtgtaatataagacgttttcatgacgactttatgttaaatactttgagtcaatttataacctcaaacaaaagggatggaacaaggtatatgccttttgcttttattgagttgggcgtagctatgctttcctctattttaaacagtgaagttgtaattgagattaacaaaagattatatcgaagaagtgtttactgactacaatgatataaatgatgatacgtgcatgcaattggaattaattaatcaaactttggcagaattgcaagcgaaaagaaggcggaagaaaaaccttgtaatccaatagggttttattaaatctaaataatgaataataagagtgtataatccttaactttgaaacaaatctaatagaatataaaagatgcatgatattgtaacgcaaaggcttaatcaatttttagttgaaaagaatattacttataaagaattatctggtatgattcttatgtcggaaacgtcactttgtagaaagttgactggttcaaggagtcttgatttgcatacattaatatctatagtagcatgcttgccagatgtttcttccgagtggcttcttagaggcaaaggtagggtgtgtaattcttcttcgagcattagttccgatgtcttagtagaagaacttaaaatggaaaataacctattaaaacgaaaaattcaagttcttcaagaattgttggagtttaagatggaaaaaatcagggctgagaatggtaacataaaaaaatgatctaaaaaatgtgcttaattgtttagttgtgctacagtcaaattaaatctaagtactaaactattatgagtttaaatgatcgcttgcgagttgtcgcaaatggattaaaagataatttattgactaagtttatgttaaaggatagataataaacctaaatatgacggctaaatttattattatggtattggtgttagcttatatcatggttataatcgctatatcaatttatttaataaagataatatgtactcgttacaaccaaaactcagatcagatactccctcctcccaatatgcactctattcaggagagtgcatccatgcatttggtaagaatagggcagttgcctcacccaggacctggatattgttattacgaattaggaggaatgagatatcaagcgctaacaggatttgacattggcgtacacgaaggatatgcaaaagcagagcttaataatcggtatgataaatatgcggttggagtctacagagaaggagatcacaaattaatgggatacgttcgaagagaacaaaatagagagctttatgaatttatgttaaataataattgtatagctaaagctaaatttcgaatatggatacaccaaggagaaatctatggagcagcttacataaaagaagaatggaaatcttcattaggctttaagtctgacattaaaatttagaaataagtccttttgcatgcaaatttcatgcaaaagaatgatctcttatttctatataattgatatataatatattatcagcgttttattttgctttgggagcagggggtcgtgggttcgaatcccgctaccccgacaggaaataagagtaatcgcacatgtcaatgtggttactcttatttcattttgtgctatggtggaattccgataatacggaataatgcaactggaacagagcgacgccttttacattttcaaataaaactcccgggttaatttaatgtattcatcactgtagcggtggcgagcaacttctgttaataatttctcttctttgcagtcttgttttataaatgtaaatgagatcaaggtacgtttggggggtgctcccggtttagtgatgaccaagagctggcgggatggatacaggccttgtgaagatgcgatgtctttaaaagaatcacttgcatccatcggtatgactactgtaaaagtaccatttggcgaaagtaaattcgatactcccttcagcaattcttcataagacaggttatcgttatgtcgggctgtgttgcgctggctgtccggacacttcagggagtctgtgaaatatggaggatttgatacgattgtatcatatttcaggctattgttcttattgctgtataacctgaaatcctggcaaacgacttctatcctgcttccccaaggtgaacgggtgatattctctgcagcctgttgtgcggcttttccgtctatttcaagagcaataacggaagcggaacagcgttgggccagcataagtgccaccaatccggtaccggtaccaatatcaagaatacgtgccgaggactctaccggggtccaagctccgagcaggacaccgtctgtgcctactttcatggcacatttatcgtgccagacagtaaactgtttaaactgaaaaaaaggttggctcatttagctaagaaataattaagttcgccaaaaataggtaaatattgtgatatgacattccgtccacattattatttggcattgtttttgtgtttttatcgaatagatgttttattcttaatgaagaatcgattaactttgcgaacgttttatgttcgctgatatgacataaactaatttatacgaaatgaagaaagaaagatatttaagagagatggatgaccagaatgataacgcattttcattaattgccgattttgacggaaacgaagatcaagtgtttgacataaaggttggtgaaactcttccggtactccccctccgtaatatggtattgttccccggagtatttatgcctgtttctgttggcagaaaatcatctttgagattggtgagggaagccgataagaaaaaatcctatattgcagtagtttgccagaaaatggcggaaacggacgagccggcatttgaggacttgcacccgatcggaaccataggtaagattgtgcgtgtactcgaaatgcccgaccagacaacaacagtcattatccagggaatgaaacgcctggagctgaagaatatcacggagacacatccgtacctgaagggtgaagtgaacattgttgaagaagaaatcccttcaaaagatgataaggagtttcaggcattggtggaaacctgcaaggatttgacaatacgatatattaaatcatcggacactttacatcaggaatcagcgtttgccatcaaaaacctgacgaaccacatgttcctggtggactttatctgtacgaaccttccgttgaagaaggacgagaaaatcgaactgttgcgcattgattcgttgcgtgaacgtacctatcggttgcttgaaatcctgaatcgtgaagtgcagttggccgaaataaaggcatctatccagatgcgtgcccgtgaggatattgaccaacagcaacgtgagtatttcctgcagcagcagattaaaacgatccaggacgaactgggtggtggcggccaggaacaggaaatagaagagatgcgccaaaaggcagaacacatgaagtggagtaccgaagtgcgggaaactttcctgaaagagcttgccaagctggaacgtacccatcctcaatcgccggattacagtgtgcagttgaattatctgcagacaatgctcaatctgccgtggggagtttatactaccgacaatttaaacctaaagaatgccgagaaaacgctgaataaggatcattatggtctggagaaagtaaaggaacgcattctggaacatttagccgtacttaaattgaagggtgacatgaagtctcctattatctgtttatacggccctccgggagttggtaagacttcactgggaaaatcgattgccgcagccttgaagcggaaatatatccgtatgtcattgggaggtgtgcacgatgaagcggaaattcgcggacaccgtaaaacttatatcggtgcaatgccgggacgtattatcaaaaacctgattaaagcgggttcttcgaatccggtatttattctggatgaaatagataaagtgagtgccgaccgtcagggagatccttcatcggctttgcttgaagtgcttgatccggaacaaaatacggctttccatgataatttcctggatgtggattacgacttgtccaaagtgatgtttattgctacggcaaacaacttgaataccattcccggaccattactcgatcgaatggaactgattgaagtgagtggttatatcacggaagaaaaagtggaaatagcacgaaagcatttagtgccgaaggagttggaagcaaacggaatgaagaagaccgacattaaaattccaaaagatacgctggaagctattatcgaatcgtacacacgtgaaagcggtgtgcgtgagttggaaaagaaaatcggtaagattcttcgtaaatcggcccgccaatatgcaacagatggtttcttcttaaaaacagaaatcaaaccgactgatttgtatgacttcctaggtgctccggaatatactcgtgataaatatcaaggcaatgattatgccggtgtggtgacaggattggcatggacagccgttggaggtgaaatcttatttgttgagaccagtctgagccgcggcaagggcggacgtctcacattaaccggaaatttgggtgaagtgatgaaagagtctgctatgctggcacttgagtatatcaaagcacatgcttcactcttaaatctggatgaagagatctttgataactggaacatccatgtccatgtccccgaaggagctattccgaaagacggtccgtcggcgggtatcacaatggctacttcgttggcttctgctttgacacaacgtaaggtgaaggctaatctggctatgaccggggaaatcacgttacgtggcaaggtacttccggtaggtggtattaaggagaagattctggcagctaagcgtgccggcatcaaagaaattattatgagtgccgagaacaaaaagaatattgacgaaatacaggatatatatctgaaaggactgactttccattatgtgaatgatgtaaaagaggtctttgccattgcattgactcaagagaaggttgccgatgccattgatttatccgtaaagaaagccaaccaggaatgacatttgaattacaatatacagacgcaaaaagtaatgcccgtgccggtctgattacaacagaccacgggcaaatacaaacccctatatttatgccggtaggtacaatcggcagtgtgaaaggagtacatcagactgaattgaaagaggatattcaggcacagatcattctgggaaatacatatcatctttatttgcggccgggactggatgtactcgaaaaagccggtggattacataagttcaatggattcgaccgtccgatgctgaccgatagtggtggttttcaggtgttttctttgtccggtatccgtaaattgcgtgaagaaggggctgaattccgttcgcatattgatggcagcaagcatatctttactcctgaaaaggttatggatatcgaacgtatcataggtgccgacatcatgatggcatttgacgaatgcccgccgggggattcggattatgcatatgccaaaaagtcattgggattgacacaccgctggctcgacagatgcattcaacgattcaatgagacggaacctaaatatggttatagccagtctctttttcctatcgtgcaaggatgtgtataccccgacctgcgtaaacaatctgcagaatacatagcttcgaaagatgcagacggtaatgccattggcggacttgccgtaggcgaaccggtagataagatgtacgagatgattgagttggtgaacgagatacttcccaaggacaaaccacgttatctgatgggagtcggcacaccggttaatattcttgagggtattgaacgtggagtagatatgttcgactgtgtgatgcctacccgtaacggacgaaacggaatgttgtttacgaaagacggtatcatgaacatgcgtaataaaaaatgggaagcagacttctctcctattgaagctgacggtgcttcgtatgtagacacattgtacagcaaagcatacttgcgccatttattccatgcgcaggagttgctggccatgcagattgcgtctatccacaatctggcgttttatttgtggctggtaggagaagcacgcaagcacattatcgcaggagacttttcaacctggaaacctatgatggtgaaaagagtgtcaacaagactataaatttatgagaagcaatcggtttattaaacgcctggacttatatatcatcaagaaattcttggggacgtatgtatttgctattgcattgattatctccatcgcagtagtattcgacttcaacgagaagatggataagtttatggaacggagtgcgccgtggtcggcaatcatcttcgattactacatgaactttattccatatttcgcgaatctgttcagtccgttgtttgtatttattgctgtcatattcttcacctctaaactggctgagaactccgagattattgcaatgttttctaccggtatgagttttaaacgtatgttgcgtccttacatgatatcggccggtatcattgcgatttctacctttatattaggatcgtatgtgattccaagaggcagtgtgactcgtctggactttgaagataaatacgtgaaaaagaaaaagaccacttatgtacacaatatacagttggagatagacacaggcgtgattgcttatattgataactatcaggattacaataagacaggaaaccgtttttcgctggataaattcgtagataagaaactggtatcccatttgactgcccgtagcattacttatgatactactgcggttaataaatggaccattaaggattatatgattcgtaatctcgacggattaaaggaaactattgtccgtggagataagatggattccattataccgatggaacctgccgatttcatgattatgcgtaatcaacaggaaatgttgaccagccctcagcttagtgcatatatagataagcagaaacaaaggggtattgccaatatcaaagagtttgaaatagagtatcataaacgaatcgccatgtcatttgcatcattcatcctgactgtgatcggagtatctctttcttcaagaaaaacaaaggggggaatgggattgcatttgggaataggacttggactgagcttttcatatatcctgttccagaccgtggcatctacttttgcggtaaatggaaatatgcctccgatgatcgccatgtggattcctaatttactgtatgcgctgattgcattttacctatatagaaaggctcccaaataatggattgcatttgaattcaaagggtctaaaaataagaatttccgcctgctcttgtgaaatccacaagtgcgggcggaattttttgttgtattcatttcctcttttgtctcgttcccgggatcgaaatcctgttgggaacccccactctcttcttacgctttaaaatcaacctttgattttgtttgcataagcagaaagttctgcagcagagatgtttttggctataatcacaccatttccatccaataaatagttagtgaaaccccggtttaaacggtatttcttaaacaagccggagctttcgcctttagtttccgcgaaacaggtgggcgtaactatttggtccttacgaatggtttcctgaaataccgactggtattcgtcaaatgaaacggaaaccatttccacatcttgagaagttgatcgaagcgcattgctcaaacttgcgttttgcatccgggactgtgcatcgtaacttgcccaaaaactaagcagcacatatttaccttttaagtcggtcaaatcaaaattgtactgtgcatctgacgtagattcgattgtgaaatcaggggctacgtcacccacattcaaacctccggtgggtttgtctttttctacgaaagaagtcaaggaactaattagtaatacaacaaaaatccattttacatgcctcatgtaattcggttttagttaatactatccgggactgtcctctaaaacagtggtctctccccgaaacatcgtctttttaggcacaacagagaggaatctgttgactgtcaaggcctttaattcagaaaccgggtgcaaaggtaagtaaatattattccaacttccaaataaacaagtaattttctctctttttaagtgcagttttttatgttatttagcataaatactgggaattttcccctacttttgcaggatacttaatgaacattcagctatgcaaccatcaaaaacagaattaattctgattcgtattaccggtgaagatcgtccgggacttacagcctccgtaacagagatattggcaaaatacgatgccactatcctggatattggtcaggcagatattcataacaccctttcactgggcattctctgtatgactgaggaacaactctcgggatttatgatgaaagagttgctttttaaggcatcttccttgggagtaaccattcgtttctatccgattaccgaagaagagtatgaaagctgggtgaatatgcaaggtaagaaccgctatatccttacattgctgggacgtaaacttacggctcgtcagattgcggcggttacccgtattttagctgagcaggacatgaatattgatgccatcaaacgtctgaccggacgtattccattggatgagcgtaaaatgcatacccgagcctgtattgaattctcggttcgcggtactccccgggataaagaagctatgcagggacagttgatgaaattggccagtgaacttgaaatggatttctctttccagttggataatatgtatcgccgtatgcgccgcctgatctgtttcgatatggactctacattaatagaaaccgaagtaattgacgaacttgctatacgtgccggtgtaggtgctgaagtaaaagcaattacggaacgtgccatgaggggagaaattgactttacggaaagttttcgtgagcgggttgcactgctgaaaggactggacgaatctgtaatgcaggaaattgccgagagtctgccaataactgaaggggtggatcgcttgatgtatgttctgaagaagtatggttataagattgctatcctttcgggaggtttcacctactttggacagtatttgcagaagaaatacggtgttgattatgtatatgccaatgaacttgagattgtagacggcaagctgacggggcgttatttgggagatgtggtagatggaaagcgtaaagcggaactgctgcgattgatcgctcaggtagaaaaagtagatatcgctcaaaccattgctgttggggatggagctaatgatcttcctatgttgggagttgccggtcttggcattgcctttcatgcaaaacccaaagttgtggccaatgccaaacaatctattaatacgattgggcttgatggcgtactttacttcctgggatttaaggactcttatttgaatatgtaagagtggaaagaataaaagaacccgaaaaatttgtactacgtagtgaattttctatctttgcgagcaaataaaataaacgatgaagttttccgaattacaattaaatgacaatgtacttgaagcactcgacgctatgcgttttgaggaatgtactcctatacaagaacaagcgatcccagtaatactcgaaggtagagacttaatcgctgtagcgcagacaggaaccggtaagacggctgcctttttgttgcctatattgaataaattgtcggaaggtggacatccggaagatgccatcaactgtgtgattatgtcacctacccgtgaactggcccaacaaatagatcaacaaatggagggcttctcttattttatgcctgtttcaagtgtggctgtttacggaggaaatgacggaatactttttgagcagcagaaaaaaggcttgatgcttggtgccgatgtggttatagctacaccgggacgcctgattgcacatctgagtctgggatacgttgatttatcccgggtttcttattttattcttgatgaagcagaccgtatgcttgatatggggttctacgaggatattatgcagatcgtaaaatatttgccaaaagaacgccagacgattatgttttccgctaccatgccagctaagattcagcaattggccaatactatcctgaataaccctgctgaagtcaaactggccgtatcgaaacctgctgaaaaaattgttcaggctgcttatgtctgttacgaaaatcagaaattgggtattgtaagaagcttgtttgcggaagaggtgcccgaaagagttatcatttttgcatcttcaaagataaaagtaaaagaagtggcaaaggcgctgaaaatgatgaagttgaatgttggagaaatgcattctgatcttgagcaggtacagcgtgaatttattatgcatgaattcaaatcgggacgtatcaatattttggtcgctacagacattgtatccagagggatagatattgatgatatccggttggtgattaatttcgatgttccacatgacagtgaagattatgttcaccgcatcggacgtactgcacgtgcgaacaatgatggagttgccctcacgtttgtgaatgagaaagaacaaactaattttaagaatatcgagaatttcctcgaaaaagaaatttataagataccggtaccggctgaattgggggaagctcctcaatataatcctcgttcgtatactaacgcaggaagaggaggaagaaacttccggaacggaaatagaaaaaataataacggtggacgttctacggcacccagatcgggcagaagataagcgtaaagcttttctgccctttttctcttaatactctttttactatttgtaattcttcggtcaggtcggtttatttatattttgcagccgttatatttagttttccatcgaaactgatggtaagattcacaagattgcataccggactttccggaatacagacgagtgcttgataatgatagcctttgcggtcaattcctgtaaaattcatatcagatagaatggcctgttgcagaaaatctgttggaattacatctacaaacatttgcttggtaatgtccttggcatataaactttttttgccttcatacacacatatatgcattacattgtcatagtaaatattgtccatactgataccatcttccgaataagttgttttcactactttcatttgtgaggggttgatgtatacataggctctgtagcggacgccatcgaacattaccacactgtccttcttagtgacttctgtataggtcggaatgatttcaaccgacttaaaggagaatgccaatgtatcattaggatcttccgacttatggagcttgataatattatcagccagagaatggaaccaaaaagaatattcactctgcttgtcaatttgatagtgggttacgtctttgccataggtatagagcgtatcttttaggattttgaaataaaccggagcactttgagcatcggaataataaatcgtatctcctattatgcgcatcaagggagtttcagtttcatcatcaagccaaatgccttggagaatctctttggccttggggtcttcattttcttcagagggctgttgtcctttgccattattgcatgctacgaataagaccgtcagtaacaatgttgcaatgtactttatcatctgtttaattttgtgcaaaattactcatttatatcgataaagatataaaaaaagagctgaaaagtaagtcgggggttacaaaaaaactcttaacttttcagctctgttatcaggtttgtgaggatgcggtggtataaggtattatttgccgatacaatggtaaataaaaccctgttcttccatttcttttttatcataaatgttacgtccgtccatgactacctgttgtgacattgtttttttcacaacggcccacgaaggcagacgaaattctttccattcggttaccagcatcaaagcatcggcatctaaaaccgcatcatacatgtcgcgtgcataatatatggtttcgccgattcgtcttttacattcatttgctgctgcgggatcataggcgcgtactttgcagccggctttcaacagtttgtcaattaggaccaatgcaggtgcttcgcgcatatcatctgtttccggtttgaatgccaatccccacaatgcaactgttttaccttccagatttccattatattgttttaccagtttgtcgaataacaggcttttctgattttcgttcacttcttctactgcctgtaacacacgcatctgatatccattctgttctgctgtctttatcaaagcttttacgtctttggggaaacatgacccaccataaccaatgcctggataaaggaacttacgtccgatacgggtatccgaaccgataccgctacgcaccatatttacatcagctcctactaactcacacagattagcgatgtcgttcatgaaactgatacgagtagccaacattgagtttgcggcatatttggtcatttcggcagagggaatatccatgaatatcacgcggaaattatttagcatgaatggcttatatagcttagtcattaatttttctgcacgttccgattccacaccgattacaacacggtcaggactcataaagtcattgactgcattaccctctttcagaaactcaggattggaagctacatcaaattctattttggcaccccgtttgtctaattcttcctgaatggcattacgaactttgcatgctgtacctacaggtacggtacttttggtgactacaagtttgtatttcttcatgttttgtccaatggtacgtgccacagcgagtacataactcaaatcagcacttccatcttcatcaggtggggttccgacagcagagaacactacttctacatcatccaggcaactttccagtgaagtcgtaaattttagtcgaccggctttggtattgcggatgaccatttcttccaatccattttcataaatggggataatcccctttttaagcgcctctattttttcgctgttggtgtcaacacaagtaacatccacgccaatttccgcaaaacaggttcctgtgaccaaacctacgtatccggttccgacaattgcaattttcatgttcttttatttattgagggtttctattcaaaatattctgcttcccgaaaggctcctgcctgcttgtctttctctgacatgacaagttgagaatcggcaataggccagtcgatagccaatgccggatcattgtataggatagaagcctcagattggggggcatatatattatctaccttataagtaaagatagctatttcgcttttcactaaaaatccatgggcaaacccacggggaataaaaagctggcgtttattttcgtcgcttaacaatacgctgatatgctttccaaatgtaggtgatgactttcttaaatcgacagccacatccagcacttcacctttgatgacacgcactagtttggcttggctataggctcctttttgataatggagtccgcgtaacgtgccgaatgaagattgagattcattatcttgtataaaatttatctgtccgatagtagcatcaaattcctgttgcttgaatgcttccatgaaatatccgcgcggatcgaaaaaaatcttcggttcaatgatccacacaccatctatttctgtttgtatataattcattcgtttctgatgatattattaagtagcgcaaaagtaggcattttttctaatatgacagttatagatggctaagaaaggaagccagcgtttagcatttgttaataataaaatgtgcggttttatggcatatcttgaattaatcagttaattttgcacacatgattgaattggcacagcatattgaagtattattattagagaatgattgtgtgatcgttcccggttttggtggatttatagctcactacgctcctgctatgagagtggctgaagagaatttattcctcccgcctacccgtactattggtttcaatcctcaattgacgttgaatgatggtgtcttagtacaatcttatatggctgtgtacgatactaacttctcggatgctaccaaaatggtagaaaaagaggtggcagaacttatctccgctctgcatgaggatggaaaaactgatcttcctaatattggagaaatccgctataccattcataatacttacgagtttgttccttacgacaataaaattaccactccttacctctatgggctcgactcgtttgagatgaaggagttgtcggctttgcgacgtccggagaaagaacaaattcttccgactgttcttaagaaaaagacaagttatgaattcagagcgaactgggcctttttgagaaatgccgtagctatgattgcagcggttgcattgtttttctttatgtcaacaccggtagagaatacatatattgaaaaaggaaattatgcccggctacttccaactgatttgtttgaaaagatagagaaacaatcggtggcaatgactccggttatgctaaaatcagttgatgccatcccacaaaccaaaccggcaactgcgaagaaaaagtcgtccactgttcgtaaagcatctgtagtaaagccggttgcggtaaaagaagtgaaagttaaccaaccggaaaagacaatgaaagcaaccgaaaccaaggttgtggaaaaaacttttccatatcatataattattgccagcgtagctaatacgaaagatgcggaggcgatggcaggtgaacttaaagccaagggatatacaggtgccaaagtattgacgggtgacggtaagattcgcgtgagtattatgtcatgtgccgatcgtgaagatgccaaccgtcaactgttgaaattaagagagaacgaggcttataagaacgcctggatgttagctaaataaatattttataatgaaaagaattctttgtcctaaatgtgagaactatctttcttttgatgaaactaaatatagcgaaggccagtcattggtttttgtatgtgaacactgtggtaagcaattcagtattcgtctggggaagagtaagatgaaggctcctcgtaaggaagagaaattggatgaagatgtatataaagaagagtttggctgtatcgttgtcattgaaaatgtcttcggtttcaagcaagtcttacctctgcaagaaggtgataatatcattggccgccgttgtgtaggtacagatattaatactccgattgaaaccggtgatatgagtatggacagacgccactgtattattaatgtgaagcgtaacagacaaggagaattggtttatactcttcgtgatgccccaagcctgaccggaactttcttgatgaacgagatcttgggggataaagaccgtattcgcattgatgacggagccattattactattggggccactactcttatccttcgtgctgcaaaaaaagaagaaatttgacctcctattagaaggtataagcagtagtatgcggtgcacaccaaacatttgggatatccgtattttaagaagttaacatcttaagaatacgatattaacatcctatatgtaggaagttaacttcttggaaataggaagtcaacttcattggaggtaggaagttaacatcctgtaaccttcattctgataaaacgtttttcctttcttattttaagaccaaaatcctataaatatccggtttatttttgtatctctaagtaatttttttaattttgtgttcgataacgattgatgaaatcaaaatataaatagaaggtattttgcttataatcaatagtgtaatcttggttatatcttagataattattctatacaataaaagcacaaaagaatgaaaaattttatggataaaaatttcctgcttcaaaccgaaacggctcaggaattatatcataatcatgcggctaagatgccaattattgattatcattgtcatttaaatccccaaatggtagcggatgattatcggtttaagtccttaactgaaatatggctaggcggtgatcattataaatggcgtgccatgcgttccaatggtgtggatgaatgcttttgtaccggtaaagaaacgtcagattgggagaaatttgagaaatgggcagaaacggtcccatatactttccgtaatccactgtaccactggacgcatttggaactgaaaactgcatttggtattgataaagtactaaatccgaaaacagcacgtgaaatttatgatgaatgtaatgagaaactttcttctcaggaatattctgcccgcggaatgatgcggcgttatcatgtggaaaccgtatgtacaacggatgatcctatcgattcattggaatatcatattagaactcgcgaaagtggatttgaaatcaagatgcttcccacatggcgtccggataaagttatggctgtggaagttccttcagattttcgcacttatatagaaaaattgtcagaaataagtgagattactatttctgactataatgatatgatcttagctttacgtaaacgtcacgactattttgcagagcaagggtgtaagctgtctgatcacgggatcgaagaattttatgctgaggactatacggaaggtgagattaaaactattttcaataaaatatacggcggttcggaactgacaaaagaagaagttttgaagtttaaatcggcaatgttagttgtgctcggtgaaatggactgggaaaaaggatggacacaacaatttcattacggtgctattcggaacaataacagccgaatgttcaagcagttgggtcctgatacgggatttgattcaataggtgagtttgctacggctaaagccatgagtaaattcctggatcggctgaattcaaaaggtaagttgactaaaacaattctgtataatctgaatccttgtgcaaacgaagtaattgccaccatgataggtaattttcaagatgggagtatacctggtaagattcagttcgggtcgggatggtggttccttgatcagaaggatggaatggaaaggcaattaaatgctctttctcttcttggattattgagccgctttgtgggaatgttgacggattctcgttcgttcctctcctatcctcgtcatgaatattttcgtcgtactttatgtaatttattggggtgtgatgtggaaaacggtgagatacctttatcggaaatggagcgtgtctgtcagatggttgaagatatcagttattttaatgctaaaaacttttttcatttttaattagtgtcatcttatctgttacaataaactgagtcgggaattcgctttgcaagcctttttccggcttttattttagatgtgtgggtgtcgcattggcagaaaatcttatctttgcgtcctattatcaatttaaaaaaagaaaaacataaatgaacaattcccctcagcctgctgccaaagggttcacaagagccttctatgtcagcaacacagtcgaactgtttgaacgcatggcttactatgctgtgtttatcgttctcactatttacttatctactattttaggttttaatgatttcgaagcaagtatgatttccggtcttttttccggtggattatacttgcttcctatttttaccggagcatatgccgataagattggttttcgtaaatcaatgcttgttgccttttcgttattaactgccggatactttggtttaggagtattgcctacattgcttgaaagtaccgggttggtaagctatggggcaagtacccattttagtggattgacagatagcgttttccgttggttgatagtgccggttttatttataatcatgataggcggctcatttattaagtctgttatttcggcttctgttgccaaggaaacaaccgaggctacccgtgcacgtggatattctattttttacatgatggttaacatcggtgcttttaccggaaaaacagttatcgatcctctccgaaatatgattggtgatcaggcatatatttacataaactatttctccggatttatgactctcattgctttgttggctgttttctttttgtataaatcaactcacaccgtaggagaaggaaaaagtatgcgtgagatcggacaaggtttcttgcgtattgtcaccaattggcgtttattgattctaatacttattatcacgggattttggatggtgcagcaccaactttatgctacgatgccaaagtatgtaattcgtatggcaggtgaaacagccaaaccgggctggattgctaatgtaaatccttttgttgtagtatgttgcgttagttttgtaactcgttggatggcaaaacgaagtgccattacctcaatgaatattggtatgtttctgattccggtctctgctctattgatggcatgcggcaatcttttggataatgaagttgtttctggaatgagcaacattacattgatgatgattgccggtattgtagttcaaggtttggcagaatgttttatatctccccgttatctggaatatttttctctccaggctcctaaaggtgaggaaggtatgtatttagggtttagtcatcttcattcttttttatcttccattttcggatttggtcttgccggcgttctgctgaccaagtattgtccggatccaactttgtttgaatccagagaggcctgggaagttgccagtgtgaatgcacattacatctggtattactttgcggcaatcggtttggttgcagcaattgctttgcttatttttgcaaaaatcactgatttcatcgataaaaagaagaaaactaacgtctgattgtttccttttttatgtatatttgccgacaatttgccataaaagttgccggcaatttgcattaaaaagaagagaataatgaagattagatttataagcctggccagtggcagtagtggaaactgctattatctaggtaccgaaaaatacggcatactcattgatgcgggtattggaattcgtaccattaaaaaatcactgaaggacataaatgtgactatggactcaatacgtgcagtatttattactcacgatcatgccgatcatattaaagctgtaggacatttaggtgagaaattgaatattccggtatatactacggcacgtgtacatgcaggaatcaataaaagctattgtatgacagaaaagttgcatggttctgtacgctatttggaaaaagaagaaccgatgcaattggaagattttcgtatcgagtcttttgaagttccgcatgatggaacagataatgtaggttattgtatagaaattgacggaaaggttttttcattccttaccgacttgggagagattactccaaccgctgcccgatatatttgtaaagcccactatctgatcattgaggctaattatgatgaagaaatgcttcgtatgggaccttatccgacatatctgaaagagcgtatctcaagtaaaacaggtcatatgagtaatatagataccgccaactttcttgcggaaaacataatggagcatcttcgttatatttggctttgccatctgagtaaagataataatcatccggagttagcatataagacagttgagtggaaattgaagagtaaaggtattattgtcgggaaagatgtgcaactacttgctttaaagagaaatacgccttcggagctctatgagtttgaataaatgtgagaaaaaaaaagtaaaaaacaggtctgtttatttggtagtataaaataaaagccatacttttgcaaccgcaaacgagaaacaagcactcttagctcagctggtagagcaattgactcttaatcaatgggtccagggttcgagtccctgagggtgtacaaaaggagattataaataatctcctttttgtttttggtggcattttgaaatattgttttatctttgccaccgcaaaaattaatttgatgaaaacaacttatcagtttaacatactcgtcaatcatttggagctggcttagttacagttccatcctattttagatataccttaggtttttcagggaggtatcctattctttcttcttctgtatagatgcaacagggaaataatttcattctttatcaaacttattatgaataattggaagaaaaagtttatcattatatggacagggcaactattctctatactaagtagttctattgcccagttttctattgttttgtggattagtcttaaaacgggatctgcggaggtattgtcatttgcaactatcgctgctttattaccacaagctttattaggcccttttgccggcgtctttgtcgatcgttggaatcgcaaatggactatgattggtgctgacagctttgtcgctctctgttccggagtgatcgctttactgttctatttggatataatcgaattatggcatatatatcttttacttatgttgcgttcggttggcggtgcatttcatacgcctgccatgaaatcctctgtaccattgttggcaccggaaaaagagcttatgcgcattgcgggtatcaatcaagctatccagtcgatttgtaacattggtggtccggctcttggagccatattgcttcttgcgtttgacatgagtcttgtcatgcttctagatgtattgggagctataatagcttgtacagctttactttttgtgtatattcccaatcctaaacaagaaaatacctcagctagaaatgtactttatgatatgcgagatggatttaatgtaattatgcgtaataaaggagtcagttgggtaatggtaactgaagttctggttacattttttgttatgccaatggtggcattgatgccgttgatgactttgaaaaatttctcgggaacagcatatcaagtaagtttgatagaaactcttttcggtgctggcatgttggccggtggtgccttattgggtgtatggaatccaaagatacgtaaaaccttgctgattgctatttcctattttttgcttggtgcggcattggcattttgtggaatacttccggctgatggttttgtactttttgcagcattaacagtggcacaaggtatagttgtcccatttttttccgggccttttacttcattactgcaaactcagtttaaaccggcatatttaggacgtgtgttttctctttttgacagcgtgagcttattgccttctatcattgggttgttcattaccggatttattgctgatagtttaggaatagccaatatttttatctgttgtgggatagcaattgtatttacctcaattttgatgatgtgcattccggctgtcagagatctggaaaagcaaagtaaatagatatgggattggttatcctctgatcatttattaaataaaaagctgatcaccgttcgtgcttctttacttatcatcggtaaagaatcgcaaatggtgatccagcctctctataggattacaataggaaatatgatcagacgatggaagcaatagccaattaaaaaatgaattgaaatcgtccttgaaaaacactaaagtttttgcggctgatctcttttatactggctccgggcatcagatagctatagtttaattttatacctatatatttattaatataatagttgagtccgatggagatatctttttgttctcctccccaaatggaggcatcctcatcgttgagtgtcaaatagttaaatcgtgaacaaacctccagactttttccttccggacgaccggcacatgcaacagattcatcgtacagataagtttctccggataaaagccaagagcactgaaggtaggctccttgtgccacatagttcttaaaagcattgtctcgttccacatgagtacgtatatattcactttgcaggcagaaacggtgataataaaccagtaattctgtgccaaattttatctgatacgctgcatgatcaatagtagccattgcaatatttcggttatcaatcgtactcacaccaggagatttatagataaatatgtttttatcttcttcatttaaggattcgttaggggtgcggtaattggccgcaaaacctatatgaataagcttcttgctatctaaaaccggacgatatactaccctgccatccaaagcatatccatgtgacgctttttttaggttgttgacttcattatccatgaatgcccctcctgacatataataacgtttgtttcggcaactataagtgattcccattcgcctgccgtttgttaatgcaagaacagctcctggagattgattaaagcgaatgtcgaaagtgctgcacatcatttctaaactaaacggttcgtagaattgtccgacttgtatagagtggttcttgtatgtgtactttgcaaaagcatcttttattgtcgctttattgccggtatagcctatttcaagtttcatatcccaattttgatatgcgacttttgcacctatccgaagatcactgaattcaactccattaccaaaattattatcattcttgagataaacaccgccatccagaagcatgcgtcctgtcactttacattgtagtttatccggattagactgtgctgaagatatcaaagcgtaagatatacctaatagataaaataaggtgtgttttaaatataaattcattcgttattagatttttagttttgctgtttatttcgactacaaaaatacatcaaaagaaatatagatgaaatgaatattataaattattgatataatggtatgcccaaccgcttgaaatattataatattaatgtaataaaattgatgtggagaattatcagcatagtggatcttataaaatattatatccatatctgttggattataatagtttacgtgaattattcgatagagagtattataaagcctatctaaaaaactccttaggatatttttctttattcaaagtataatttgttttttactaaatattaatctgaaatttttttctttgctatacatcattgtgaatgagatcatttgttttgtgtgattatttgtaacttgatacttaaaaacaacagtttattctttatacggaataaaagacattattccgtattaaaaaagtctcttaaatatttgccatttaaaaataaaggtttacctttgcacccgaaatcaagaacgcttgatggcaatgcactcttagctcagctggtagagcaattgactcttaatcaatgggtccagggttcgagtccctgagggtgtacaagttaaaaaggaaaagctctgaaaatcattttttagagcttttcctttttaattatttcaggatataatgtaaaatctgaggagaatttctcttttctgataatacaaaaatccaaatgagttcaattaaatgccctatacaagtacgtccatttgctatctagaagttgttttatttcttcttatatatcacttctctaagtccagccataaaggagtacacataccagttcgctaaatgggagtatcgtctgattgacaggtgtaaaaccgaacagaggagcaatagaacgaatgaggcaaaaattgattttatacgtttgtcattgttcttatgaaatgttagcattcttgcgctgacatcagtttctttttaatgataatacccttcagattgaaaacttatatgtaaaattgatgaggatattgagttttatgtatttgacagtaaatagatggataattatagcaaaaagactggaaaaaaatggttttaattttgtttttaactccaaaacttactatctttaggaaattgattattattgggggcaattaataagtcctggcccacaggcgaatgatatgagaatacaatttgaaattaaagaaaaattacctgatattatcggggaaattctgaattccgaaaaatggatgacccttattaaggaagatatttcgggtaggaaattggttgtaatccgtgatcaggcattcgattcggaggcaactgtggagatttactctcgcgaagtgactattaagacagcatggtccagatacacttatcggctgtttgttttaggagactgtgtatggtgtgagtataatggtgcttatcgtggattattagagcaaaaactgttgccatctatcacccctaaagagagtctgttggattcggaagttctggacagctcattgtatgggcatgaaaagaagaaacttcgggaatatgctgaagataatcttaaactgaagaaattcagacgtgagaattttaatgaaaatcgtacgggggtagctccttttgatcatccaaagaaagtatatgatgaattcattaaggaagactacattgctccttcctcgaaggagaataataaatagaaataatgaaaggaggacatacgattgtatagatcctcctttattttttatagattctactctatatcttccatttcgggtgcatcatgtatactttttacgataaatgtccatataatgaacaaaaagaatagatagaaaaatagatagtccatagttactttttttatattgttgatataacagatcagatattaaaaagatgctcacattatattttttttgcaataccgataaaaaatgcattgcctttttgaagcaatgcattttctttgaagtcaatatttaataaaacagttattaatcatcggaatagccatactctttgagaatatttctgcctatttcttcaagacaacttttcaagaacttccatatttctttcatgattatattcgctaatgtttattgatataacaaaagtgataatttatgggtcgaatattattcttgtttttttcagattttatcgttatttgatttgtatcaagtaaacaatacaaaactgccagttgtttatattataaaatctaaaaatataaacttatgatttacaaatttttatttcctctaaaaccagacagtgccggagcatctctattcttgttgattctaagaatttcgtttggcctgttgttgatgaatcatggtatacaaaagtggagcaattttcaggaactttccacatcctttcctgatccattagggctgggttctcccctctctttaggattggctgtttttgcagagttagcatgttcaatggcctttattataggcttcttatatagattggctatgattccgatgatttttactatggtaattgcattctttgttattcatgccaatgatgtttttgcaatgaaagagctggcgttagtatatctgattatttttgttttgatgtatattagtggtcccgggaaatattcagttgattatgtgataggacgacaactcaaaaacaaacgaaaattgtaaatggaaaagtaacctaaatttgttctctttgactaaaaagattatatttgcagcatataactggatcatttttatataaatgatctataatattaacgtaataacaaataataaatttagtatgaaaaagaacagattgactttggttgctgccatttttctcagtggtactatcctatttagttcatgtgtaggatcattcggactgtttaatcgtatttcttcctggaaccagtctattggtacgaaatttgtaaatgaacttgtttttcttgctttaaatatcgttccggtatatggcgttgcttatctggcagacgctttggttatcaattctattgagttctggagtggcaccaacccgatggctaatgtaggtgatgttaagaaagtgaaaggtgagaatggtgattatttagtaaagactcttgaaaatggctattctattactaaagaaggtgaagattcagctatggagttgatttataataaagaagcaaatacttggaatgttgttgccgatggagttagcacagagctattgaaaatgaacaatgacggtactgctgaaatgaacttaccgaatggagataaaatgaatgtaactcttgatgcacaaggtatgatggctgcacgtcaggctacaatgggcggactgctctttgctgcacgttaattattgaaataaataaaatataaagatgaaacttaaactctgagagtaagtttcatcttttttgtatctatctccctgtaatgtataactagaatggatagcctactgcaaaatggaatgcgaaatcgcggctgaatctaggatgaataataggatagcgctcttttgcttttttatatttaggatttatagctttcatccccccatcaaagcgaagtacaaaaaagtctaagtcaagtctgagccctaatccataagcaacggcaatctgcttataaaacttatcaaattcaaaaacaccacccggctgattttcatattcgcgaatagtccatatatttcctgcatcgataaatgctgctccacgaaacttccagaatagacgagtacggtattcgatacttgcatccagtttaatatctccggattgattcatgaaattcccatctccggcaaaggaacccggtcctaaattgcgtacggaccatcctctaacactgtttgctcctcctgaaaaatatcttttttcaaaaggaactactttggcatttccataaggaacagcgattcctattccggcatgaaatgcaagagaattacgatggtcaataataatatttttggcaaaatcaaaatctccttttaaatattgtgcatatggtatacctaaaatagcatattcgccatctttattttttctcatattaatcattttcgaaattccgtaaagaatattacctgctgattcgaagcctgcccgtatagaataagaattagttgtaattgtattattgacaagagttccacccgcactattatagctataattgtatcccatacgtacaatcaaacgattttcataattatatttgagaatataattatctttatccttattaatataatcttcctggaattgagacgaaatccaaggcagatagagataactgatatccaacaaatcgatgcgatgctgtattttctgtttttgtatccatttatagctccacgaagccgaggcaatggtacgtgagaactccggacgtaattgataattatattgcaagccgaattctgtagttgcttttattcgtcgtttaaagtcagacgtgagaaaaggaaacaagaaattggggaaattaatgcttgtttcgactccgtattcagtatagttatggtttttataacccggttgtaatcccgaaatagcctcgtatgctccacgaaactttaccatgaaggtttccgagccgcggaataaatttctatgttgaaaagaaacagatgcggcagctcccaaatctcctgcagaattagtgccttccagttcaaaagagatagatttatgcttgcttttagttagcatgacataacaatttaattgggtgctatcgccattttgagtttcgaaaaaacgaatattagtatatttgagcgccgatagtcgtccaaagtaagtataagtcttctgtacattacgttcgtcatataaatctccggatgcaaatctcaggttatccactaacactttgggacgtaaatatagcttgtctttatagtagatcggaaatccgttataatgcaaggaatcgttgatctcaatgctactcaaagctgacgattgcagaacatcataatcggtaatgaaattgattttgttaatcttatactgaaaatgctctttaggagtatctccgacataagttttataaggtaataagtgtaaagtgagatccacttgatgggtattgcgggcagtgtcagctgtataagtaatgtaatccttattaaatttataataaccgttacataatagatagtctgtaatgcgctgtcgttccgcatcaagtacatttacatcgaaaagcattccttctcttaacattgattgggtagaatcattccgaagatattctgctattttcttatcagaaatatcatatttcagtgtacgtacaatataaggtttgcctgaagtgatttcataaaataattttagctttttctttttcgtttttgtagttctttttacgctagctcccatatatcctaaattttgcactgctttagcaatttcttcttgcgagcgtatagcgtcggattcattgtatattaccggagcatctcctattttacgcaggaatcgattgaaccattttgtagaatcccgtccggaccaattatatacatatagctgggttttgatggtactgaaccatttagaattaggattctggcgaacataaagtcgcatgtccgaaggttttatttctttgttgtcagtatgtatttttacctcatccaatagataagagccatccggtacaaacttagtggcagagcacgaagccagtgacaaagcaagataaagaagaatcgtgtaaagaatccctttcttcatatacggtttttaatagattatgccaaacaagatacaaatataaaccatatttttcgttttgggaaataaaaatgccggaagagctgaaaagcatcttccggcatttttatagatgattatatcatttaagtgtaaaacggactggaagtgtaaaccgtgaattcacttcctgaccatttttttgttttcccggagtccagtcaggcattaaatttatgatccgtatggcctctgcgtcaagtgatggagatacacttttcacaactttcggatcaataattttaccatttttggtaacaacaaactgtatcacaacctgaccttcctgcttactttcaatagcttgtgccggataagtaatattcttgtagagaaactcgagacacgctttcattcctcccggaaattcgggagctgtgttcactatatcatatacctggtctcccaagatagatacactatccggtacagcttcttcttttgaagtgacagtgtctttcacttcggtagtggcctgatcattacttgttgttttgcttccacaattgctaaataataacagcatggctactgccgacaaaaatatcaggaatttacttttcataattctttgagttcttttttcgttcaacatttcaattagtttttaaaggtaatacttgagtgaatatttaaatttgctgcagccgttcaatatattccaaggattctgatatatacctattgtttaaagtttttctatatttaatagaggaggaactttttctaaaaacagtaaattataattcttttcttttattatatttcatatattattcgtaaaaggattctctactttgtatatcaatataatatcgtataacaaatctactaaaattaagtagattatacgattttatcaatgtaaatattgttaatgggaatgaaattaatccataaaaggaaggtaaatatgatagctaattaagaatatctttatagctttgccataaaatgagatttagatgagcatattaagtaaaaatagaataaaatatattcgttcgctggaattaaagaaaatcaggaaagaggaaaaagtttttttagcagaaggtccgaagcttgttggtgatgtattaggatatttcccttgtaaactattgatagcaacatctgattggcttgaggaacatcctgcagttcaagcagcagaagtcattgaagtaacttcagaggagctttcccgtaccagtctgttgaagacaccacaacaggtattagcattgtttgaacaacctgaatatgaaatcgatatggaagctatccgcaattctttgtgtttggctttggacgatatacaagatcctggaaatcttggtacgatcattcgtcttgccgattggttcggaattgagcacattttttgttcgcccaacacagttgatgtgttcaatcccaagacaatacaagccacaatgggaggaattgccagagtaaaagtgtattatacagctttaccggacttgatgcattcgttagggaatgtacctgtatatggtactcttttagatggggaaaatatgtatgaacaacccttgtcgaagaatggaattataataatgggcaacgaaggaaatggtatcagccctgagatagagaagctggtaaaccgtaagttatatatccctaactatcctgcagaacgagagacttcagaatcactaaatgttgctattgctactgcaattgtctgtgcagagtttcggcgacaggctgcattgtaacaaaattgaaaggatataataaataagcccgccatttcatatttatggtaactttcggaatataaatactttgtttttctatattagtaaagttaaacaaagtatttatatctgattcttcttgtggagtcagtagtatgacacccggaaaccattctacagactctatttcttcgctgaaaggaaagatatgacaaatatatcctccttctatttctatcgcatattgctttagaaatccacttcccggaacaaataaataatgtgcagcaaaacgcttcatattctcttttaattattctgacaacgtaatggcctccttggattggtcctttgttgtctttccaattgctgtttctctttttctatctgcatctctttttcacgttgttccggtttaataggccggacatcattattaggacgattcagatcgttcggattcgtacgttgatggggtgatgatgcttgaatagtgtctttgggagttttcttctgaatagaatcgtcattacttttttcttttattgaatcagtttttagagaatctctacctatctgtgttattgaatcatttgcatgataacgggtcaatgaaatatcactgaccagaagtgttattgattcctcagatagcggacaaaagataaatccttttatctccttgatattcattgtatccgattggagacgaatattttgaatgccagatttaaaaatgtgcttcacacaactatgggtcactgtgtcgttttcataaacaatctgcatagccattattggagccattgttgaatcaggaatttcactcaggaagttatattgcattttccaaagcaacacatcgcgttttttgaagttcgtatcagaaggtagagtgaacgtaaatttattgtttaatggagcctctgttaattgagcaattcgctgccatgcccaaacatcgatgctgtcacccggagcagacatcttaggtttattgtcacgtaatgcaatcagatggttgatggcattttgctgcgctttcagtcttttgttcactttctcatagatttccgataatatttttgtatttcgggtataccataccattgatgagtcgaaaacttcttctgttgtaccatactttttgaatactgcttcgacgtacaatgcctttttatagttctcaccaccaggcatgttctctcccatcgctttggcaatgtgataatcgtataataaattttccatctccgattctgatatgacgctgtccggccttttcaccttacaagcagatacaatcagtaccaaaagacaaatacaacataattgaaatcggaaaaactttttcattacctgttttttactttttagtcacagaatgatgatatgaatcattcaggtatttgctgtagaatagtaataaggcaataattccgcaactaatggcggcatctgcaaaattaaagatcggactgaagaaaataaaatgttctcctccgacaaaaggcatccatgtcggccagttggtatcaatgatcgggaaatagaacatatcgacaactttaccatagagccaagtagaataaccgccgccatcaggcatgaaactggctatttgtgaatgtgtactttcgttgaagatgactccatagaatacactgtcgatgatattacccaatgcaccggttagaattaatgatacacagataatatatccggtctttaatcctctttttacgattttgtatagataccatcctattaatcctactgcaacgattcggaatgtagttaaaaagagtttcccaaaaagctccattccaaacgccataccattattttcagtgaaatagatataaaaccagtccgtaatgcgaatactttcatgccaatacatgtgagttttgatccaaatctttatgacctgatcaataatcaagacagaaaaaatgacgagtatagcgatttgtcctttcgtgagtagttttttcatctttgttaagctatcagttatacaagttacgagctaccaatgacaatcaaaaagaggaacacaatatagttgtgtgaaacccttgtttcttgtaacaggtagctcgtagcctactatttatttctttccactgttctttgcttcgatgctcagtgtagcatgaggcacagcacgcagacgctctgcaggaattaactttccagtttcgcggcagatgccatacgtcttattctcgatacgtaccaaagcagcttgcaagccttgaataaacttcaactggcgttgtgccaaacgtgtggtttcttcttttgacaacgtattcgctccttcttccaaaaccttatatgtaggagacgtgtcatctgtatcgtttccgtccagtcccattagacttagttttaactgttcatagtcacgttgtgctaattccagtttttcattaatgatggcgcggaattcttccagttccgcatccgaatatcttgtcttttctgccataacttttactgtttatagattattagtattagaattattctttcactacattcacaaacaaagagaagtcgtcgaaattcaattctgttccgtcttttacttcatctgctaaagtaagggatgtacccaaaacttggttacaaatataactattatattcatttaccgcatcatcagtctgcggatttttagataatgttaattttattttgtctgtaatctcgaaaccgcttgatttacggatattttgaatgcgatttaccaattcacgagcaattccttcacgacggagttcgtctgtcacggtaacctcaagtgcaacagtcagtttcccttcattggcaaccaaccatcccggaatatcttcactgaagatttccacatccgccgattctatcacagcttctgctccgcccaaatcaaaggtgtacttaccattcttttcaagttctgcaatagcttcttgtgacatttctgctacagcagctgctacagctttcatttgttttccgaattttggtcctagttttttgaagtcacacttcacttttttcaccagaacacctgccgcaccatccacaaacttgatctcttttacgttcacttcgctcatgattaatactttcacggcttcgatatgcgctttttgaacttcatctaccacgggaatcataatacactgcaatggctggcgaaccttaatgtttactttacggcgtaatgccagcaccatggaagtgacatcttgtgccatttgcatttgtgcttccagttctttatcaaccattttctcattgtattccgggaatttggcaagatggacagatacaacgttatcacgacctgttactccgatcaaatcactgtacaagcggtctgcatagaatggagcgataggtgccatcagtttggctacagtctccaaacatgtatacagagtctgatatgcagagagcttatcttgagtgaatccaccaccccagaaacgtttacggttcaggcgaacataccagttagacagattatcatttacaaaatctgaaattaaacgtccggctttagtcggttcatattcattgtagcaagtatctacctcttttactaatgtattcaagacggatagaatccatcggtcaatttccggacgctcattcatcggaagatcggcttctttgtattcaaaaccgtctacattggcatacagggcaaagaaagaataagtattgtataacgttccgaagaatttacgacgtacctcttcaatgccatcaacatcaaacttcaggttgtcccatggagaagagttagtgatcatataccagcgtaacggatcagagccatattgttcaatagtagagaatgggtcaacagcattacctaaacgtttagacatcttgttgccatttttatctaatactaatccattggaaataacagccttataagagacgctatcgaataccattgttgcaatggcatgtaaagtaaagaaccatccgcgagtctggtctactccttccgctataaaatcggccgggtatacctgatgactatccaacaattctttattttcaaatggataatgaatctgggcatacggcattgcgcccgaatcaaaccatacgtcgatcaagtctgcttcacgtttcatcggcttcccgtcctttgagacaaggataatatcgtctacataagggcgatgaagatctatcttattataattctcttcattatattcacccggtacgaaacctttatctttataaggattcgactgcatatatcctgcagcgactgatttttctatttcattatatagctcttcaaccgactcgatacatttttcgtcactgttatcttctgttcgccaaatcggtaatggagtaccccaataacgagaacggcttaagttccagtcattcaggttttccagccattttccaaaacgaccggttccggtagactccggtttccagttaatagtcttattcaattctatcattcgttctttgcaagctgtagaacgaataaaccagctgtccagcggataatatagtaccggtttatctgtacgccagcaatggggataattatgcacatgcttctctattttgaaagcttgattattaaccttcatcatcatacagatacttacatccaatgactcatcctgatcggacaggtttgggtcatatgcattcttcacaaatcggccagcatactctttatataaatctacgttaacgcgctgttttataaagtcttcatccaattcatctaaagtatagaatttaccggtcaaatctaccatcggacgaagttctccctttttattaaccaactgtagcggaggtatgccggcagcttttgctacttgggcgtcatcggcaccaaatgtaggtgcaatatgtacgatacctgtaccgtcttccgtcgttacataatcgcccaaaattactctgaaagcaccttcgcccggatttacccacggaattaattgctcgtattccatgcctactaaatcaggacctttatattcagctatcactttgaaaggaaccaacttatcacctgccttataatcttccagcttcagttcggctgctttcggattaaaatgtgcattcaataacgcctttgccaataccaccgtgatgggttgtcctgtatatgcgttatatgattgaactgctacataatcaattttagggccgacacagagtgcggtatttgaaggtaatgtccatggagtagtggtccatgccaggaaataaggagtgccccattgtgccatttccggtttggggttcttcattttgaattgtgccactactgttgtatctttcacgtcccgataacatcccggttgattcagttcgtgtgaacttaatccggttcctgctgccggagaatagggttggatggtgtatcctttatacagtaatccttttttatacaattgttttagcaaccaccacaaggtttcgatgtaacgattatcatatgtaatgtatggatgcttcatatccacccaatagcccattttgtgagtcaggtcttcccattcctttgtaaacttcatcacatcctgacgacagtgagcattgtattcggctactgaaattgtttttccaatatcctcttttgtgattcccaaagacttttcaacccccaactcaacaggaagtccgtgtgtgtcccaaccggctttacgtttcacctgatagcccttcatcgttttgtaacgacagaaaatatctttgatagaacgagccattacgtggtgaatacccggcataccgttagctgatggaggtccttcaaaaaatacaaacgaaggacagccttcacgttctgtcatactcttggcgaaaacttggttttcgtcccattttttcaacacgtccttattcaccttcgaaaggtcgaactgcgaatattcggcaaatttcttgctcatggctatatttacaattttactatattacaatttaagattgggataccctccctattttaagggtgcaaatgtacaaaaacattcgttttcatacaagaaaaggctttttaatttcagtatgatagaaaaggctatcttgtgaaaagagtgtaaaaagtagtaaggggggtgaaacaaaaaactacatgtcttgtttatcagtgaaattttaaaacctatatgttatgaattacggtataagtgtattgttcagagcaattcctttggcaatggctctgttttgttttggctacggggcgtttatcagtgcatatggcgatgactctaaccgactagtagcaggtccggtagttttttcattaggtatgatttgcattgcattatttgcaacagccgctactattatccggcaaatcatacatacttacgggcgaggttctttatatgcattgcctattatcggttatctggccgctgttgtcacaattattggcggaatttgcatgtttacccgatctacctctgcctcctctttcgtagctggacatgtagttgccggagtgggactgataactacttgtgtagcaaccgcagcaacatcttctacccgtttttcattgattcctgccaactcaaaaatgattggtaacggtattcctgaaggagcgtttaccaagggccaagagcgtatattaaaaacaatagctatcactatatcgttgattgcctggatatgggctttcgttttattagccaagagtgatgtacatcctgcttatttcgtagcagggcatgtgatggtaggtttagcttgcatttgcacaagcctgattgctttggttgctactattgcccgtcaaatcagaaatgtgtatacggatagagaacgtaaaagatggccaaaactcgtattgttgatgggaaccgtttcgcttctttggggactgtttgttattttttccgattcaagcaccactaacggagtaatcggatacatcatgattgggcttgggctggtttgttacagcatttcaagtaaagtaattctgctggcgaaaatttggggaagagaatttgctttggccaaccgcatccctttgattccggtattgacggcgttggcctgtttgtttctggcttctttcgtttttgaattgggtacgacgcatgatgattattttatccctgcacgcgtattagccggtttgggtgccatttgcttcactctcttttcaattgtcagtattcttgagagtggaacatcttcaaaataaatataaggatatcaaaactcaccacagaggacacagagtaacacagaatcgattttaaattgttgattattaataaaaaaaagttctgtgatactccttgttactccgtggtgaaaagagttttgataccctcttattcataaaatttattgagtgagatataatattctaatcgggaattgggtaatgtgaatgacatgtaattgccaaaatatacagttgggcagccggtttcgccaagaacttttcctgcatgagattttttaatggcagatgcaaatgtcgaggctccggaataagtggattcatttaccaatactgtaactgatcctttataaatgtctgctttatcccggtttccctctacgaaagaatcccgaatagcaaataaagaaccgtcaggtaaatttttgatctcttcataggtttccggatgtttttgctcattgtaccgttttgagtatgaactgatttttaaatcagttttgatatataatatataagcatcatgcgataagtatgacagaagcatgtcaactccggcacttgaccctcctttgttattcctgacatctataaccaaattgggtacatgttctctgttaatcaccgaaaagactgagtcacaaaattgttttagttgtggtaattgatataagttcattatttgcagagtagcagtctgtttatccggacttagagtataaacaaattgtggcagacttttgccaagtcgtgcttttaaaacagggaaggcatctgcttgactgataccattcaatgattctttccagatcttttttcctcttttaattgtaaaatcatatttttcaccccaattatatttataccatagcaaagtagaaagataactggtcaattgattttccttaatagcgtttcctttttcagctcccagtaagagatacaattggcttaatatggtttgactatttatattattcatacatattatttcatcattttcctgtattgaacaggatattagaggaaaatcaaccaatatcttattctctactatttttaagcgtagaggcagagtcagccctccattattcaaatagtcaattctgtcttgagtagcaggaattgtgaaattagtatgaccatctttaacagatgcaacaaatggagagactataaagtaaaaatcagaaaggtttcgttctttattcaacaaacaatatattgaatcatgtttcttttcaaattctttttgtgtttgatacacaaataagtccggatgtacctgatgtagtaagctatataaggtgtcaaaatcttccttttgctggcgggaggttagtatctgagcatttattgggatactgagattacataaaataattgtcatcagaattaaagatggagttttcatgttttgccgttttaaaattagacattggtgattaaagctatttagtgaatgctaatatagataatctttttggaaaactactttattctaagtactagtttatattttatattccaatcatccccagccgatattatgaatagtagtgtgcctttctaatttaaatctacttcaaaattgtatttaatacaaattaatagcccttttatacgtttattggcatatttttacttactttgcaccatataaaggcacaactatgcacaaaaaactattagtgactgcatattttgtaatagcagcattgttgcaaactctggcaggcaatttccccttatctttttttgcattccctctgaatgtgattgtagcagttatatggatttattcgttatggcgtctctataaagaagggaataagttgccattaacccgttttctgttatcttcccgaacaagtgttctatcgatcctattattaataggtggcagtctggttatcggcttgtttcctcagttatcggaagcagaagcagattccattccaggggttttagcttcgttgggatgctataatttcatgatttcctggatattcattgccattcttttccttttattgagtaatttggcaatggtgattattcatgctttttatcattgtgtgccggcaaagaagcgttttatcctgaaccatttgggattatggctcgctttatttgccggatttttcggtagcagtgatgttcagactttacgcatcccgctttatgccggacaaccgggacgcgaagcttatagtatggatgggaaagcctattatctggattatgaactggaactctattctttcaatacagaatattatccgaacgggatgccttcgcgttttgctgcagatgtgcgtattggaaaccggagaactacacttgaagtaaatcatccccacagttaccgtttgggagaagacatttacctgaccggatatgatacacacaacatgggaaatacccagtattgtatccttcaaatagttcgtcaaccttggaaatatgttatggtagttggcattttgatgatgttgacaggagctgttttgttatttattaatggtcctaaaaagctgaaacatgataacctgggataacttctatttgttcgcagtcgcttcaatctgtctttggttgacaggagctatatttgcacttcgttcgtcagtacgaagtagaatggctgttgtgctcactatagcaggcatcacctgcttgggaatattcattgccgggctgtggatatctctgcaacgtcccccactccgcactatgggcgagacccgtttatggtactctttctttatgggtattgccgggttattgacttatattcgttggaaatatcgatggatactttctttctccaccttattgtccactgtctttgtaataatcaatctgctgaaaccggagatacatgaccagtcgcttatgccggctttgcaaagtatttggtttattccccatgtcaccgtctatatgttctcctattccgtattgggatgtgctttcatcatagccctctgcggtcttgtccatcacaaagaagagtacctggtgacagcagacaatctggtctattccggagtggcgtttttgtcaatcggaatgcttctcgggtctttgtgggctaaggaggcatggggtaattattggagttgggaccccaaagaaacctgggcggtagtaacctggatgggatacctattatatatacatctgcgcttgcgaaggaagtttcgcaaaaggatgctgtacgtcatactgattttttcctttctggcattgcagatgtgctggtatggagtgaattatttgccttcggctcaacaaagtgtacatttatacaatcgtaataattaacttaaagaatgcacaatgaagaaaagtacaaaatttatcatcgcattgcttgtgacagtcggggcactggctatcacttatcgcgttgtaaaccaagcaccgtcgaaagatcttgctgctgatgctcagatgcaggaaatcattacttcggggggatgtttacaatgtcattcgggtagtccggaccttcctttctatgccaactggcccgttgcaagcggaatggtacagaaagacgtaacgcaaggttatcgtgctttcgacatgaccgaaatggctgaagctctgaaagccggtaagcctgtcggaaaagtagcacttgctaaagtcgaaaaagtaatcatggacggaacgatgcccaaacatgcttattacatggtacattggggatcgagcgtaacagatgccaagaaggaaatggctatggcatgggttaaacaacatcgcttggcacattatgctaacggactggctgccgccgagtttgccaatgaaccgatacgtcccatcgcagattctattcctgtggatatgcgtaaagtcatcttgggagatatgctctatcatgacactcgcctttcggctgataacaccgtttcatgtgcttcgtgtcacggattgaataccggtggtgtggacaataagcaatattcggaaggtgtaggcggacagttcggaggcgtaaatgctccgacagtgtataacgccgcttacaatttcgtccagttctgggatggacgtgccggaacacttgccgagcaggctgccggacctcctttgaatccggtcgagatggcctgtcagtcatttgatgaaatcattgcgaaactggagcaggatgcaaactttaccaaagcctttttggctgtatatcccgatggttattccgaacagaatatcacgaatgcgatcgaggagtttgaaaagacactgcttactccgaattcccgtttcgacctttatctgaaaggtgaaaagactgccattaacgatatagagctggccggatacgaattgtttaagaaatacgattgtgctacatgtcatgtcggtgagacactgggcggccagtcttacgaactgatgggcgtaaagagagactacttcgcagatcgcggcattgaattgacagaagaagataacggacgtttcaaacaaacccggaacgaacgtgacaaacatcgctttaaagtgcccggtttgagaaacattgccctgacggctccttacttccatgacggcagtatgaaaacaatgaaagaggctgtagattacatggccaaatatcagatggatctgaatcttccggaagatgaactgaataaaatcgttgcttttctggagacactgaccggggagtacaaaggtaagcccctgaccaacgataatcagaccaaagcattataacctctctcaggtagatataagaaaaggatactctttacagggtatcctttttaattttatgttataaatggattagttacgaggcagagcttctttaacaaccatctgacggccttcgtattcagctccgttcaactcagagatcacattttttgcttcatcgtcgttcggcatttcaacgaatgcgaatccttttgatttgcgagtctcgcgatcgatgatcagttttactgaatcaactgttccgtactcttccattacttgtctcaaatctgcttccttaacacgatagctaaggtttccaatgtacatgttcataaaataaaaaaaataaaaattgataaataaatttagaaacaacagaagtttgagattagatctggattcaactgattcagtagaaaatagagtaaaataaaacaatcaattgttttcgtcggtaaagtacgtcataatatttggattatcaactataaaagggcatttatttttcaataaacgcccttttcttttacagatgtatctctgttaatgcttactcagatagttggctactccgtcttcggtagctttcatggcgtctttgcctttcgaccaattggccggacaaacctcaccatactcttcaaaatgttgtaaagcgtctaccatgcgcaatacttcatccacgttacgtcccagcggcaagtcgttgatgacgcaatgtcttactacgccctccttgtcgatcaggaacagaccacggaaagctaccggtgtcccttcgcatacccaattgccattttcatcgggggcatagcttccggccagcactccataactctcagagattgacttagaaaagtcggacacaataggatacttcacgccttggatacctccttcgttcttgggcatctgcaaccaagagaagtgagaatattcagagtcgaccgaacaacctaccacagcgacatcacgtttttcaaactcttcgagcttttcctgaaatgcgtgcagttcggtggggcatacaaaagtgaagtccatcgggtagaagaagaatactacgtattttttccctttatactgatccaacgaaaagttctgaacgatttcatgcccattgattacagccgtggcatcgaatttcggcgcttgttttccaattaatgatctcataattctcttattttagaagttattaaatgattcatttcggaaacaaagctatcagaatctttgtttactgccaaagtttaatgatatataatatctatcggttaatagacaaaatctattaaggcttcttgaagcgcacttcatatacatcatttctcctgtccttcaggttgcgaacgctgccgtaagtgtgtagttcgttcaataagtcgagatctacatccgaaaccaggatcatttctgtattcggagttgcttcggcacgctttccgtctgtcggaaaagcgaaatcgcaaggtgtgaatactcccgactgagcatattgaatatccatattgtgcacacggggaagattgcctacactgccggctattaccacaaagcattcgttctcaatggcacgtgcctgtgcgcagacccgaacacgcgaataagcattttgtgtatcggtgagaaacggtacaaacagaatctgcattccctggtcggccatcagacgggagagttccggaaattccacatcataacagatcagtatgcctatctttgcacagtccgtatcgaatgttttaagctgtttgccgccgctcagtccccaactctttatctcgtccggggtgacatggagcttttcgtacatttcgtaagttccgtcgcgtcggcaaagaaatccggcattgtacagcaatccgtcttctttgatcagcggcatacttcctgtgatgatattgatgttgtagctgattgccagattaatgaagcgatcgcggatttcttcggtatattgggccagcccgcggatggcctgtgattcgcctttgtcattgtactttgacatcaacggtgcattaaagtattcggggaaaagcacaaaatcactcttatagtcggataccgcatctacaaaaaattctacctgttcgaagagatcgtccaaggtcttataactacgcatctgccactgcaccaatcctacacggaccgttgttttgggggccagatattcttgcgtaggcggctgatagtaaatgttgtcccactgcaagagacaggcgtagtgttttgattcttcatcgttcggcaaataattggtcatcaccttgcgtacgtgaaaatcattggagagttgaaaagtgagcaccggatcatagatttcgcgctgacgaacacggtcgatgtactctttgggacgcatcttgtcggcatacttatggtaattcgggatgcgaccgccaaacataatcgctttcagattcagcgtttcgcaaagttctttgcgatattcgtacatgcgccgagctagtcgtaacccgcgatattcgggatggataaagacctcgatgccatataagatattcccttggggagaatgggtattgaaagtctccttccccgtgacctgggcataggtatgatcgtttttcactttatcatattctacaatgatagagagtgcacagccgactatcttttcgtcgaccacagtaacaatttgtccttcggggaaaattttaattagtttctcaatctgctcgtgtgtccagaacacatcgcttccgtccgaatatacacgtgtaaacgattgggataattgagcgtaatcttcaatctggaggttacggatctgtaccttattgattttatgaggataatccatagtaacttgtattaaaaaaacattgcaaaggtaagctttatctttataaccggacagctttcatataattttatacctttgcatttcataacaactatcaagagtatgcgtaaatttattatttctttctgctgctatgtcttctttatttttactttggcagcgcaggacaaggctccgcattacaccgtaattgtttcattggatgccttccgctgggattatccggcaatgtatgatacccctaacctgaaccagatggcccgcgagggagtaaaggcgaccatgcttccctcctatccggcgtctactttccccaaccactatacattggctacgggattggtgcctgaccacaacggtattatcaacaacactttctgggatgtaaaacgtcgtcgccaatactctatgggagatcccgccacgcgaaacaatcccgactactatctgggtgaaccgatctggattacggcacaaaagcagggagtgaagacaggaaacgtttattgggttggttcggatattgccatcaaaggcggttatcctacttactaccgggaatatgccgagaagcctcgtcttacttttgaacagcgggtggattcgaccatcgctcttctggaaaagccggaagcggaacgtccccgtctcgttatgctttactttgaagagccggatggcgtgacccatcatcacggcccccgcagtgtagaagctgctgccattatacaccgtatggatagtttagtcggaatgttgcggcagggaattgcatcgcttcctttcggtaaggatgtcaacctgattgtcaccgccgatcatggaatgaccgagatcagtgacgaccgcgtggtagacatgaataagtatctgcgtccggaatggtgtgaggctgtggatggacggactccgacttctatcttcacaaaaccggaatatcgcgactcggtatacaatgccttgaaagatgtaccccatattcatgtgtggaaaaaggaggagattcctgccgaattaaactatggaagcagtgaccgtatcggtgatattgtagtggctcccgagttaggatggcaatttaccgatgtaccacgtgccttgaaaggtgctcatggatattttccgcaaagtccggatatgcaggtaatgtttcgtgcctgtgggcccgactttaaggcagggtatgaatcgaagggatttgtcaatgtggatatctacccgctgttggcccatttattgaaaattactccggagaagacagatggacagttcgaaagaataaaagacattctgaaagatgtgtctttttgataatttattgcgtgtaaaatcgcatctttccgtccatcgggcaagatgactaaaaaaatcgtctgcaatttgaatcagcgtttttaaaaaagaaatccatctatatgtatttactgaaatatatataggtggattctctttttaatatctctatgataaataaatagggtaaacagttatcattcttctattttgtttctatcgtacagatataaccaaatagagaaatatcatccccgtttctgctcccattcaatatcattagaccatacgaagcatatgtagtaaccatccggaccggatggttacgccttaatgagtggatgaagtaagctttttgcccgtttgcttactttaattcatctaaaagtcggtagctccacccctttcagcttgcttctgaaaggggtgaaactaccgactatggtttgctacgcttccggtttaccggattctcaagaagtgcatgttagccaaaaggatgtatatgctgcattcggtcggcatttacttcgatttgctttcaatgtggaatgacgtaagatctactccggttaacgcttcttccaaagtttgctcatatcctccaatgtttttcctttggtttccggcacccaacgccatacgaagagggcggcaatcacacaaatgattccgtaaagactgtaggcaaacatcggactgaaatcatagagcgcggggaacgtagatgaaacaatgtagttgaatatccattgaaatgccacagcaatggccaccgctttgccacggatggtgttgggaaagatttcggatatcagtacccaacagatgggtccccatgacatcatgaagaaagctgcatatacaatgaccgacagtacgggaagtagccccttgatgcccatactgtcacacaaggcgactgcaaaggctccgacagccataccgacggaaccgatgataagcaacggtttccgtccgaaacggtcgacggtgaaaatagctatcagtgtaaagacgatattgacaatgcccatgatgacggtttgcatcattcctccgccttcggcaccggcattttcgaatattcgcggcgcataatagagcacggcgttgatgccgatggcttgctggaagacagaaagcagaataccgataacaatcaccgccgcaccgtaggtgaacagcttctctgtcttttcctgcgaagtggcttttatttcggcaagaatctcttgtgcttttgtggctccattcacttttttgagaatggaataagccttctgatcctgatcaatcatcaccagataacggggagttttgggtacgaagaagagtaacatgccgaagaaagctgccggaaaggcttcggaaccgaacatatagcgccacccttcggtaacggtccacatatccgactcgctacttacagaaagtgtaccggcagcatctttcaggataacaggattctggtggtcgcccaagatcaggtagtttacaaagtaaaccacaagcatgccgaagattatggcaaactgattgcacgacaccagtgtaccgcgaatgttggagggagctatctcggcaatatacatgggacaaacagcggacgccagtcccactccgatgcctcccagaatgcggtagagattaaaggtgataagcaggttcatattagccttcccatattcaaagaacaggaattcaggataataagaccccagtgccgaaaggaagaaaagtacggcggccagccgtagtgagttgcggcgtcccagccgtgaagcgaagatgccggacaatgcaccacccaagacgcaaccgatcagtgcactcgaggaggtgatgccgtgcatcactttgtcgtattgaaaatctgtggctgtgaggaagaaggcttcgagccctttctcagctcctgaaattacagcggtatcatagccgaacagcaatccgcccaggatggctaccgatgtaatggaatacaggtagagcttgctaccctcgttggtatgattcatggcattagcttttttgaattacggtctgcaggcaacaagagcctgcagaccgtgaaatacggacttataatgagtagatattaacgagtgcttcatacagttcctgttggccgctggtctgcttcggctctccgttggctttggcataagcaaccagttcctccaggctgagtttcccttcttcgaactccttgcctttgcccgcatcgaacgaggcataacggtcggacaacattttctggtaaggagactcattgagcagattggctgcactttccaaggcacgtgccatagcatccattccggcaatatgtgcgataaagatatcttccgggtcagtagagttccggcgagttttggcatcgaagtttgtaccgccgttacccaatccgtcgttacggataatctgcatcatggcttgtgtcagttcgaagttgtcaatcggaaattgatccgtatcccatccgttctgataatcgccgcggtttgcgtcgatagaccccaacattccgttgtctacagccaccgccagttcatgttcgaacgtatgtcctgcaagggtggcatgattcacttcgatattcactttgaagtcttgatccagtccgtgagccttcaggaagccgataactgtctctgtatcgacatcatactgatgctttgtcggttccatgggtttcggttcaatcaggaaagtgcccttgaaaccacgtgcacgtccataatcacgggcaatggtcagcatctgtgccagatgttctttttcgcgtttctgatcagtattcagcaacgacatatacccttcgcgtccaccccaaaagacataattcgtacctcccagttcaatggtggcatcaatcgcattctttatctggacagcggcacgggccacaacatcaaaatcgggattggtggctgcgccgttcatgtaacgcgcgtggctgaatacattggccgttccccacaacagtttgatgcctgtttcggcctgtttctgcttagcataagcaaccagctctttcaggttggcctcataggcttcgatgctgtcggcttccgtaaccagatcgacatcatggaagcaataatacccgatgcccattttctgcataaactcgaaaccggcatccattttattcttggcagcctgcacgggatcagggtcaccgttccatgggaactgtttggttccgcctccaaactggtcaccgccttcggcacaaagtgtatgccaccatgccattgcaaactttaaccaatctttcatactacgcccgttaatcattttctcggcattgtaatagcgaaatgccatcgggttcttactgtctttaccttcaaatttaattttccctatacccgggaagtactcttttgttgccatcttatttaaaattttaggggctttgccctttcttcttcccaaaggaagaagaaagaaagccggaatgattaatattctattcttaatgattacttattctctgtttctgtctgcatggactgagtcagacattgtttccaccgtgcgtaagcatcagtgtattcctgttgtttgccggcatccggttctacgactgtcagcttatcgagagttgcgaatgcttcttcatggtttttatatatgcccgctcccattcctgctcctttggctgcaccaacggaaccgtctgtgtcatagagttcgatggtggcttccgtcgtaccggccagtgtctcgcgaaaaacggaactcagaaacatattggcgtgtccggcatggatctttttaacggggatgcccatctcttccataatgtcgatgccatatttaaatgaaaagacgattccttcctgtgccgcccggatcagatgtgatttgtcatgcctgttgaagtctacgccgtgtataccgcagccggttgcccgattatcgagcattcgttctgctccgttgccgaaaggaaggatgctgatacctgcactgccgatgggaacggatgaagcaaaacggttcatctcggcgtacgaaataccttcgggggcaacattgcgcctgatccacgagttgagaatccccgttccattaatacagagcaatacgccgaggcggggatcggtagcagtatggttgacatgggcaaaggtgttgacacgtgactgcggatcataattgatttcgccgtttactccgtatacgactcccgatgttccggctgtggaagctatctcacccggattgaacacattcagggaaagagcgttgttgggctggtctcctgcacggtaagtgatcggagtgccttcttgtagcccgagttcccgggcagccgtacctgtcagtcgcccctgttcggcgaaagtaggccggatgtcggctatcagcgaaggatcgattccgtaatattgcatcaggaagtcggccgggcggttgtttcggaagtcccaaaacattccttcggagagtccctctattgtcgtacatacttcaccgctcagtttcatggcgatgtaatctcccggcaacatgattttatcgatctgttcatagatatccggttcgttttctttcacccatgccagttttgaagcagtaaagtttccgggagaattaagcaaatgtgccagacagaacttctcaccgattgcctcgaatgccctctgcccataggagaccgcacgtgaatcgcaccagataatggccggacgcagtgtgcgttgccgtttgtccacacacaccagaccgtgcatctgataagagatgccgatggctttgatgtctttggcatctacccgtgattccgatagaatggatcgggtggagagtttcaagttctcccaccaactttccggttcttgctctgcccatctgggacgtatggcaatgatgcccgcctctgttttcggaaagaacgcagaagcgacacatttacctgtttctgcatctaccaggctcgccttgaccgaagagctgcctatatcataacctaataaaaacatgatactgtttattaatttatttgtagtttaatattaaatcccgattgggggttatcgtcttgtcttattatatatcttcctgtcgaacttataataacgggctgcccgatgggctactccggtttgtttctcttccagcggtacaacgtagtccatcagagctatctttttatggaagttacgcacatccactgctttgtcatataccagttcgaacaggattcgtaactgagatgcagtgaacttacgcggcaacaagtcgaatagcatcgaaggattaaactctacgaattgccggatataagtcagcgcctctctgattatcaagttatggtcgaaagccaatgtctttatgtctttcaacgctacccaacaggcttgaaattcatccagattcttgtccagtgcccagtctatctttaccatcgacagataagctatggtgactatgcgttccactttcgattgcatagcccgttccaaccaatgtacatctttgggattgctcgtccggtttttggaaccgaatgccttaaattgcatcaggttgacgtttcggataccggtcagttcgaataagacccgctgggctgcttcgtccaggtcctcatccatatagatcagacttccgggaagtttcatgtcacgataaacttttccgttttcctctcctatccgattaatcagcagaaccttgagctgttctccgtcaaaaccgatcactacacagtccactgagatgtgattgtttgccaatgggatttgtttgggtatgtcatgcataatattgagtctttgattgctgcaaatatagagatattatcatgcggtaaacaaataaataatatgctataaagcattgtttttcatatatatacatatcgtaaattttacactaaggagtattcatcttattgtatcgataacaatatgtatttctaccctcggtgaacgatagtaattgtagaaagtacagaaagccggggagtctttataatcagttctttcggtcgtcgcataccctcgagcgatacgagggacttattgtattttatagggtatgtcattttgtatcttctttgtttttatcctatctttgccaccaaactattaaaaaaactaaaatgaaaacttatccggtcgttctttccattgccggctccgactgttcgggcggggcaggcattcaggcagatataaaaacgatttctgctttgggagcatatgcggcatcggtaattactgctgttaccgtgcagaatacaagaggagtaaaagctgtgcatacagttcccgctgagatagtgcagggacagattgaagcggttatggaagatttgcgtccggatgccctgaaaataggtatggtgagtgaaccggcgcttgtgaagattattgccgggtgcctgctaaagtatcctcattgtccgatagtttatgatcccgtcatggtttcaaccagtggacggaagttgatggcaaaagatgcaatacagttgatcaaagaagaactttttccacttacaagcctgatcactcccaatctggatgaaacggaggtactgaccggaaagaaaatcacaacagcagaagagatgaaagaagctgcccggcaactttcagaagagtatcatacagcggtattggtgaaaggaggacatctggagggaaacgaaatgcaggatgtgctgtttaccgatgggaacgcctatatatataaggagaaaaagatagagagccggaatttgcatgggacgggatgcaccctttcttcttcgatcgccacttatctggcattaggacttcctatggaccaggcagttggcaaggcaaagagttatgtaagcaaagctattgatgccggcaaggaaataattatcggacatggcaacggaccgttatgtcacttctggggccctgagaaagcccggatatgggacgataataaggtagaataggctgaaaaacatattgtccattgcacaatttcaccaaatctgtgctatgatattgcaaaaatatataactttgcacccgcaaattaaattaaaaaacaaaaatatgaaagcatttgtattccccggtcaaggtgcccagttcgtaggtatgggtaaggacctgtatgaaacttcagctttagcaaaagaattgtttgaaaaagcaaatgatatcctgggatatcgcattacagatattatgttcaacggtacggacgaagatcttcgtcagaccaaggttactcagcctgctgtattcctccactctgttatttctgcactttgcatgggtgacgacttcaaacctgaaatgactgccggacactcactgggtgagttttctgcattggtcgctgccggcgctctgtcttttgaagacggcttaaaattggtttatgcacgtgctatggctatgcagaaagcttgtgaggcaactccttctacaatggctgctattatagctttaccggatgagaaagtagaagaaatctgtgcttctgttaccgctgaaggagaagtttgtgtacctgccaattacaactgtccgggacagattgtaatttccggatctgtaccgggtatcgaaaaagcttgtgaactgatgaaagcagccggagctaagcgtgcgcttccgttgaaagtaggcggtgcattccattctcctctgatggatcctgccaaagtagaattggaagctgccattaacgcgactgagttccacacaccgaaatgtccggtttatcagaatgtagatgccctgccccatacagacccgcaggaaatcaagaagaatctagttgctcagttgactgcttctgtacgttggacacagaccgtaaaaaatatggttgccgatggtgctaccgacttcacagaatgtggaccgggtgccgtattgcagggattgatcaagaagatcgactctacagtttcggctcacggaatagcataagtctattgatagaccactcttaacacacagcatcggaatctttatgtaggattccggtgctgtgtgtttttgttttaaggtcataagttactctcatcgttctatctgtaaagatcgctctggactgcaatgaagggacgcggacagtttacaacttttttgccaacacttttgttataattggataataaacctattttatccaatgaaagtacacgaatatcaggcaaaggagattttctccacttacggaatacctgtcgagaggcatgctttatgccatacggcagatggggctgtggctgcttatcaccgaatgggggtaaaccgggtagccataaaagcccaagtgctgaccggcgggcggggaaaagccggcggagtaaagttggccaataatgatagagatgtctaccaatacgctcaaactattttggagatgactataaaaggttatcccgtcaccaagattcttcttagtgaggctgtcaacattgcagccgaatattacatcagttttacgatagaccgtaatacgcgctctgtcacgctgattatgagtgcggccggtggtatggacatcgaggaagtagcccgccaatctccggaaaagataatacgttgcagcattgatcctctaatcggagttcccgattatctggcacataagtttgctttctctctctttgaacaagctgagcaagctaaccggatggcaactattattcaagatctttacaaagcatttattgaaaaagatgcttcacttgctgaaattaatccattggtacttacccctgttgggacattattggctattgatgccaaaatggtttttgatgataatgcactttatcgtcatccggacttacagaagttatcagagcccacagaagatgagaagttggaagcgattgccaaagaaagaggattcagctatgtgcgcatggacggcgagataggctgtatggttaatggagccggtctggctatgacaactatggatatgatcaagctttatggaggaaatccggctaatttccttgatattggcggtagttcaaatcctgtcaaggtgatagaagctatgagattattgctggatgacaaaaaagtcaaagtagtctttatcaatattttcggaggtatcacccgatgtgacgatgtagccatcggactcttacaggcgtttgagcagatacaaacggatattcctattattgtgcggcttacaggcactaatggaaatatgggacgtgaattattgcgtaagaataaccgttttcaagtggcccagacaatggaagaagctactaaaatggctataaaatcattaaagaaagaatcgatatgagcatacttattgataaatctacccgacttttggtgcagggtatcacaggcagggatggactttttcatgccaaaaagatggctgaatacggaacaaatgtggtgggcggaacatcacccggcaaaggaggaacaatgatagacgatacctttccggtattcaacaccatgcatgaggctgttcgccgaacgcaagccaatacatctgttattttcgtaccggcacgctttgctgccgatgctattatggaggctgccgatgccggtatccgactgataatttgtatcacagaaggaattcctacattggatgtaataaaggcctaccggtttgtcgaactgaagggagctaaactcattgggccgaattgccccggcctgatctctcccggagaaagtctggtaggtattcttccggggcaagtgttcactccgggcaatataggagtaatcagccgtagcggtacgttgacctatgaaatcgtatcacatctgactgctaaaggtatgggacagtccactgccattggtatgggaggtgatccggttgtcggactttattttcgtgatcttttgggaatgttacaaaatgatccgcaaactgatgctattgtgatgattggtgagattgggggtaacgcagaagagttggccgcaacatacattcgtgaacatgtgactaaacctgtggtggcatttattgcagggagatctgccccgccgggtaaacagatgggacatgccggagctattatatccggaagttccggttctgcaaccgaaaagatttcagcattggaagctgcaggaatcagagttgccggtgaaccctcggaaataccggatttactgaaaggcagtttctaaacaattctttttttaatttatcaaactacaaattaaaagttatgagtagacgtagacaattagagcatgaagtgtctttagctcaggaaagaataaaaaaagctcccaaagatactcctaaagaaattttgaagacgtgggaacaagagttagtcgacttggaattagaactcaataatctggttgacgacgaagaagacaacaatgaatgaatcacttctctttaatcacagaaaagcccgtacataaaaactgtacgggctttttcaaaggaaatagaatattctcccggctaccttcgggaatggctacgcataaagggtatacggctccctcaatttatcagttgtgtaacatttataataagacggaattggaggtactttgttccgcttcggctcatgttttaactgtttattttcatatttacctaattatccaatgattttcttgtgagatgtaatagaattactctataatttttgatgtacatcaaaaacaaatagtacaaaatggcatttttatcctatgtcaattcaatcatcatatatctcccttacatttgtcatgttttcaaggtataacataaaaagtagagattatgaaatgggtaaaaagattgttcgatagaatcggtagttccgattctatgatttggggctatgtaatgctccatgagtaaaggattataaaacaggatttgattgaaaaaaacgtttgaaaaaggaggctggaatcattcaggctccttttttaataccggaaagatttcagccaaaacgtatccggacttttagaaatgctatttcttttaaatatcattttatatttcatagattatcgtctgagacctattttctacgaagggggcacgacttcagattgaatgacatctggttgatgaatcaaatagtattttcttcattttactattgcatttcattggtttgcttcgacctttctttaagtcttttcgggataaggctgtaggataaaagcccaaattcgtacctgaactaaaaaatgtaaaaccatgataaaaatacgttttaaaaacttcgtagttaaatatttttttgtatattagggacataaccaaatgatataaaatggaattagagacaattggagaaaacgccggcaaagtatggcgcaccctgaatgaaatgaggggagaaatatctattcaggaacttagtcggaaaattaacctcagcgccgaagacgttgcacttgcggtaggttggttagccagagaaaataatatttttattcagagacacaactacctgttatacgtcagtcatgatgctttctgattttatctcaagaagattgactgtctgggtctaaaaaacataatggggtgtattgtcaagcaatacgccccattatgtttttatgatttggaacaagtctgtgcaccggttttcattaagagcctatcggtaagaaaataggctaactctaccatcatgataccgataatggcacctgccaaaacgtcgctcagccaatggcgattattcaactgccttgtgaatccggtgacaactgccggcaagaaggtagcaatacccgctaggagggtcttgaaaccatattctttatacagtagtgtggcagccgtaaaagccgtagctgtatgccccgaagggaatgaaaggaaatcggaaccgtcgggacgaagaacccccgccagtgatttcattgtaagcactatggtccccattaatatataagaaaatgcagtagagacgagcattcgtttccagttactacggctctttactcctgtaagttttaacacgaacatagcaacaatcggaaggtatggcaaaaaatcatcataccgatatgcaaaagtagaagcatgcatattacgtaaatgatagatatattgatcagcacttgtcaataacccggcccgcagggcacaaactaaaaagatacaggcaaacaaccaaaacattaatttacgtggactcatattgttctattataggtgtattgttatgcctacaaagataatttttttgatgtagaagacattaggcagaattcatatgaaaatattatttgtcttattataacattcatattaatatatggggatgaaacaacataatgcacatcacattttacaataaatcgaggcgggtatcattctcagaagtaatgctacatatttccatctcttcgaaacatacgcaacttttcttcttcgaaggatggcgcgataaatctgttgtacagctttatccaacggagtaatccaaaacaacccctctccttttgccattgccgtatcgacaaatccgggacgtacatcagtgatataaataggataaggtagcttggctgttttttttcttaatccttcggtatagttgatttgataggctttcgaggcattgtatgccggggctattccttcaccgcgcattccgcctacagatgaaattacaatcaaatgcccccattcttgcttctgaaaaaagtgaaaagcccaatccactacattggtaaatcctattacattggttaaaagagtcggtttctctagaagataatcaagttcaggatttagctcccctattcccgaacagaatataagtatatccatacctcccactctgttcacaagattgctcagttgtcggactgtatcggtatctttggtaacatcggaaacactataaaaacaatttttattttgagaacagatctcttgtagtttatcttctctacgccccgtaataccaactgtatttccttcccggagaaagcactctgctaatcctttaccgattccggaagtagctcctataataataacttttttcatttttatattttttaaagtttgcacaaaggtatcgggttcggaacacatggatcttgactgaaatcaagattttacttttgtactaattttcttcgaagacgactcagtgtttccggacagatcatcagataggatgccaattcttttagcgagatcaagttcaacaattcgggacagcgttttaagatttccgtatagcgttcttcaggagtcatactatataaagagatcatccgctcatatacttcccaaagcaatatctctgctatttgcctacctaacttttgatttgcttcatttcgactgtaaaactcctctaattgcctgttattgattacataaaccgaacaattacaaatagcttgtatatcgacattagaattgtctcccagacgaaaagcaggataatttcccacaaaagagtgatcaaacgtataaccgacaatcttacttcctccacggctgtcggtacagcaataacgaaaggagccttccgtcacgtagcctaccattttgcaagattcattttgacggctaaaaaactctccctttttataatctgtcaactgtccattttgaaatataaattctgtgacaggttggaagtcaacctttgacatatatctattaaaacctttcacttcttcatccatgacataatttcattttgaagtgcgaatataaataatgcggattgaaatataacattcaatccgcattaaaatgagtttctttaatttatccacaatggaagaatttgctcaccagtgccagcatctcttccgatttgtcctgtatatctttgcgtagagtggcatcattataacttcgtaatcgactgataataccatcgatcatagcaggactgaatacattgtactgttcaaatacagtacgctgtttctgtaaacaatctgcagatgctgcacagctatcgggaagttgggctaaagctttcaacttgtctgcattttctttctgatggatatttacattaacgtacgtttgctctgcaatagccaaagcgttctctatctcaaacccatgccgacaagctactgcaagacctgccaataattgataaagatcggctgagccatccggtgaacgcatctctacggtctgtttctgagtagtatcatagttactgtccgattccaaaggattggctagtgcacacatatccgtttgtgcggaccatcctaacggaacacgtaccaatactgaacggtttcggtcaccccaacaaacattggtaggtgcttcctgatggggtacaagacggaagtatgaagtaggattggtattgccgaaagccgtaatggaaggagcaagctgcatcataccggcaatggctttacgagcggtatccgagagagcgccatctttcagcatctggttttgtccgtctttcatcattcgcatatgaatgtgtagccctgacccggctttacctactgtaattttgggagcaaaagtaatatcatatccatattggtaagctaaattacggataacccatttggcaatcattaattgatcggccgcattttcggcattgacgggtaaaaattctatttcgttttgctcataaactttgccgtcaagcataaaattgcctacttccgagtgtccgtactttatttgtccacctgtttgggctatataagacatacattgtgtacggaaatcattgaattttgcataaggtcccgactcgtgatatccacgctgatcggtagccggaaatagaccgtcatcttcggaaattacataatattccaattctcccatagcctgaaattccatacctgttacatctgtaaatgctttgcaagccttatgcaaagtatattcgggagagctttccaaaggttccccatctttattaaagaaggagcaaagcatcacgagtgtaggtatttctgcaaacggatcgacgaatgcagtgcgaaaacgtggtattacatacagatcgctacttccggcttctatgaaaggaaacagactcgacccatctacccgttcaccacaagtcaggatggcatccagataggaagcattgtttatcacaaaattcagagtttttagccgtccgtccgcagcaggatacataaaattgaccatgcggatttcattctgttggatatagttaatgatgtctgcttttgtaaactcagcagcaggcttttgcagaaaagtcaccaaacggttgggactcattaataattcttggttcatcatacgttggttgttgtttcattattggggttaacatattattttgagaaccaaagatacacaaaaagtcagcaaaccaagatttattgccgtaaaaaataataattctctcttcggttaatagtgattcgggtattccttatttaaagttgtttctatactgctaacttctttcgttttttatacctttgcagccggttttaaataaggtatagattatatggtacaaagtcagactcagccggttcgtagaattgcatttcctatattaattgcattaagtgtatctcactgtttaaatgatcttttgcaatctgtcatttcggctgtatatcctctttttaaagaagatctttcgttaagtttcgctcagattggattgataaccctagtttaccagatgtctgcttctgtatttcaaccactgaccggccttatttttgataaacgtcctatagcttggtcgcttcctatcggaatgagtttcactttgataggtatgctgaatctggcttttgcatccaatctgaattggctgcttgcttctgtctttatcattggaataggttcgtctgttctccatccggaagcatcccgtatcacctttttggcttcgggagggaaacggggattggcacaatcactttttcaggtaggtggaaatctggggggatcgttaggccctttattagtcgcattattagtggctccttatggcaggcatcatattgcactatttgctatccttgctttggcggctatttgtgtaatgtttcctatttgccgctggtaccgttcttatctgaaccatcttaaaaaacgtccgatccatgcaaaagcatatatcgagcgcccgcttcctcctcaaaagactgtatttgctatcacgatactgatgattcttatattctctaaatatatttatatggcaagtctgaacagctattatacattttatctgatccataagtttaatgtaagcattcagcagtcgcaactctttttatttgtatttctggtagccactgccattggtacattgatgggaggccccattggagacaagataggccgtaaatatgttatttgggggtcgatcctgggaacagctccttttagtttattgatgccacatgccggactcgtatggactataattcttagtttctgtgtcggcttaatgctttcgtctgcttttccagctattctgttatatgcacaagagctgcttcccaacaagttaggactgatttccggactttttttcggttttgcatttggagtggcaggcattgcatctgctgttcttggcaatatggccgataagtttgggattgatgctgtatataatgtttgtgcatttatgccgttgttaggattggtgacctggtttttaccggatctgaagaaagtgagaagtgaaaaacaagaataatcaggaaagagacgaagtttgttttttattttggactttgtaaaatccggaatcacttttccggattttatccttattttatgctattttctaccagttttttccttatatcaattctccctttcatttattttactaatttcgtggcgaacatatatgaatcaagtaaatgaaaatggaaaatagtgtattaaccggaaaaccttataacatcggatatgccttgagcggaggctttattaaaggctttgcccatttgggagttattcaggctttattggaacatgatattaaaccggatattatctcaggagtcagtgccggggctttggccggagtattttatgccgatggcaacgaaccctatagggttttggactacttttccggacataaatttcaggacttgacaaaacttgtaattcctaaagtaggcttatttgctttgggagagtttattgactttttgaagtcaaatcttaaagctcagaagctggaggatttaaaacttcctcttatcattactgccactgatctggatcatggtcgcagcatgcattttcataaagggaatatagctgaacgggtagctgcttcatgctgtatgccggtgttatttacacctgtaaaaataggaaatacacattatgtggacggaggacttctgatgaatttacctgtatctaccatccgaaatgaatgtgaaaaagtggtagcagtgaatgtcagcccgttgatggcagaaaaatataaaatgaacatcgttagcattgccatgcgttcttatcattttatgtttcgtgccaatacgtttccggagcgagacaattgcgatttactaattgaaccctacaacctagagggttatagcaatactgaacttgaaaaggccgaagagatttttgaacaaggctataacactgcttctgaggttctggaccaactaattgaagagaaaggaaagatatggaaataataaaaaccggattggctgcttttggtatgtcgggacaggtgtttcacgctccatttatcagcacgaatcctcattttgaactttacaaaatagtagagcgtagtaaggaactctctaaagaacgatatccgcaagcatcaatagtacgtagttttaaggagttgacagaagatcctgaaatagatcttatagtcgttaacactccggacaatacacattatgaatatgccggaatggctcttgaagccgggaaaaatgtagtagttgagaaaccgtttacttctaccaccaaacagggtgaagaattaatagctttggctaagaaaaaaggtttgatgctaagtgtatatcagaatcgcagatgggatgcagatttcttaacggtacgtgatattcttgccaaatccttattaggacgtttggtagaatatgaatctacatttgctcgttatcgtaattttataaagcctaatacttggaaagagaccggagagtccggtggtggattaacctataatttgggttcacatctgatcgatcaggctattcagctttttgggatgcctgaagctgtttttgcagatttgggtatcctgcgtgaaggaggaaaagttgatgattattttataattcatctgttacatccttcgttggcaccaaatgtgaaaatcaccttgaaagcaagttacctgatgcgagaagccgaaccacgttttgccttacatggaacactaggttcgtatgttaaatatggagtcgataaacaggaagctgctctattagctggtgaaatacctgaacgtccgaattggggagaagaatcagagcaggaatggggattattacatacagaaatagatggaaaagaaatctgccgaaaatatccgggcatagccggaaattatggtggcttttatcagaatatttatgaacatttacgtttaggacaaccattggaaacacatgcacaagatattttgaatgtgatacgaataatcgaagcggcttatcaaagccatcgagaaaataaaattgtcaatcttaaatagcatatataaaatgaagaacgaaaacaaaatgattatttatcaagtgtttacacgcttgtttggtaataataataatcactgtatctacaatggagatatttcacaaaacggttgtggaaaaatggctgattttactgctaaagctttgggagaaataaaaaaactgggagcaacacatatttggtacacgggtattatcgaacatgccagccaaactgattatagaagatacaacatccgcccggatcatccggctattgtaaaaggtaaagcgggatctccatacgccattaaagattattatgatgtagatccggatctggctactgatgtccctggaagaatgaaagaattcgaaaatctagtaagccgtacacacagagcaggattaaaagtaataattgattttgttccgaaccatgtagcgcgtcaataccattcggatgcacaacctgacggcaccactcagctgggagccaatgatgatcctaactactcttttagtccgtacaataatttctactatattccgcaatcggaattgcatggacagtttgatatgacgggaaatgccttggaaccctatcatgaatttcctgccaaagcaaccggaaataaccgttttgatgcttaccctaacattaatgactggtatgaaaccgtaaagttaaattatggtgtggattatcagaatggtggaacttgccatttctcccctattccggatacttggactaaaatgttggatatcctccttttttggtcctctaaaaatattgatggtttccgttgtgacatggccgaaatggttccggtagaattttgggaatgggctatccctcaagtgaaacaggagtatccgaatattatatttattgctgaagtatacaatccgcacgaatataagaattatttatttcgtggtaaatttgattttctctacgataaagtaggactgtatgatacattgcgtaatgtagcttgtggttatgactctgcaactgctattactcgtagttggcagtctttaggggggattgaaaagcggatgcttaacttccttgaaaaccatgacgaacaacgtattgcatctgatttttttgccggagatccacgcaaaggtgttcctgccttaattgtatctgcttgcatgaatactaaccccatgatgatctactttggtcaggagttcggagaaatgggaatggatagtgaaggtttcagcggacgtgatggacgtactactattttcgattattggagtgtagatacaattcggcgctggcgaaatgaaggaaagtttgacgggaagatgctaactgaagagcaaaaacatttatatgtaatttatcagagagttttgacgttgtgcaatgaagaacaggcaatatcaaacggcgtattctttgatttgatgtatgctaatgaaaatggatggagatttaatgagcacaagcaatatacatttatgcgtaaatacaagaatgaattgctatttattgtcgtaaactttgataatcagccagtaaatgttgcgattaatgtgccttctcatgcctttgactttttacaaattcctcaatttgattcttataaagcggttgatttactaacagataaagtagaagaaatcagtttactgccatataaggcaacagaaatcgctttaggagcttatacgggtaaaatattgaagattaaattttaaccttctgaatataaaatagcccttgcaatcagaataatcgatgcaagggctattactttatttacttactttttcttatttggttcttctcaataccattgctgtacgtgcaggaatatagagtttcaaccattctttcttttctttcttatacaaaggatcgggcaatgtgaaatgcttcacactatcatctgacaagccatttcctccataaattatgttatctgtattcagtaccacctcataagttcccggtgttactaaaaagccataatcggtgaatgattgactcggattaaaattgaatacaaaaacaagatctttacgttggtacgctaacacttggtcgccatcgttgtgccatatttcttgtacaggggtttgctggatgttttttacgctcttaattactttcaacatatctgcatcaaaatcacccagataatgataagtcaagtttttattatcgactaaatcccattggcggcgagcatacttacatgaccatccattaccttccctcggaaaatcgatccattccggatgtccgaattcatttcccataaagttcagatatccaccgttaatggtgcttgcagttagtaaacgaatcattttgtgaagagcaacgccccgatgaactatataattttcatcacctttctgcatatgccaatacatatctgcatcaatcaggcggaaaataatcgttttatctcctaccaatgcctgatcatgactttcagcgtacgaaattgttttttcgtcttgccgacggttagttacttcccaaaacatgctggatggtttccaatcttcatctatcttctctttaattgtcttgatccaataatcggggatattcatagccatacgataatcaaatccatatcctccatcttccaccttggcggcaagtcctggcatacccgaaacctcttctgcaatggtaatagccttaggatttacttcatgaatcaattcgtttgccaatgtcagatagcagatggcattatcatcttgatgtccattaaagtagtcgccgtaattgcaaaatgcttctcccaatccgtggctataataaagcatggatgtcaccccgtcaaaacggaagccatcaaaatgatattcttccaaccaatatttacaattggaaagtaaaaaatgcatcacttcatttttaccatagtcaaaacaaagtgaatcccatgccggatgttctcttcgtccgcctggatagaaatattgatttggatcacctgcaaagtttcctaacccttctacttcattctttactgcatgtgagtgaacgatatccataatgacagcaatacccaatccgtgtgcggtatcaatcaactgcttaagttcttctggagttccaaaacgagacgatgcagcaaaaaaactcgatacatgatagccaaaactaccataatatgggtgctcctgtatagccataatctgaatacaattgtatccctctttggcaatacgcggcagaattttttcacgaaactcattataagttccgactttttcttcctgctgtgccataccgatatgacattcatagattaacagtggatctgtactaggcttaaaagttttctttttaaatttaaatggcttttccggtgcccatacctgggcactgaatatttttgtattgtcatcttgtactacccgattggcccaagcagggattcgttctccctgtccgccttcccagtagacgtgtaatttatataagtcaccatgttgtatagtgtcgatcggtaatttgatttcccaactaccatttttcaggcgttttagtttataagcaggcttttcttcccaattactgaatgtacccaccatataaatatgtgatgcattcggtgcccactcacggaatatccatcctttatcagtgcgatgcaaaccgaaataaagatatccggaagcgaagtccgataacgtagattttcccccattggtcaattcggccttcttatccatggcatgttcaaaacgtccaacgatagcgtctttgtaaggttccagccaaggatcatttttaataagattaagagtcttttccataaaaaggatgtattattgtgtttcagaattaattttttatagtcactcaagaaatatctgcccgattattactcaaaatcatcgatagtgaaattcgtaaagtcggcaaaacgtttaaattgccggaatacttcttctattttgtccagaatatcctgagtcaaaaagaaactgtccgggacggaataagcacaagtgaattctttaggtttcaaataatcaatgtatttaaaatctttcgggaatcctttgggagctgtttttaggaaatcttcacctacaatggggaagaattgctgaaattcaggatcttccactatcgaacgatattcatcaatgttatcatagatagactggcgaagtgcttttaaaatattagaaggcaagcataaacttcctccggctagcatgcaaccctcaggttgtatatgtatatagtacccactgtgataggattttttcccttttgcgttaatatatcccccaaaatgattcttatagggagttttatcggaagaaaagcgggtatcccggtaaatgcgataagtgcattctttaggttgaataccacgaatactttcatcaaaaagtgaaatacgggcaattactgtggaaaggaaattttcaaattctaaacgggctatttcatactcttcccgatgtttattaaaccactcgcgattgttgttcgcagtaaggtcctttaaaaaacgaaagataacaggtatattactcattgtgtcattcttttctgtttatatcctacaaatatataagaattatttgtaactatccataaaacgaaagaaaaacaggtataaaaaaagcgtcggctgcaaagagccgacactttaacacatttatcaataaaacagacgcctctgtttctgacgtacttacttatcacaagctggtacaatctctttaattaatcttatatctaatactatgaaaaacacatctatataacatgcctaaaatgggttttgttcaaacagatcgaaaataaacttgttaataatcgttatatccgtattagctctctattgacatcaatctttatcttaccaaaatcaatcattgcattgaataaacaaatctgggaatagttaaacaattggtctacggttatttctttttctctgattagatgtttgtcaatcaatgccgctctttggacacctttaaggagagggtgtttgggagtgtgccactcttttccgttaaagagagcaatattagctatagatgtatctgtcaacagtccatttctagtaattaatatttcatcttgttcccgtttatgcatataaagttcatttattgcactccgatctgtacttttgtaagtgtaatcgatattatccgaatgaacaatctgtaaagaatgtactgggcgtatttgataaggtgtgtataggatctcttctatccatcgactatagactactctacactttatcatttctacattcattattggtttcagactttccgatagatttaatggcggttcgtctggccaaaaaacagcacgcgtctggttcattcgctctgtgtgataatccaaattatacactactcctctttctatacgtatcgtttcaataaattggcacataaactttctgcttcatttcgttatattcattttccaaatcacttttgcaggtgatccctcccccacttttaaaaaatatttgcccattctgctcttcaataaagcggatcataacggcactatccagttttctcccgtcaaagtatccggtgatgcctgtatagaatcctctctcatattcttctgattgctctattatttccattgtcttgtgcttaggagctcctgtaatagaaccggctggaagaagtctgaaaagaatttctcccagatgatcaacatagcttttcggtaaaactccacttatttcagagctagtctgcaatatgggaccatgattggtatagagtgtatctacatatcgatagcgggttacagatacattatctgccactatacttaaatcatttcgtatcagatcaacgattgtggcatgctctgctgcttctttttcatcctccatcagtaatcttgtggcagaaggtaaagttgcatctattgttcctttcattggataagaactgattcttccattttctatacgaataaatatttcaggagaaaaaacgacaaaagtctctttcaaccaaagtttgtataaggcccgagaatgataaaatatatcttttaaccctagattagtgttgacgggggtcatgcaagtgagattcgttaagaagctatttccactcaagatatttttccgtataatatcaaacgattttttatattggcttaaagaaataggttggggctgccatattattgggtatcttaaaggtggaacaacagacgtgcagtttgtaaaaccgttcagattgtagagtagctccgatgaatcaatatcatccactttctctataaaagaacattcttgtttataatctataataaacagaaatgcttttcctgctccagccagtttgtttatacggttaatagcttcatttttactatagaattgcattattctttgttttactatttattcgggtggcaaacttacaataaaaacagatgcatacaaaaaaatagggttgctgatttgagcaaccctattttcttcatcatctgaatattcttcttacttaatcatcgcttttacctgatcttgcatctgtttgatttcagttctattgggtgataaagtaactgcctctcccaaatagtcaacagctttcttgaaagctgcatccgcctttgctttttcagaagcatatttttctttgttcgaactagctaaaggagttgctttccgtagaacatcggctccattattgtagaataacactccaaggctatataaagcgtcagtcttccacttcttactagtcacatcagtggcatgtttatagttctcttctgctttctcgatattgccggcctgttggaatttctgtccttctttcaaataataaatagcatataatttttcaatagtagcattgcccggaacagctttgataccctccgtcaatgtagcaatatactcttgattatttttcatatcgcgataggcagcagacttacctatatatgcatttgcaagattataattttttttaatcgcaatatcaaagtaatcggcggcttctttatatttctttatgttatctgcacatacaccacaattataggctgtgacagaatcctgattattagtcaatttcagatattcgctgtatttttcaaaagcaacggcataattttttgcattcaaagcatcattaccttcattcttcaactgattcggatctgtggtttgtgcaaagaaattatttgcagtaaaacataaagcaagtaataaaataatttttttcatggttattgtgtttttaattgtttatcgttcaaatgtaacacgaatctgatgcaaacacaatatatttttcatcttttgacttttttgaaaagtcagtaacgatagttatttttacgttaaagaatgcaagaaaaagccaattgatcggtattctaatggttcactgacatctccctatgtttgttacagaatacttttatctgttgatattttctttataaaatcattgtatatctcgtatgcctccgtctcatctgcaggataaggtttaaagaaatattctatttcttcccgagataattcaatatttaacgattgtttttcatctttcacatacaaagttactacaaaaaagtgaaatgcggaaagatatagtgatagaattgagttacaagggttttagttgaagtggcgataattcgtgaagccattacaatccctgccgaagccaaatcctgacgccgcaacgttacttgttcgtaaccatgcccgaaaatgcgacaaacgggcacggagggcgaaacaagacactaaggaatagtgagttaccgacaactcacgcgaaaaatccggttacggaaaaagattgcgccgttcctctccgttttgcgtaccgacaccggactcttcaccaactaattttgaaaccaaaaaattaaggacaatgaagagtacattttcagtaatctactacctcaagcgtcaggtagtgaaaaaggacgggacagttcccgtcatgggacgcatcacagttgacggcagccaaacgcagttcagctgcaagctgactgtcgatccgaaattgtgggacaccaaaggtggacgtgtcacgggcagaagcacggcggcactcgaaacgaaccgtatgcttgacaagatgcg

SEQ ID NO: 4982 - DNA, 407785 bp, Unknown
  gut microbiota DNA sequence
ccgcttccggcaaaagggacagcgaaaaaaaaaaatcatctgaaaacccgtaaaagcacctcttggcataggcgcaaaagaaaggggcattgcttcatctgtctaaacatcgtttaggcgtgaggcaatgcccttttctccggctatgcggtagttggcacacgtttgttccaaactcgttttgggcaatggtgtgccgacggataataccgcttttacggaaaaatcttatgaatgaggggataaaaatctgggagtttatatcaaaatctcggattaaatagctacttttgcatacgaagagttctttgaaggttacgcaacgcgcagaaggataatgcagtagataactaactaaatcgtaacctattactatcaagagcgattaaccaacgctcatttccaataaattacactcttttcgtaacttcggataacaaaaataaccggcatccgatatttagtgttatgtatataatctgtcagtggatccgtaacaattgttatgatggaaaacgtagcatgctgcttgcctgattccttatctaccccaatatcataaataccagccattgaaaaagcagtttcatttttcattatttgccatcggtaggccatgcgtaggtctcacatcgcttcgtacaccagtgtgaatacatgaatcttgttcactatctgcagggttctagggaaacatttccgaacaatcttttgcatgctgtttgccatgtcaggtgtaaactctttcaccatattgcacagttttatgtcaatgagcagttctcctttactagtgccatctcgtccatacagaatggtatcctatgtttttaggataaagaaaatgcatcattaaattaatcccaatcattataatcacacagatgttgtttatactgattctataactgctttctatctaagccataattgctctgtaacaatttgacagtaaacagcatgattgcctaagtaatacttttaacacacctctattctgaatgttgctgccacaatatatgaatttagttatgttgaaacaatgttgaaataaaagtagcatcttaaatcaaaactaacaggaatgatgatagaaaagaaatagctgtaaattatgtcttttaagggatttagatcaacgcaaaatactgataatcaaacatggtaaaataaaaaaagacagccaatagactgtcttttttgtgattccgaagcgattcgaacgcttgacccacgccttagaagggcgttgctctatccagctgagctacggaaccatccttcattgcgagtgcaaaggtagtgctttttctgaaatttccaaaaaaatctgtgtctttttttacttacattttcacatatatattctataatcctaaaggtaagccagttaagtaccaaataaaaagtaacattgtccagcctatcagtatatataccgaatatcgccaagtgtattttaagagtgaaccataagtggcttgcttatcatactgttgcatgtaggtcaacactaaaggcatatagaacataaatggagtgatagcattagttgcgctgtcacctatccggaaagcacattgtgtcatatccggttcaatccccattcgtgcaaataccggtacgaagataaatgccataaatgcccacttagcagtagcagaaaccataatcagattaatggttgcggtgaacaatataaataaaatcaaagtccataaaggacctgcctgcacagaagacagtaaattggcacctatgatagccacacatttatctaaatgtgaatattccaggcaagcaaacatctgggctgcaaaaaaggcaataacgagatagccacctaataatttcatgggttgtgccaatccttctatcacatcgttatccgaacggtagcgtccggaactaaacccatagaccattcccataatagcagctcccagcgacaataagaacaaaatccccataatgaatggtgaacgtatcagccctccatttactccacgcaagataccccaggaagaaaaagtggcccataaaatgattgcagcataaagcattcccacaacgattgccattgtcatggcccggcgttctttgcgtgacaattgtttatagccttcaaatatctgtttcccctcatattgtcctagagaaggaatcagtcgtttgcaggttatcctgtaaattatggctccgatgaggaatgtagagacagacataaaataataattgcacaatggtcccgtatttccctgatatactccggaatcaatggctgattcctgtgtcgtacgggcaatcaatgggtccatggtgctcagcactacattggcactgtagccacaggaaaccgaaacatatgcggtaataattcccgctaccggatttaatcctaccgaataaaacaaagtggctgctatcggaagcaatattatataacctgcatctcctactatattcgatagcaatccaagaataatcacccacaggatgatcctcctggtattttttcgatttttcaccccttgccggacacaagcatcaataaaaccggaatgttgagctaccccgataccaaacattgctattagcaccattcccaatggtgcaaatcctgtgaaattagtaattgcatttcgcaacatccagcgaataccctccggactcagcagactttgtacacgaatctctgctcctgtctgtggtagttgcacccttaatccataaatatcgaatatccaggatagaaagatgactgccagcgtaaacaggaagaacatcgttgccggatgtggcatacgccatttactcttcatctgcttccagattgtccaaatcaattatacgaagttctaatgcacggaccaccagtctggttgcatttactcctacccgttcaccctgtggaaacaaccttccgatcagatcattctgccgcttctctaacgatttcactccgaaaggcataccctttaggttagctatcatttctttggtataccccaacgccagatggcggaggaaacgttcatcatattcatcaatatcataactgatgacagcctcttgacgcttagcgtcgttagccaccgattttttaaaccgctccactattttctccagaatcggataattgaataccaacttcttcccatccattacggcctgtacatccgtcttggtaagtaattcacctgttttcaagataattccgtctgctccggcgttcagcacatctacccatagcttctcatttaaaatttctccggtgaatatcaagactctcactcccggataacgtttaaagatattccggcatatatcgacaccgattgttgtagagcctcccaatcccaaatccagtaacaccatatcaggtaattgtgtttccatcaaaggccagaattcattttcagtcattgccgtacctattacctcagcattgggtatttcatggcgaaatatttcttctgttcctttcagttccagttttacatcttctacaataattactttaaatttcttatcttccatactattttatctatgtatatttagttttttatcttttgggtactgtaaaatagaccgtgaatcctcctccctgtgccggctctgcattaatgcgacaaccacgccttccggcaaattcatcatggtcacgaataatttgtttgcagatcagatattcagttcctcgtagttcacctttctctcctgaagtcatacgtgccagattcggataaaataattgattcagttcctctacttgcttctcacgtcttctgtctgtgaacaaaaaacgaacatattctccatccataatggcttttaaaaccaattctccatcctgatggaaagaaagggcttcatcaatgaggttctctataagaaaacgcaactgattgatatctccaatgactttggcttcaaggggctctatagtcaatgttatcttatagtcaacccctctacttattcttttgaagtatttgccggcatatgccattatatccgtaaccggtattgtagcccttcggaacgttacttcttccagttgtcgggaagcacaagaactcaatatcctgaagattcctttataatattctatcaattcactgatagtctccacacactccttttcctcttctcctgatagggagtgggtattcagcctgccgatgatctgtttgattttgtttggataataaattgtttcatgcttgatggtcgagagacagttgtccaacaccatattctgtacatgcaacatactgtcttcccacgaagctctcctggtctcctcgtgtgccgcttcgatgtcacggtattttgtggcaagtctgacaaccgcattgaacaccacaatgcctacatatctggagattaactgaaacaacaaacgatccgcttcttgcatactgtcctcctgtctttccagatataatacaccgacacactgatgtttccctcctgcatcaaccagcaaaggtaatgcttgcatatctccgtccgaaagataagtctgattatcaaaacactgctgtatgatttccggaggtgtatccatacggggagtggaagcaaattcaagccgatgtcccatttcattataaacagcaatccccaaacattctatagtcaacagctcattcatcgagtcgaatgattcgtttacgattcgttgcggtatctctttcaatgtatcttcttcgcgttgtaaagcttccgccgactcctgtgtgcgcactaatgaagaagcgaatacctttttattgatttccaagacctgttccagatttaatcggttcaagagccttttacgaacatacaaaagatagtagccacagagagatgccaccaataagaggatacataagataattcctaccgttttattggttgttgagcgttccaattgccggcaatagccttctaatgactgatcttcccctgtcaatttatacaatgccgtataagcaacattattataagtataagcatccaactttttaagtcccaaaaaagcgacagatgcttcattacgtacatcaagtatcacatgaaaatccgtattataaggttctacccaccattccagttcggccggaatcccacttcccaccaatttcataaatcgttggggatgacgggcatattttttataatgtgcattgagccggtttaatgctgaatcggcatactgcaacgcaagttcaaagttttctataacattgcaataataaactgtatcagcaaatctggatgcttcgtccaacagacgttcatattcagcttcagctgctaaggttacggaatctaccggaatatctttcagtttttcaggcatcggttcgccttgacaggagaagaagccgaacaatccgaccagacataaacaaatcccgattattttacggactccgggaggtagtcggaagtaaaaacggctgcctttgcccggtgtactttctatgttaaatgtacatattcggaacagatcattggtctttttatatttttcaatgattcccttgcagttcatcaatccgaagccactgcccttactccgcttcaattcttctttatccggattgtctttcatccctattgattgggaatcataaaccttctcaccgataatcttcgttatatcttcagtcgaaagtccgcgtccgttatcctctacggaaatctcaacatattcatcagtcctcttagcatatatcttcactatacccccttccggagtatattttcgggcattctcggctaatgtattaatcataaacaaagtcaacgctttatcagccttcaccaatgcctttgtaggttctatttcaagcctttgtttcttcatttcaaaggctttacgtcctttacttatcaattcaaagagttcgttcaattcaaaattctctatattcagactaagcgaaccttgtttcatcttaatccacagagccaatatatcattatattcattgattgtagtaaccaactcgtcgatgtattgatacttttctttctttatccgatcgttgtttataaagcccttttccgtcaatttatgaacttcattgataattcggtctatatacggattgattccatccacaatggccagacatgatttttttatcaggttctgccgtttgttcccggcaatatgctgttcgtagacgtacctttgtttttccaacttattccgttcatcccccaatgaaataaatgtcattccattgtccaatgcccaggcaatatagggagtgataactttcaccaatgcctgctcatccttattcaggcgatgacgggtaaatagtttcagaatcccgatcggttccgttttatcaggtacatacagattaaatactgacccgataccaacctctccgatcgacttgggttcatctgtctgttcactctcacattcttcattaaattcgatgtctcccgtttcttcatttcttatcccgatacggatttctgtagcaccgaacaattgctccatatccggttgaatagattccgagatagcgtatacgatttcactttcatctgttacatccaccggtatggaagctgtgattttctggcaaacatccaaagtttgccgtagacgtgcaatatgtatccggttccgtacttttgatctcttattgaatagccaaaacatggcagtcaccagtataagtcctataatcacgaaaaacaataccacgttcaattgtctggactcttgttctaatgaaagatagcggctttccaattctttatcctgacgggtataccgcaaaatatccaaatagacatttctgttataatccgacgccggtttcattcccaggcaagcatacgatacactcaactgttcgcgtattctggaaatccattccggcacggttttcaccttttcttttccaagccaggttacttctgtatatgccacatctttattaggaacaaacacctgtaacttgtcgagcgtatccgccacagaatgatagtatgacatatgatgttggttcacacagtccaaagcttttgccaatgtatccaatgcttctgtataccgtccgtgagcattcaaatatttaccgatcgacacatacgcacccgctatctgataaagatcgttatatttgcgaaaacgttccagtgccatctgccccaaacgcaacggtaacaatgaatccactggtatgccgaaccttgtcagagcgtgtgaacgcctgttcagaaatagttcataactctcctgagatgccattaaattggtgagtccttgcaaaccatttccttcaaaatacaaatatccttgctccgacgccattttccaggttgtatataactcatcgaattcttcaagttttcgttcatccggtgttttaccctcacacagtccggccgaaccttttatataatggaaataaagaatttgatttgtatcagtcgccaagtcttcatttaattgtatttcattcagcgaagccatagcctcggtacgttgttgcagataatagtaataaactgccgaaacgataaaaaactctgtaaaggcataatccaatcgggcactctcgtgacggtcgacaaacagattattttcttcatcaatccgcttcatcctcctgattgcactgttccggtagtcataaaactccttgttcatggccgtccgctgataaattttcatcaatccgatgtcggcaatcaaaagttccaattcatttttcgtcaggtcatatacccctttatgcaggcgttcagctgtatcaaaatccatccgcataaaagcgcaaaaagcaagattattggatgcttccgctttcccctgactgtacatgctaacttctttgtacgcttgcgatgcagccttgcaggaagaatccagatctctataccggtacatataagcccgtgaatttagcgaatcaatgtgctgtacctccttagtcggagctgtatcgacacaagagaaaaatgtcgtcaacaacaacatacagaagagtggtataagcaaacgcggattcatttctttcagatacaattagtgtttaggtagcaaaactacaattttttctacaataagtcttttaaaatgcctagataattcatacctttgcgcgcaaattataaccaataggtaacaactattacacacaatgagcgaaaaagcaccctttatggtattctcgggaactaattcgagatacctggcagaaaaaatctgcgcaagcctcaattgtcctctgggaaacatgaacatcacccactttgctgatggtgagtttgccgtttcttacgaagagtcaattcgtggcgcacatgtattcctggttcagtccactttccctaattccgacaatctgatggaactccttctgatgattgatgcagctaagagagcttctgcaaagagcgttgttgcagttatcccttacttcggatgggcacgtcaggacagaaaagataaaccacgtgtttctatcggcgccaagctggtagcagacctgctttcagtagcaggcatcgaccgtctgatcacaatggatttgcacgcagaccagattcagggcttcttcaatattccggtggatcacttatatgcttcggctgtgttcctcccctatattcagtcattgaagctggatgaactcgtgattgcaactcctgacgttggtggttcaaagagagcaagtacattctccaaatatttgggtgtacctctggtactctgtaacaaatcacgtgaaaaagcaaatgaagtcgcttctatgcagatcattggtgatgtaaaaggtaagaatgtagtattgatagacgacattgtcgatacagccggaaccattaccaaagctgccaacatcatgctcgaagccggtgccaactctgtacgtgccattgccagtcactgtgtaatgtccgatccggcttcattccgtgttcaggaatcaggactgaccgagatggtattcaccgacagtattccttactctaagaaatgtgtcaaagtaaaacagttgagcattgccgatatgtttgccgaaacaatcaaacgtgtgatgaacaatgaatccatcagctcacaatacattatctaaaagatagaagaacaagaacaataaaaaaacgtagaactggaaagttctacgttttttttatttattaatttttattttaattattccagccgtccgaatttataggtgcctttacgaatcacttttccgtttttatctgtttctacaaacgggccattctttttaccttgtttgaaaaagccctcatagcgattcccgtttttatcttcctccacaccattaccttcctgcattccatttacaaaaccacctttatatttggttccgttcgtcaaagtaagagtgcctttgccgtttggctggttattcttccattctccttcgtacacgtctccattactccatttgtaaatcccgtgtccgttacgtttattatctttccattcaccttcatatacagcaccgttagcccaggtaaatgttccttcaccgtcctgcataccgtctttaaagtttcctacatatttatctccattggcatgataatagatacccggaccggttcgttctccttgtagatatgaaccttcatagcggtcaccccctaaaaagaaaataccttttccgtgttgcagatcatctttccagtctcctacgtatttttcaccgttggtatattcaaaggtccctttgccctcacgaacgtcattcttccagtcgccatcatatttacacccatcgttccataccaatacgcctttgccatctttcttatcatttttccagtcaccgacgtatttggaaccgtctctccaagtataggtacctttaccttcacgtttatcgttcacccaatcccccacatagatatctccattgtggtaatacatcgtacccggaccatgctgataatcttgaaaccacataccgtcgtaacggttattattcataaaatagtagattccgttaccatgctgctggtcttgataccattgtccttcatatcgttcgccatccggaaaggtgtaaactccgaatccttctcttttacctttcacgtattccccttcgtaaacgtcgccattcttaaaaacggtttttcctttaccatttggcttacgccctttcatttctccggtatatacggaaccatctttaaacgtgtaatttcctatcttgatttctgttgagaaggtgtcccgcactttgctgaagaatccacctttattttgtgcgacagcattcccttgcgaaagagccgctaaaatgagtgctgtatagatgtatcttgttgttttcatttggcaaatatacaatttatacactaaagctactttcttttgacagatttttatgctaactttttacctgcaatgacctcttttaaactctctttacacaaatagcggcctgccaactcccgtatttcttccggggtaacctctttcacagcttgtagcgaacgggcaaaataatcatcgtccagacctgatgtcagaataaacatccaggcatctgccagtgagaaaggcgactcataattacggcacatttctccaagcatatagttgcgcaccatggccagttcttccggagttactttgtcattctgcaacttatcaatctctttgtagacttcctgtatcagaggttctacatattcattagctgtttctgtactgatacccagcaaaccgctgcccggataaaacatgattccggccgaaatcccatacgtgtaccctttctcttcccggatattagacatcagtctgcttccaaaatatcctccgaacagagtgatcagtacccggagtttcagatagtccggatgtgtcctcataatagtagttgtacccagctttactgcactctgcatcgcatcttctctctctatgaaaaggcgtttctcgggtatgctaacaaatgtaaaatctttcttgaccgccacttgctgatgatttccaaaatgtgtcgtaccgaaagcggcttctatacggtgggtaatctcgtccgtcactttaccggaaaggtaaacatagcaatttcccgaatgataatatgtatcataaaactcgcgtaataaagccggagtgatatgatgatagtccatttcttccacatagcgtccacacggatgctcctctccgtaaagtgctctcaataaacttctatgtgccagaaaatctacttttgatgcatttacctgatattgctgaatattggcatctattaccgtacccagttctttttccgggaagagaggttcttttatgatcgattcgagtacatcgagcgtttcggcaaaatacttatttaacgaatacagtgtgatatatgcatattccgccgaactggacaattcaagccatgctccataataatccaacttttcggctatctccgccgctgtatattttcgggatccttcacgtaacatgcgattggcaaataatgcctgcagtttttgtgattgttgccatcgtccgcctccaaacaaaatatcgacacgtaccacatcctgttcacctgcgttgataattgtcaacggcactccattcggcatgacagtacgcaccggaggaagaatattaaattggaccagttcctgaatttcgggttgtagtgtccggttcataataaactatttttctgtaaaaaactcatatattcttatatttagttgtgagcccgagaggactacttcaattcttcaagtcctttgcgaacatattctctttgcagatcttccggcctcaagatccggtcatcaaaaacaagcagatcaatatccaggcataccttttctttctttttatcttcctgctccctgccggcctctctttcgattgttttcaactccttcactacccgttcagcatctgcatcggtatagaaacgggccatttggttagagaatagtgccgggttacgaaagaataacggccttgtctcctgctcacccgtaaaacggatagaggggaacagagccgtcagtctcctacgagccagaaggagattctccttccggttataattgcttcctatacaaatcagacaggagtgcatcgctcacattacattaattaaacaaatcgtccaaccctgattccggttcatctataatgctatctcccgaaatactgaagtctttgcacgggtcaaatccgtcaggcaatttaaaagtctctttcggatcatatcccaatgtctggtcggcatacaccttatgcatatattttgtccagataggcaatgccagagaagccccctgaccataagtcattgtatcgaaatggatatcacgttcttcaccgcctacccagcatccggataccagtgaaggggtgaatcccatgaaccatccgtccgagttgcggttagtcgttccggtcttaccacccatatcggcagttattccatacctgcggacacgtcctcctgtaccttcattgattacggcacgcaacattaccaacatcttataagcactcgatgcactgatcacctcttccatctgtggcgagaaggtagccaatacattgccttcgctatcctctattttagtcacaaacaatggagccactcggattcccttattggcaaatgccgtatatgcacttaccatctctcccaccgaaatctcacacggaccgaggcagagagagactgtaggttgaatttctttattgcgtacaccgaaagagtgaatcaaacgtgccaaagcatacggattcagtttactcatcaagtatgccgaaatccagttgtttgagtttgcaagtccccatttcaaagtcaccatttcaccataatgtccttttgaagtgtttttgggtgaccaaggttttccattttcatcaattagagtgatttctacattacgtgtctcgtcacaaggtgagaatccgttttccatagccaatgcatacagatacggtttaatggtagatcccacttgacgacgtcccaccattgccatgtcatattgaaaataagtgtagttcggaccacctacatatgcctttacttgcccgtttatggggtccatcgacataaatcctgcacgcaggaagtgtttataatatcggatagagtccattggggacattatagtgtctttcacaccatgccaagtgaacaccgacatagattccggcttattgaatgcttttttgatttccgcttccgaaattccggcttccttcatcgtttgataacgggaagtctgtttcacagccctgtccaggatgcggtcaatttcctcttgagtcagctgattactgtatggtgcctttttgcgtcctttcttctctttgaaaaacaaaggttgcaagtactccccaacatgttcttccactgcttcctcggcatagcgctgcatgtgtgagttgatagttgtataaattttcagtccatccgtataaatgttatagtttgaaccgtcctttttcttattcttctcacaccaaccatacaatggattcatttcccagtcgatcgaatcttcataaaacttctgcatttgccagccacgataattgctgcggaccggtttaggagcagtcatcacaccacgtagatattcgcggaaataagttgccaatccttctttgtgatccacccggtgatataccaattccaacggcagattctgcaacgaatcacactcttccgctgtgatatatccggcctttctcatttgatctagcactgtattccgtcgtccgcgcgaacgctcgttgaagcgcaccggattgtaaagcgaagggtttttacacataccgatcagcgtagcagcctgttctattttcagatctttgggttcgcatccgaaataggtatatgaagccgttttaattcctactgcattattcaggaagtcaaatttattgagatacatactcaaaatttcttcctttgtataataacgttccagttttacggcaatcacccactctatcggcttctgaaacaggcgctgcaacgtatttctggcaacttcgtccgtaaacaattgcttggcgagctgttgtgaaagcgtactacctccacctgcatttttctgcatcagcaatccacgctttaccacagcacgtatcagcgctttggcgtcgatacccgaatgttcggtaaagcgaacgtcctccgtggcgatcaacgcattgacaatgttaggtgaaagttcattataagaggtgtatacacgattttccttactaagcgaccacgtacccaaaaccttgccatcctccgaaagaatttcggtggcaaatttgtaattcgggttttccagttcttctacaggaggcatatatccaatccatccgtaagcgatagaggcaaacactgcaattcctgccagcaccatcagtgcaaagaaaacccaaaggccttttactatctttttaatcattttattccgtagttttattcgaagttgcaaagataatcattcccgtccatctgacaagcgttcttttccatgtttgcacacaaaaaagtctaagcgaagcaaaaaaggcttccggtcgttcccgtttattgaggaaccaaccggaagccatacactcatgccctttatccgtccgttggctgcggcgccacagccagcctatcgattgatttaggctgtggggtcatccacgatatctccgtttcctccatcggccgcccctttcagataatcatccagactgatcaggtccagcttctcacctgcacgggtagctgttttagtaattttcagttctttattagcctgaaaatagatacgcacactatccacgcttttagcagtgatgtcctcttgtttttcggagcctttcgatttggcagccaacataaatacacccaatccctcgatatttaccgctttgccttccagcaactgctctttcagtttctctacaaaattctgaatcgtactcttaatatcacctaccgaaagtgacgaacggtcctgaatcttttgtgcaataaactttaagtcaaccgaccttcccagtgtgataagttgcggataataccttttgggagaattctcaacgcgcggatctgacgggcgctttactgttttaaaaattacactcatactacgtttctttttttaagatttaaatttcatttttttactctcgttttgttgatcaacaatgcaaatgtccgcttttacgcagagactgccaaacaaaaagggctttccggagcatgtttttccagaaaaaccataaatgactgatcatgaggaatatacagaatgtgtgtttcgaaacactcctgtttcccacaaactgatacaaactagacaaacatcttgctacgggaaagttctgtaaagggagcacaagatctattcctatgatcttaatatttgtatggtatgtgagcttaactatatatcttgtatgggtgtagctatccggagcaaagggtgtaaccctaatgaccggatagctatacctaagtaatggtagggctacacccctctcggatacaagctttcggaagagtcattaagagtagaacgtagtatccgggaagatacattattatattaaagaaataagttcttatctgaagtcatagagattctgccgggtctgttcaaaatcgttttgccggaatcggtgccacaaggcctgtcctctatttctaaaagaatccacaattcagcctatcgatcccccatgccggaaatttggcttccaaccaacagatgtgtttaaatataggacgaaaagaatgtttttgctcacgttctttgtcatctgaaagattttccataacttgcaacttttatcggttaagcttgtacaatgtcccattatgttaatctttcaatagcattgagctatcatacttaatgcatagaaaaagagggaatattgtcaactgataaacacttttgttaaatcaaaatagtttttaatatcataaacaattatagtatgaagaaaaataagattttaattattataccttcaaggtttgcgtcaacccgtttgccggagaagcccttagtgaaaatagcgggaaaagaaatggttttgcgcgttgcagagattgccaactatgtttgtaataaggtagaaggatgcaattacatcgtcgcaacagaccacgaaaaaatcgttaatttttgcaaggagaataatatagctgtaatgatgacttccgagaactgcaaaagtggaacagaaagatgctgggatgtcacaaccaaaattgctgagaaaccggattttatagtcaatctgcaaggagacaatccgttatgtccaccctggtttatagaacagttgattgaagcttggaaaaatgataaggaaggacaggttttcactcccagcctccatttatcttgggaagagtatgaccggatgaaagaatcaaagaaaatcacaccatatagcgggacaacggttgaagtcgataaatttggatacgcgcttgcattcagtaaagctatgattcccgtgataagaaatgaagaaaaggtcagaaaaattcttgataaatctcctgtcagacgtcatatcggactttattcgtatacttacgacgcgctcaaaaaatattttgaagtagaagcttctccttatgagcttcctgaaggattagagcaaatgagatttttacataacaggatacctgtaaaaatgatagatgtagactatagaaaccgtaaatccatgtccggagttgattcaccggaagatatcgaaagagctgaaaaaataatcgccgaatttggagaattcaatctttcaccggaatgaaaacggaagatatagcgatcagcataaccggttattcttacagtaatataaaagagacgatacctgacggagttgataaggaggaaattgctgccgtgtacgaggaaatcattgatgaatatttgcaaaaaggaattccccgggaaataccagctttaataaatgtcagtggagttccgggggcaggcaaatcgactttttgcaaaaaactgcttgctatgcctgaaaattcaagtgcaatctatattggatttgatgcaatcatggaaaacgagcgtttaccctatattagagaagaggtcaaccatgcggaagaagcattcaaaagatgggagctttctgcaaggatcgccggttatgaattacttaagagagctatagaaaataagtatttgattatattcgatcattcgtctgcgctctcccaacacattgatttatttaatctgttattgtctgagggatacgaagttcactttaattttatttttatcccggaagaagaagccaggaggcgagcgaaaaacaggaaacgttatatacctccatattatattgaggaaagaagcaaaacccttcaatatttattgcctgaatataaacgaatttgtaccacttttaaacaaatagaaccaatgagaaccagacttatcatagcccgtcacgggaatacgtttcgcccggaagaaactccgacaagagtcggagcaaaaaccgatctaccattagtcgaagaatttaagggaagaagtatcggaagatatttaaaagaacatgatatgatccctgacgtaatctatgcggctccacttttgcgtaccatgcagacagcccggttagctgttcagaccatcggtctggattcagatatttctccattaaacgcttttgtcgagatcgactatggtgttgacgaaaataaaacggaagaagaagtgaggttacgtttaggaaatggaaatatcgaaaaagggaaaaaaataattgaagattgggataaaaatgtagttgtacctgatggatggaaagtagatccggaccaaatcattcatacttggctggatttcgcagagaagactgtgatacctcatcagacaactttacttgtcacttctaatggaattatacgctttgctccctatttgacgggagattttgagaagttcgcccaagagcataaaataaaagtggctccgggaggactttgtatttttgataaaaacgatggtgattcattctggacttgctctgcctggaatgtcaagccttatgaactatatgcagatagccgctactgaaaatacgatttacacctctcctgacgcatcaaagattttttgttatacgccttccattcttgtcacaccaacgggacgtttaatagtttctttcgatttaggaggagaaggtgtaaaaagtatagagggccataagtcatccagagctggtggaagcagatttggacaagggaaaatattcatttctgatgataatggacagaaatggactttcgttcaaaatttcccgttttggcatgcacgtctgttcacaataggtaacagcatctacctgatcggtcatgccggggatatttgtataatgaaatcggaagataatggtgaaagctggtctgacacctatttcctcacccacggagaaaagtggcattcttcagcctgcaatgtccttttttccaatgggaatgtatctttagccatggagcaacgttgccgattgaacgaagtgacaggatgggacgtagccggattatcccctacgctgtttcgagcttgtgtcgaggacaatctttgccttgcatcttcatggagcagatctgaaaaatttatttataaggaagtgtttgatggagccaaattggattttttcggcattccgttttatgattgtgaaaccaataagcccaaggaaatagcgacaggtatcaacaatgctcccctaggctggcttgaagcaaatgtagttaaatttgtagataaagaccatatttggcatactgatttgaaagaagtttttcatctttttctaagagcccatacaggaggtgtcaattatgcacacctctttaaaatagaaatacaagacgaccaaagtatgattccctcattggagcacaccccttccggacaaaagatttcatatatcccatttcccggcggacatctgaaattctttatcatatatgatgaactgacaagattttattggttagtgtccaatcaggccacagactctatgagacgtgtcagctctttatcaaatataaagagatatggattacctaataatgaacgacaccggttacaacttcatttttcaaggaattgcgtagactggtgttttgccggaatggtggcttgctctacaaatgaattatattcaagaaattatccttcagcggtaatcaaaggagatgatttgcatattgtctgccgatcagccgatgaacatgcactcaaccctcaatataataacatgataactcatcatatcgtgagtaactttcgtcagcttatatattgattcatgactgattaaccgatattgttacagatcatatctaaaaatcgacagaggcataatacccgacatcatctccacaaactttacctaaaacaatcccgggtaaatctctcctccggtatcgctcacgttaagggtctgcaacagtttgccgtccggagcataaaacaactgaaactcagagtctgtattatactcttccacttctatcacaattaccgccggctgcttagggaaagtgatgattcttacatcttccagctgcatagatgccatcgtactttgcataaaggcctttgccacagcggcaggaacagcctccagagtttcgacatctacctccgtcatcaaccatttgcccttatcactaaaccagacgtttaattcccgtccgtccaccctgatatcggcaatgtgatagtctccctttcgttgccaatcaactgtagtaactttgggatacattttctgaaaggtttcctgtactttatcgggaggtggaaagccggctgcaaaaacagagacggaaatcagcaacagcaatcctgtcaacaaattaaatttaagctttttcataatgaggttctttttaatttcaagtttgataagtaacaataagaggagtattttgtttgtggaataattccacaaacatgtggcaaattccacatgcttatccccaaattatacttcattagcggctcatacgattctttcacagctggcataatctttgtctatttcatccattagtttcttttcagagaaacccaataattgtatcacctaaaagaaaaattatgaaaaagtagaagaagtaagaactaactagactccgattcggaagcaagaatggagtagtaaaagaagtagaaaactgaaaaacatgtttaactcaaacctattttatttatgacgaaaaaaagtaacctatccttaaggtttacaagagtatgggaaaaacactgcctgaaaacagcagccgcaactttattactgtgctgcgtgctgcccgtacaagcaaaagccgatacttacaaaacacaagagactgcaagtatacaacagcaaacagtgaagaccaccggtgttatcatcgacaacacgggtgagcctcttattggagtttccgtaaaagtgcagggcaccaataccggaaccatcactgacctggatggaaaattctcaattgacactcccccaaaagctctccttgagttttcatttatcggttataaaaccattaccatggaagtgaccggaaaggaactccatatcactatgcaggaagattcaaaacaattggacgaagtggtagtagtgggttacggctcacaaaagaaagtaaacgttactggttctgtaagcatggtcaatgcagacgtcttggaatcacgtcccgtacaaaatgtgtcacaagcattacaaggggttattcccggactaaatatgtctgtaggaagtagcggtggcacgttggatggcaaactaaacgtgaatatccgtggagcgggtacgataagtgacggatcgagcagcagtccgctggtattgatcgacggaatcgaaggagacatgaacactgttaacccaaacgatattgaatcggtatctgtactgaaggacgcagcctcttcatcaatctatggtgcacgtgcggcattcggagtcatcctgattactacgaagagtggcaagagtggtaaaacccgtgtaaactattcgggtaatgtgcgtttctcagatgctattcagttgcccgatatggtggattcttacacttttgcacagtactttaaccgggcttcgaccaatggtggagaatctcctacctttgatgaaaaagcattgcaaaatatcctggacttccaaaacggaaaatttactgacccttctactcccgaatattatggagtggaggccggaccggacggcaaatggaaaagttatgcaggatcttttgccaatacagactggttcaaagagttctataagagctggacgccttctacggaacacaacctgagtatcagtggaggaactgagaaactgacctatatgatcagtggcagcttcttgaatcagaacggccttatcaggcatggcgaagataacttcaaccgctatacgatgaacgccaaaatttcggcaaaacctgcggaatgggtcacattgaactatacaagcaaatggacccgtgaggattatgaccgtcccacctacatgacaggtgcgttttttcataacattgcccgtcgctggcccacttgcgctccaatggatccaaacggccattatatgcccaacatggaaatcatccaattggaagagggaggcgtacaaaccagtcaaagaaattggtataccaatcagctgcaagccatcttcgagcccgttaaagactggcgaatcgtagtagaaggaagcatgcgtacgtatacgcgaaaacaacactgggctgtattaccgatctatggatatgacgtaaacaataaaccttatttattgtcatggaacggtggagcagcagggtattcggaggttcaggacgaacgtgaagatgaagattatttctccggaaacatttatagtgactatgcaaaaacaatcggtaatcattattttaaagtgatgggcggtttcaatgccgaactcttccggccaagcggaatgaccgggtttggaaccgacctgatcagctcgaatgtcccttctttaggattgacacaggacaatcagaaagcaaatgcatgggcacgtgaaagagcaattgccggtttcttcggacgtgtgaactacaactataaagaacggtatatgttagaagccaatctgcgttatgacggttcttcacggtttgttggcgataagcgctgggggttgtttccatcattctccgccggatggaatattgcacgcgaagacttcttccgtccattggccggtgttatcggcactttgaagttaagaggttcttgggggcagcttggtaacaacaacacggataaggccaatgcctggtatccgttttaccagaatatgattacgggatctgccaattcgggatggttaatcgacagtaaaaagcagaacactgcccaacttccgggtatcgtcaattcactgatgacctgggaaaccattgaatcatgggacattggtttggatttcggtttactcgataaccgcctgacaggatcggtcggctattataaccgttatacatacgatatgatcggtccggctcctatattacctcccgtgttaggggccctacctccccaagtgaacaactgtgatatgaagtcatacggttgggagttggaactttcatggagagatcgcatcagtgaatttgattatagtgcacgatttgttttatctgacgggaagcgtaaaatattgagatatccgaatcctacgaactcactctcttcggatgtatactataatggacaaatattgggtgacatctggggatacaaaacgatcggtattgcacaaacccaggaagaaatgaatgcacacttggccaatggaggtaccccaaactggggaacgaactggggagccggtgacgttatgtatgccaatcttgatggaaaagaaggtgtcaacaatggttcgaatactttggaagatcatggtgacctgacaataatcggtaacaacactccaagatataatttcggtttgacgttgaccggggcatggaaaggattcgacttttcggtgttcctgcaaggggtaatgaaaagggattattggttggacgggccatacttttggggagccaatggaggattgtggcaatcgactgcattcaaagaacatatggattattggcgtcctgaaggcgatccactcggtgcaaataccaatgcttattaccccaaaccctattttaatacggataaaaaccagaaagtacaaagcggatatcttcagaatgctgcatattgccgcctgaagaatgctcagataggttatactctgcccaaaacatggactcgaaaagcggcaatggaatcggtgcgtgtttatgtgtccggagacaatctggtaaccttttcgggaatcagcggagtatttgatccggaattattgggtagcgactggggagacggtaagctctatcccttgcaaagaacgatttctatcggcttaaatgttaacttctaattttaccagacaaattatgaaaataaaactgaaacatatttatttctgctcattaatcggaatgggcggattggcactgacttcgtgtaatgattttctggatcgttcgcctatcagtgacatcactccggaagattacttcaacactgtagatcaagtgggaagctatgttatcaattattacgatgactaccttgaaaactcaaatacgactaaaatgtatcaccaaagagcatggaactccggagtggtacgaaatgatgcgaacactgacaatttattgagtgatgacggaaacctggattattttgcgggaaataagcaagtacccgaagggaagaatattcaggaacctctgaatcgtattcgggtatggaattatctttttgagaaagtattacctaaagaaaaagaaagtacaatccccggagatgcagaactgttaaagcaatacatcggagaagcctattttttccgtgcgttggcatattataacgcattggtacgtttcggtgattatcccatcattaccgaagtattgccggatgattcggaaacactgatcaaaaaaagtcagcgtgccccgcgcaatgaagtggcacgtttcatcctaaaagatcttaacgaagctgtcagtcgactgaaggaacgtggttttcagaataaccaacgcatcaacaaacaggctgcattagtgctgaaatcaagagttgcactgtttgaagcaacttttgaaaaatatcatcagggaacgggacgcgtacccggcgatcccacatggcccggagccgccatgagttataacagtggaaaaacattcgatattgctggcgaaataaacttcttcctgaccgaggcaatgcaggcagcggcagctgttgcagaccatgttcaattggcagagaactcgcatgtaatgaatcctccatacaatacactttatggatggaatccttattttgaaatgttcagtcaaccggatctttcgaatgtggaagaagtactgttgtggaaacagtataacctgtcacttaccgtgtcgcattgtgtgggcgcccgccttaaaaacggagaccgtaccggactgacacgttcgttgatcaaaacattcctgatgaaagacggtctgcctatttatgcaagtaatagtactattgatgacagaacggtgtctgacgaaaagaaagaccgcgacgagcgcttgcaattgtttgtatggggagaaaaagatgcctggatgacagatgaaagagcggatacagtgaagaattacaataaggatcaggcgggaaactcagtgacaaatccggtaccggtaccttgggtaaaatctactgtaatcagtgatcaggaacagacacgtgatatcaccggttatcgttcccgtaagttctatccgtatgatgacgaacaaagtaagtcggacgaactgctggggaccaatgcctgtcctattttccgtgcttccgaagcatatcttaactacatagaggcttgttatgagaagaatggtacgctggacagcaaggcacaggaatattggaaagccatacgcagacgtgccggtgtcgatgaagactatcagaagacaatcgcccgcacggatctggggcgcgaagacgatctgggagtttattcaggagaccggatggtggacgctacactttacaacatacgtcgcgaacgtcgctgcgaatttattgctgaaggcatgcgctgggatgacctgaaaagatggcgctcttgggaccggctatttacggagccatatattgtggagggcattaacttctgggatgaagcctataaactttacacaaccgtagataaagacggcaatgaaaaatccgcggtggtagctgatggcagcacgtctgccaacatgtcgccaaaatcggacgggaaatacgtacggccattgcgtaggacacaaaccaataatcagctttatgacggatatacctggaaaaaagcttattatctggaaccactcggcttacaggacttgcaattgtcggccaccaatccggaggatatcaatacatctatgatgtatcaaaatccatattggcctgccggcacaggcaaagcgcttgaatgataccgctaaacgtataaaaaacgtaatatgataaagttcaccacagagtttacacaaagcaaatttgccggtatatcctgtggtgaacaaaaacaaatctccgagtgaacttatcttatggtttttaagttatataatgtataaagaagacaataagcggaatgataaaatcaaatctgaccgactaccataaacaacaacttaaaaaaatataagaaattatgaattcacatcaaggattattcggtggaaatattccacaagatgtaactggaaaacaaggcgaaaacgctatcttcattgtctacgggctgaaacaatcggataacactataaaacaagtaaaagatctatgtgctaacttttccgcactgatacgcagtatgcgtaaccgatttcccgaaatgcaattcagttgtacgatcggattcggagctgatgcctggaaacaactttttccggagcagggcaatcctaaggaattaaagacttttgaaacaattaaaggagctaaatatactgcggtttcaacccccggtgatattcttctacacatccgggcaaaacagatgggactctgctttgagtttgcctccattatcgacgaaaagctgaaaggggttgtagattcaatcgatgaaactcatggattcaggtatatggatggaaaagcaatcatcggttttgtggacggtaccgaaaatccggcagtagatgagaatccctatcattttgcggtgataggtgacgaggacccggactttatcggtggcagttacgtcttcgtacaaaaatacattcacgacatgactgcatggaattcacttccggtcgaagcccaggaaaaggtaatcggccgtcataaatacaatgatgtggaattgtcggacgaggaaaagccgcaaaatgcacacaacgctgtcactaatattggagacgacttgaaaatagtacgtgccaatatgccgtttgccaatacttcgaaaggagaatacggaacatattttatcggctatgcaagtaccttcagcaccacccacaaaatgttggagaatatgtttatcggtgaccctgtgggaaacaccgaccgtttactggacttcagcactccgataacaggaaccctgtttttcgcaccttcatacgatctgcttgctaaactcggagagtaatagttactctccatatagtacagtttctactatccaggcaaaaacattagctatgagtttggacgcattattattaatggtcccggaattattgtttatacggttatcggtagttgacgtcgaactggacgccgaactacctatatccgtatcaccccaataaacgattctccttgaataatcaatgcctaaaacaatacctcccgcaggtcccatcaatataggagtaatgcctttggatgcttccgtgttgagctgtatttcgccatgataagcatcataattgcgtaaagagaagtcggtattgataggagtatatggggcactggtaaaaggaccggtagtggtaaagtaactgttaccattctctggagttgccaaaggatagggaccggtattactcgttaaaaaagaaatgccgttattcccgcccaatatctcttttaataaattctggctgacatccagagcatcataagaaacaatcaatacacgattctttttcgatttcacccagttatgagctttttgtgcatccgaggtaccgaacaacagattgcccatataatggacatagacaacatcaaaagaggcaaaaagagcatcggttaagttattatagttggcatttacacctatcagattataacctccacattcaacagttccggtcggaccgaaattattttgattattcaatatacctcgaagaccggttgcacgcgcttcggcactgccggaaccaataatgttcgttcccagatatcccaacccggcattgaacgttagaagatgaattgtctgataagcggccacatcatatttttgctgaatattcaccagaatacgccaacggtgggctgtgatgacaaaattttgaattcggctagtatcattcgtcgaattactctgcagagccgtaatcactaactgacttccattttgagcttttgttacagtaaagtattcatttgccaatgactgacttccggttcctgtgggagttcctgcggcatcggcccattgtaaggtatagtccggaagatcggtacttacgttgataatgcctgcggaacctgctttgttcttgagaacaatttcccgggtcgacactccaaaatgatgttctccatcaaaattcatatcaatggtgtaatcatcccaagcctgtatttcggctacgatatgggcggaacgattattcgccgcttcgtccgggctaccccaccccggacctgagaccttctttatattgaaaatatacttatgattacgaagtacttgcccgaaagcattttcaacattatcgggatcaaaatccatacggtagtaacccggttgatcactcccttcataataaccctctacaacaatacaggttgcctgacttacccggttgtccggagttggtgaatcggcttcaggcaagtaaagttgggctgaaaattcattcaggttctcagcaggtacaggatacaggatactgtttacatttccggaacttccggcaggtacgctcggaagcgtaaccctgacgactccggtttcatcgggtattatctgtaagtggtcattggcacgatatgctttcacccctgacagcttaaagtttgccacttccgtagctttcacgtctacccgggcaatggaacgtaacatctttattccggtaatattatttataaccgttgcttctaatcctccgggcaattcatactccccatacattggaaaatcggaagtgatattgttgaactggagattgatgttctttttcaccaaatcttcgctatcatccaccgaaggctcattggctattaccgcattggtagcattggccagtatgagtaattttaaaggcgaactgcttgattttaataaagctttaaaagaagcagcggatgaagtgttgttgatggatatgccgggtacacggtacttatatttaccttcttcaaacactaacacttgaatctcactgattttagactcatgatcggtcgtcgcaaatgttcctcgcgtccgggcatatgtagtggaggccggtatggttatcactaaccttaccgatacatcctctgtattatttctatctgcatctccggacacttccatactgtcggtacacgacatatataaaaggccggttatcagaattaccattaattttttcattagggcttaggtttattttctcagatacaaagatggactttttcaggaaagaatccgtggcgtttaatgaatggtgtaaacaaagatttttctattatcacatctcacatgaatttattgtccaattatgcaacaatcggaaatgtgtgtaaagacgtgtatctattttcgaaacttcgtcataaacttttcaccagttcttgttgccggttaaagaaatggattcgctgaacctcgccactctgcgaaatcaaagttgaatacttctttaatgactgtatccatagcttcaagtgctgaaatagaaaatcatctttcgaagttatggaattaatggaaaagacccctatcaggcattgatggtaaatatctgtttctacataactatatgtagactcaaaattgatatcggatatatatattttcacatcttttccggatgaatattttccctgagctgaaattttttccaattcattcagcaatatcaataattccttttttattctttttacactgtcttctgatatcagattgatatttaagaaaaacttgacctcattgaccaatctgataaatatctctttatcccatatataattggttgactggaatagctgagacagatttacaaattctttttgcttgtcaatcaatttttctggaatctccaaatcttcataatgtctgcctgcatatgtactttcatgctggtaaatccatttgaaaagttggaatttggataaggcttcatactttaaatacagggtttgtggaacggtatttgaagaggtgcttctttccgaactttcccgttcaatcaattgaccgaacaactttatatacgaatcgataatagaataataggtctccgtagggtgttggcattgcaacatattcagattaacaatagcgttgtcattcaaatcggcccctactattttatcaagagagatgcccatgtgttgagatatggtggcaacttcggcaaaagtgaacggtacttcaccccgcaaccgcctgtaagtagcttctttgccaaggtaaagaatatccatcagcgcatttgcaagattattccccttgggtaagtatattttcattgcatctattaaatctgtatttatattacgcataatcattgtttttatatttttatctgtaaacaagtaatctgtaacttttgtttcgcctatcgaaacgaacaatccctttgatgacggtgcgttgcattatcagagctttcttttgcagggattgcttcaatagacactttttgtttataaatacatttttaaagtcacaaatcgttgttgtctggaaggtatatttgttatctgaaaaaaatgtagtatatccacctaaataaaaagataatgaaaacaagtaaaatctttatgactacactggttgcattgactatggctgcatgcagcaatgacaatgattgggttgaccagtccagcaatccggacgtaattgccccggatgcatatgcctctttttccatcaacattccccacgcatcgaagacacgtgcagtatctacagatccgggaattgcagcggaaaacaccgtgaaatccttacatgtgtttatttatgacgcagaatctcccaatacacctactgtagctgaatttacggtcgcaggaggtacactcacacagaaaccagccgggagttctacctggatgaccagccaaccgatcagcactaaaaagacggataaatatatttttgcgggagtaaaccttaatacagaaatagtgaactatattacttctaacggattgggtgcattcagctataaagatttcacacaagaaataacaaaattggcggatcaaacaaatggatttgtcatgttcaatagtgcttatccgacccttacgcccgctgctgatttatatgagaagaaaagtgaagccgaaaacaatcacataaccatttctgtgaatcgcgtcactgcaaaagcggcggtgttccaatcacagagctttgtggtgaacggaggcggaacgatgacagatctgaagttcggctggagaaacctgaataaaaaattctactttattcaggataacagaggcactctcatcaaagactataattgggctaattataccgcagaagattttacgaggggaacagatgccatcaacgtttatgcttcggctgatgtgcctacctctttttcttatgctacggaaaatgcattccagtatatttcgggtacatccaatgtggatgcagcaacttttatcagtgtcagcggggtatttacacccactaacatcatatctgccaaaaaaaatcctcctacagttgcggctgattttgaaatcatcgtcaatccgaaaccggtggataaaacattctttgtcgtgcggactgccgatggtgttgccaattactttatagatggacctacggcagaaaagtttgcggagctatgtgccgcgaatactccgcaaatgccatctatcaatgggatctacctattatcggagaatacgtatagcaacggattgtgttactatcatatttttgttaacggtgacgcagtcacaccgcaggctccttataatatctacagaaaccaatatttcaagatcaacatcaattctatacaagcaccgggaaatccttcggacaattttgacagaggagaaccaatcaagcctaattcatggattggggtcgacatccagattatcccttgggaggtgattgaagaagatcacgatttataaccagctaattaatgccccacagaatgtttacctgcaagatagaagccggattcagagtattcatattcattatattgcatttcgtactcacgaattgtatccgggaagatatgtccggatgtccccgggatgatggagggctggctctcaaattcagctatgatacaaatgcagactcaagactgagcactgcgcaaggtgttgatcgattggctgttttcatattcgatgaaaaaggactttttatctctcaggtaaacgattctatgacttcaatcaacgacgattatgtcatggagctgccttacaaacagggcagttaccaatttgtagcatggggtggctatgataaaagtacttatcagacttctgaatgtgtgccgaggaaaacttatatcgatgatttctttctatctgtaaaacgtcaggaggacaaccgggtaaccaatcaacccaaactgctctatcacggtatgcacgatatagtggagcttaacagtaaagaaaaaacaatcgtattgataaacttgaaacaaatgacgaatcatatccgggtcattgctcataatttgaatcaagatagaagtgacaacatttatatagaggataataacggtaagtatggatatgattcacaattctccgatgatgaccggataacctatattcccatttatgaagcatcatcggaacaatcaaatccgttgattgccgacttcaatgtaatgaggctggaaaaggatagagaaccccggctgcgaattgccgacaaaactggtacaatccgctatgatgagaatcttattggtaaacttataggcggaaatcccaatattgattttgagcataaccatgatttcaccattgaaatatccttcgataactacatcccggtcattatcaagattaatgactgggagatagttaatgaagaaatatgactataaactgcagaacaatgaaacaaagaaaggtacactcatatcaatgaggattccgtgaaagatggcaacaggtatcatgtccttccccgaatagtgagtaatggacggcaacaatacatccattgaatttacaccggcggcagaaataggggccagtttcccaaaatatttcctaatcagtggtgtgcccagcaatgccatcatttcgcgaaaaatattggccagcaaagcaatcgtaccaagttccgttgccaactgtaatcctacagaagcctccttgaactgagtaatcaagatggatgaaagggaataatatgcaaatccgcttcccactgccatacaatcgaatacactccactgactcagcaataaactggcaaaagctgaaaaaagaagagttccgacaatggtagctatcggcactaaaagcatattgggacgtaggcttttgatcagaaatttcagattcttattgcttccgatactgatgccaacctgcaacatcaacgcataaagtatgtacatagaaagattgtgcatgtcaaactggaaatcattgaagattccgaccagacaacctatacagaaaaatgcaacaacaattagactgcttttcatgactttcctcctttcttgaaaaacaggcgtaatacgagaaaagaagccaacatgctgcccaagatacttgaagtagccaacacaatggcttgccatccgaatttacccagattatttacgattaaactattggagcctatcgaaaggcccagcacgaaaagtagcaggaatatcgtaagcgaagtactcttttctactttctccagaaatttcaggttacgcagcaaataaccgatgccaatacctaaaaacatgatagatataatggaaaacatactcgtatattttaaaaagttacacaatgcactccctggcaacttttatgtataagctaccggacagatcctctctttcaccttatattaataagtgaacgaaaagagataaatcaaactacaaaacagggagtaattcagataaatccgctaaaccaatgtacatgcacaatgcagtgtccgtacagaatcttattttcttgcacggcattatgtatgctatatgtagtaaacaatcggttcatattattcattaattacagtgcaaaggtaatactattgcgcatattttccaaataattatgcaaaatataaataatcatagtagtggaattactcataaaaagacgatgaaaatcttgcagaacctatttttttcttcgtatctttacaaaccgaaataaaggatatatcaataaacatataacgatatggaaaacagaagtttagtaaccatagcggagcattcgagggagaaaattctctatatgctcgaaatggcgaaacaatttgaaaagaatcccaaccgccggttattggaaggcaaagtagtcgctaccctgttctttgaaccttctacgcgtacccgactaagtttcgaaactgctgccaatcgactaggcgcacgggtaatcggattttcggatcccaaagccaccagttcatccaagggggagactctgaaagataccattatgatggtgagtaattacgctgatgtgattgttatgagacattatctggaaggagcagcacgctatgcaagtgaagtggctccggtacctatcgtaaatgccggagacggagccaaccagcatccttcgcaaacgatgctcgatctctattctatatataaaacacaaggtacactggagaatctgaatatctatttggtaggtgatttgaaatacggacgtaccgtacactctttactgatggctatgcgccactttaacccgactttccactttatcgcccccgaggaactgaaaatgccggaagaatataaaatatattgcaaagagcacaatataaaatatgtagagcatacggactttaacgaagaggtaattaaggatgctgatatcctttacatgacccgcgtacaacgtgaacgtttcactgatctaatggaatatgaacgggtaaaaaacgtatatatccttaaagcgaaaatgcttgaaaatactcgttctaaccttcgtattcttcatccgttaccacgtgtcaatgaaattgcttatgatgtggatgacagtccgaaagcttattattttcaacaagcacaaaatggactctatgcccgtcaagctatactttgcgatgtattaggaatcactttacaagatattttataaaatcatgagcgagaataaacaagcattacaggtggccgcactgaaaaatggcactgttatcgatcatataccttcagagaaactttttacggtagtttcattgctcggattggaacacatgacgactaatattactatcggattcaatttggacagtaaaaaactaggtaagaaaggaatcatcaagattgccgataaatttttctgtgacgaagaaatcaatcgaatttccgtagtagcccctcatgtgaaactgaacatcatccgtgattacgaagtagtagaaaaaaaagaagtgcgaatgcctgacgagttaaaagctatcgtaaaatgtgctaatcccaaatgtatcacgaataatgaaccgatggctactttatttcatgtgatcgacaaagacaattgtgttataaaatgtcattactgcgagaaagaacaaaaaagagaagatattacaatcatttagttatgcactgcaagctacgagttctagaccgctaaacgatgtcggacgtaactcgtagctcgtaacatataaagtgaataaaaagatgaagcaagactggaagcccggaactctgatttatccgttgcctgccgtattggtaagttgcggaagcgatgaaagcgaatacaatatacttacggtggcatggaccggaaccatttgtaccaatccgccgatgtgttacatttctgttcgtcccgaacgtcattcttatcctattataaaaaagaatatggaatttgtgatcaatttaacaacccgggatatggcattcgcaacagattggtgtggagtacgttcagggaaggattatcataagtttgaagaaatgaaactaaccccgggcaaatgttctgtagtgaatgcacctctcattgaagaatctcccctttgtattgaatgccgtgtgaaagaaatcgtatctctgggatcacatgacatgtttatttctgacgtagtaaacatccgtgcagatgatcgtcatctaaaccgggaaaccggaaagttggaactggcagaagcaaatccgcttgtatatgtacacggaggatattataatttaggagaaaagataggaaaattcggttggtcagtagaaaagaaaacaaagtgaaacgaatagttctcctttttatatcgatatggattgcttttgccgcttatggggaagacaatcataaaaaggaaagacacccggatgaccgcaaaataaatgtaggaatcaggggtggattcaactcttctatgtttctggtttctgatctgaaaattaaagatgtaaccattgacgaaattcagaacaactacaaaataggatatttcggtgctctctttatgcgcttgaacatgaaaaggcattttatacaaccggaaatctcgtacaatatcagcaggtgcgagatttctttcgataaactcggctcacagcatcccgacattgaacctgactatgcatcggtcagttccactatccacagcattgattttccattactatatggttatcatgtagtaaaacaaggtccttacacaatgtctctctttgcaggaccgaaactaagatacttgtggaataagaagaataaaatcacttttgagaactttgatcaacagggtatccacgaaaagctgtatcccttcaatgtcagtgcagtaattggcgttagtgtcaacatctcccgcatttttttcgattttcgatacgagcaagggcttcacaatttatcaaaatcagtaacatacgataatatagatatggaaggtagaccggaagtaagcaatatcacctttcgacgtcgtgacaatgtgcttagtttttcactcggagttatattttaaataactttttcttcaaaaaggttgcacactctttaaataatatctaaatttgtgcgattataataataaaggtttcaagatacactttaatcttattataacaaataatgaaaagagacgatttaattttcgatattatcgaaaaagaacatcaacgtcagttgaaaggcattgagctgatcgcatcagaaaatttcgtaagtgatcaggtgatggaggcaatgggatcttgtcttaccaataaatatgcggaaggatatccgggtaaacgctactatggtggctgtgaagtggtagaccaaagcgaacaaattgccattgaccgcctgaaagagatttttggtgcagaatgggccaatgtgcaaccccactcaggagcacaggctaatgcagccgtatttttggctgtactgaatccgggagataaattcatggggctgaatctggcacatggaggacacctttcacatggttcattagtaaacacttcgggaatcatttatactccctgcgaatataatctgaaacaggaaactgggcgcgtagattacgatcaaatggaggaagtagcattgcgtgaaaagcccaaaatgatcattggaggcggttcggcctactctcgtgaatgggattataaacgtatgcgcgaaattgccgacaaggtaggagcaattctcatgatcgacatggcacatcctgccgggttaattgcagccggtctattggataatcctgtgaaatatgcacatattgtgacttcaaccactcataagactctccgaggacctcgtggtggcgtaatcatgatgggaaaagactttcctaatccttggggaaagaaaactccgaaaggagaaattaagatgatgtctcaactacttgactcagctgtattcccaggaatacaaggagggccgttggaacatgtgattgcagccaaagctgtagctttcggtgaatgtttgcaacccgaatataaagaatatcaaaaacaggtacaaaagaatgccgctgtattagcacaagccttgattgaccgtggtttcactattgtttcaggtggcacagataatcattccatgctggttgacttgcgtagtaaataccctactctaacaggtaaggttgcagaaaaagcactcgtatctgctgatataacagttaataaaaatatggttccgtttgatagtcgttccgcattccagacttcaggtatccgtttgggtactcctgccatcacaacacgtggtgcaaaagaagatctgatgttggaaatcgccgaaatgatcgaaaccgtattatctaacgtagaaaatgaagaagtgatagcacaagtacgtgcacgtgtcaataagacaatggaaaaatatccgatcttcgcatattaaatagcacattttagtattaaacaataacatacgtgggcccgcaattctctgtgaagaaagttgcgggcatttttttgctcttttaacatcgcattaacacctccctcaaaacctttcattcctgttaaccgttgataagtaactaaaaaaagaagatgatatttacttaatacctaaactgatatgaaaataagaaatctaatggtcgcagcaaccttattggttactgccggagctatggctcaaaatcaagattgtgccttcttctttcccaaccaagaaggtgaacaaatcacccgtaattgctacactgctgatggtaaacttactaatatcctagtctacagagtagatcaggcgtatgaatatccgtcaggtatggaggtagtagcaaattatacatttgctgatgccgcaggcaaaacactcaattccggacaaatggtagctcgttgtagcgatggaaatttttctatgagtatgggagatgtggcaacattccccacagcactcaacatgatgaacgctgatgtatatatgatgggagatttaatgaattatccggatgccttttccaatccgatgaatccgggagacgatgacgaatttgatgacggaactctgcgtctttaccaaaaaggaaataaaaacaaccgggctgaaatctccgtattcgacagagaatttgttactacagaaactgtaaatactcctgctggagcattttattgtacgaaagtaaagtatgaaatgaatatctggacaccgaaagaaacaattaagggttacggatatgaatggtatgcacccaatattggtattgtccgttccgaacaatataataataaaaaggagctacaatcgtacagtgtgttagaaagaattaaaaaatagcacactggactctatatatccgtcatccccgccattcgttcagaaagaatagcggggatttatttgactaatctccaagaatcacaataaatttatgggcctccaagaaactatctcagaatagaaaaaagaggcaatattactggttcggatataatgatcccctcgttctagctttaatctattacaatacaaggctagaacaaggggattcttatatttgaagttttaacctataaaatcctcaatttccagttttttttgaaactacctcttcctgtatatggaaaagtttagctcaatccttcaatattgccatccacaatatcgatatggagtgcttgcggctcttttggcaaaccaggcatacgcataatctcacctgcaatcgctacaatcatttcggctccattgttaataacgatatctttaatatggagttcaaagttatctactgccccatatacttttggatcggctgaaaaagaatattgcgttttggcaatgcatacaggataatgaccgattcccatttcttcaattaatttaatcttgttacgggtcaatgtgctataggtcacaacgcttgcaccgtataaattggttgcgactttctcaatcttctgctgtacactatcttcatcattataggtaaactgtaatggttcggatggtttgttttcaattgtctcaaccaccagattcgccagatcaacggcgccttcaccaccttctgaaaaagcattattgatagcatagcctactcccaactgctcacagtgctcacgaagcaactccatctcttcatccgtatcactggcaaacttattgaaagcaacaataacagtctgaccaaacgagtgcagattgcggacatgcttatctaaattacgcaaaccttctctcaatccttcgaggtttggctccttaatgcgatcgaggctaactcccccatgcattttaagtccttgcgcagtagccacaatcactgtcaaacgcggctgcaacccactcttgcgacatttaatattgtagaatttctctgctcccaaatcagcaccgaaaccggcctctgtaattacataatcaccaaaagtcattgccatcttcgttgctaatatagaattacatccatgagcaatattagcaaatggacctccatgcacaaaggcggcagtaccttcggtagtctgtaccaggttcggatgtatagcatctttcaatagaactgttatagctcctgccacacccagatctttaactgtaaacggtttattatcataggtatatcctaaaagaatattttcaattcgacggcgaagatcatccacgtcttttgaaagacaaagaattgccatgatttctgatgctggagtaatatcaaatccggattcctgcgtaataccgttggtcttcggtcctagaccaactacgatattccgtaaagaacggtcgttcacatcaagtacccgacgccaaagaatctcttttagaccgaaacccttagattgattttggtataaataattatccagcaatgcggaaatcatattgtgagcagaagtgatagcatgaaaatcaccggtaaaatgcaaattaatcttctccatcggaagtacctgggcataaccgcctcctgccgctcctcctttcattccgaagcacggtcccaaggaaggttcgcgcaaagcgacaattgcttttttgccaatcttattcagtcctaacgcaagaccgatagaaacagtcgttttaccaatgcccgccttggttgcagtaatggcagtaaccaaaatcaggttactcttttttactttctcttcatcaatcagatactcgggaattttggcaatataacgaccataattttctacttcatcgcggggaataccgatgctttctgctacttgttttattttcttcaactcaacactacgtgctatttctatgtctgatttcatatcgggagtttttaggtttttaaaatggagttgcaaaattaacaattaactccatatcaaagttgactttattacctttttttagtagggagcaaaaagataccggaggattgacggatttcccattgaaaaaaggcgtatatttgttacctacaaacaacaaacaatatgatgcgatatataatcctcttagtcttgtgcgcctggaccggaatagcattggccatagattaccatgcaaaagacagtcttttattacaattaaaacaaacgacaatagctgcagaacgaatcaatatttaccgaaacctggcggacatttgttttgaaacccctgaagaaaagacatatttgctcaacatgtatagagaagcccaaaaggctggcgatacatcgggtatgctcaatgccttaaatgatcttgtatgcggagagacaaaagaatatcgtatggattcagcatatcattatatggaactgataaaagcaatccgggagccccaagaaacagcccctgtattggcttaccttcaaatgcgatttttcgatacactatgcagccacaatgaaacagaagaagctatcacaaaagaattgcaatttatagaagaaaagaaatctgatgaagcatcactttacagtaaaatcgcccaagcttacatcaccggtggtagccttcattacaatgacatgataaaggaggcactcccctatctggaaacagcaatgaacttatctaagcaattgcctccggaaaagcaaatcttatttgtatcgatcattgtttggaaattatccaatacatacagtatgctgaataaatgtgattcagccatccggattttagatgagaatctgcaaacccaacaacaatattacaaagatcactatcaaacacaacgtcctttttataatatggcgatacacgaattacgcttttatacatctctattgactaatgccatttcggaggctcccgaaaaaatggattattactggcaacaaatagttaaattgaacaaaaagctaaccaatccgtacgatcgatataactattttctatcgatggataactattatctgaatcaaaagccccaaccccattatgaaaaagcattggtggctaatgatagtctgatacaaattgcacaagaaataatcccaaacaatctaccgggattatacgacattcaatcacaaacctacgaagccatgggtaacttcaaagaggcattggcatacctcagaatagcgactcaatataaagattcgctgactactgaaaatatgcaaaagcaattgggtgaactccagataaaatatgaagtgaataagttgaacaatgaaaagtcacaacttgaaattaaaaacaaacgtattctggtgatatgcctgtctatcattctgataattgtaatctttgtctgtctgtatttatatcacgacctgaaaaaagagaaaaagatgaagtttcatctccggaacctcaagcaaaaagccgaagaaagtgaaaagatgaagacagctttcataaactctatttgccacgagatacgtacgccactcaattcgattgtaggtttctccgacttgatattcaatgatgagatagataaagaaacccgtgaaggtttttcacaagagatccagaaaagtacaattctacttacttcattaatcgataatatgcttgaaatatccagtctggatgtatcacaagagaagttaccttgcaaagaagcgaatcttaattctatctgtatacaagagatgacattattaaatcggtctcataaacccgatatagactatcggaccgacttgccggaacaccccatcatactgaccacacacgagaaatatttatcattagtcatagagcatctattgaacaatgcaaataagttcactgaaaaaggcattatcaccctccattgtcacatcgacgaagcacgccaacaagttcatataagcgtaacagataccggatgtggtataccggcagacaaacataaggaggttttcgaacgattctccaagctcaatgcattcactccgggtaacggattgggactttatttgtgccaactgatcatccgcagattgtccggaaagataagcattgacccaacatatacaggaggtaccagaataacagtgattttacctgttcaatgacacctccttaattctcgaacacagaactatttgaaacgtgaggtatccactccctctcgtttcttctctttatagcctccaaatttataggtaaacgaaacaccaaattcacggaaagcagagtaatggttggtcacgttctgcatagcataataaattcgcggtgaaatctgacctgtttcaaacaagtcattacatcgaagagtcagcaatgcctttccattggcaaaaccatacctgagcgctatgtccaagttgccggatgccggtaaatcatagatgccttgtatcgccttactgcgtatcattccactcacaatcagcttaatatccggatgtgagaacagagtcactgtatgattcatattcaacatcgcataatatgctttccgatcaaaaggaatatcccaaaagtcactgtctttttgacgatcgtaaacgccggtcaatgtgaaacgcgatttcagccagcgtccgatcgcaaatgggacaacagcctgtacaccggcttgctgttcaaaatcaaaattgaaatacttataaatttcaaccaatcgctccggtgattgataaagggtttgtgttgcattatccttagtatgactataccatgcattaaacatatatttactgtttaaaacataagtcaactgtagctggtagttaatctcaggtttcaaataaggattgccgtgaatctcggaatatcctccacccatataagaaactgcatcctgagtagcccagtaatcgggataacttttatcactgctgagggataattgccatacatttcccggtgcaggagcatagttaatgttaaaagtcggatacaggctccattcattccatacagtcgtgtggaattgttcggcagccaatgaggcatctaaagacaatttatcaccaaaagccttgttaaatccggcgtaaaaattaagtgtttgttcccgacgacgagacttcatattgctatttcccgatattatttcatcagtttcagggtcatgataatattgatggctgttgtccaaacttgtcgtatagactgccccataattcattccccacccattgcccagatcatgttctccggagaggaaaagtttccaacgattgatacgctgagagtctttaacacgaaaatccagttcatcactccccatccgactgtgaagtaattgtgaagaaggtgaatgataataagtatattccactccggctttccatccgaatggcatatgataatcgaggcgtgcattatggagctggtcggtcatacgggtacgggcattcgaaatttgagtgccgtctacagtgctcagattaaaaccattcacaaattgggcattgtatgtcacactaagttgatggtttgcggcaaatacataatcgccggctaaacgcaggttgtgtctattcgaacggcttcgttgagattcattcgtacttatgggatgtatcgtaccatctgacaaagcgtgcaaagcctctttatccgtcaggaaatagtttcgcccatgactgtaagagtaaagaaagtctgcagagaatttatctcccgaatacagaaggctcgcacgctcagtcaaatattcataatgcctttgccgataatcactgaaaaactcaccctgcaaggtggatttcccggagtctccctgtttcaggcagatatttatcatagccccccgcacctgataacgtgcaggagccgaatacatcacttcggccttttcaatacgcccggcaggaatgctttttaaaagagtgttcagttgttcctgagtcattgtggttactttgccatccaatacaaccgtaacactttttcctcctaaagtcagattatcattcatttcgctcactccggggagttcctttatcgcgtcatatgcattgtctaccgcaaaattctgaataagtcgaggcaaatcatatacaagttttccctgcattgctttcaccaccggacgttcacctaccaccatcacttcgggcaaggatctgtacaaactgtctaaacgtccatccatcgtaatcagactatccgcagaaagtatccgatcttcatccgcgttctgtgccgctacctgaaagcagacagcacctgcaaacacaaaagtcaagtaaattcgtttcattttttattccttgtttgggttacagttgcaaagtacggcagaaaaggcaagacaatacgttatcatcgacttatgtagtgttatctactgttatcggtagtgttatttagtcttatcagatgtaacaacaacaaaggttaaccattatctttgcctgcatgaaactcccaatcaaacatatcgccatacttgtaattgcttctctgatggccatctttgcctaccaggcatactggttggttagtatgtaccataccatgaaaagtgatatggaacattcgattatcgaggctatgcgcacaagtgattacaatgagatgatgttacgcatagaacgcatgcgtcgggatgaccaagatcatggtgaaatctctgtttccgccggatacaatgatgaaggtggaacattggttcgcagcagcactatggtccataaagaaaagattccgggaagtacaggaatacaacaagattccattctcaaaaccgaacggaaactggacaccctgatcgtcgttcgtaatgatcagaaagaaataaaagtagttccgcaagattccacttcgcaggaggtaaaagctgccatgctgcaaacaaaaggcggactggacatactattgaaagatcagaataccatgctcgaactggccacttactttcaaagaggattgcactccggccttgacgttatcatggatcctgattttcaatcatacgatagcctgctgacactcagtttacaggaaagaggaatctcactgccgtatcggatagaatatctgcatttcagcaatacgcctgactccagtttacttttcaccgatacattaggaatgggcggtacggcgaactacatccccggaccggatgcccatacgtacgactacactttcgacatccattcccattctctctaccgccttcggatggattcagttgcaggagtgatcgtccatcagatggcaggaatacttattacttcattcgtcattctgttgattttgggattctctttctggttcctgatccgcacattgctgaagcaaaaaacactggaagagatgaaaagtgacttcaccaacaatatcacccatgaactaaagactcccattgccgtggcatatgcagccaacgatgctttactcaacttcggacaagctgacgaaaaagccaaacgggacaaatatttaagtatcagccaggaacaactgcaaaggcttagcggactggttgaacagatactgacgatgagtatggaacaacgcaaaaccttccgactccgtccggaagaaataactcttgctactttgcttgaatcattgacagaacagcataaactcaaagcacaaaatccgattgacatcgactatagagtagaaccggcaaaccttacagtatttgccgaccggacccacttcagcaatatattgagcaacctgatagacaatgcagtgaaatattcaccgggaaaggctgtcatccgcattcattgccgcgaaacagcagataacggaaaagtggaaatttccgtcagcgacgaaggaacaggcatcgcacaagagaaacaaaaacatatattcgataaattctaccgcgtaccgaccggtaacctgcacaacgtaaaaggatacggactaggactctattatgtaaaaacaatgatagaaaaacatggcggaacagtttgtgtaaaaagcgaacccggacacggtagcacattcaccatcacgttatgaaagagaaaatcaaagtattgttggcagaggacgaactgaccctcgccatgattatcaaagacacactcgaagaggatgacttcattctcactattgcagccaacggtgaagaaggattacgcatgttcttcgatattcgtccggacgtgctggtggccgatgtaatgatgccccgcatggatggctttgaaatggtaagacgtatccgccagaccgataaacaaacaccggtacttttcctgacagcacgttcggctattaacgatgtggtagaaggcttcgaactaggcgccaacgactacctgaagaagccattcggcatgcaggagctgatcatacgcatcaaagcattggttggcaaagcattcagtttcaatgaagaaaagaaaacaaccacccggtttgagataggcaactatttgttcgactctcttgcacaaacactgacacatgccggattgaagcaggagctttctcatcgggaatcggaaatcctgaagcgactttgcgaaaatcagaaccaagtggtcaacacacagaatgtattactcgacctatggggagacgataacttttttaactcaagaagtttacacgttttcatcacaaagctccgccataaactgtcagccgacgagcgaattcgcattgtcaatgtcagagggataggatataaactgatcttaaattaaatacacagaatgatgaagaatagaatatactgcacatttatactgtcaatcattgcagtgatggtatgtgcacaaacagaacaaccgaaagacagtatcaaagggcatcgcgaaactgtacctgaaattcgtcaggaactgcatatcaacgatagaaacatacaaacagacggtactcttccggacaacacccgacaagctgcagccggtgacagtatgactttccgtataccgtacccggaaagtattccgtccggttggatcgtccctcaattggggacctattccaaccccttcatttgggattacgaccgttattacaatttcaacctttctcccaacagtaatctcagtactttcagcaattataacacttatctcagcataggcaccatcgtaaaggcgggtgctgcctactcgttctctcccaatgatcgctggatcttttcgggaggagtgtttgttgctaaatatacattgccaagccttcgcatccccacggctccgatggccggttcacgctttgatgccggtatccacggaaaaattacctacaggcttacagaccatttatacctgaacgtgttcggccaatattcgctcaacgggcaacgaaactctaagaagggctatatggtccccgacttatatatgcagaatcatttcggaggaacagtcgactacatgttcaatggtaaattcggcattaccggcggagccatccacgaattcaatcccgtaaaaggacgttgggaaacgaaccctgttttcggccctgtaattcatctaaaaaagaaataaaggattcacggcaagcagattattttcatatctttgcgttttgaaagataacatagaacggatatgaagaagctgatattctttttgctgctgttactgagtacggcctcactttctgcccagtcggaacaaccttccgacagcatccggcatttgccttctaccgtcaagcaatacggagatttcctgatcgatatgggattgtttatagcagctcctcccaaactgccgaaatataaattcgaattacccgatgcaagcaaagactataaccggatcttcagtttgaatccggacgtcataatgacacaaggactatccaatgtgttcactccctccctttcatacggattcggttggggcggacacgatttcttctcgtctccgcaacagctccagatgggatcgtttaaactgaaaaacggcatgcgtctgaacacgtatggggaatataatgccgatggcaaaaaagtccctaaccctgccgccatgccatgggaaaagaacaacttcaaaggggctttcgagatgaaatcttccgatgggaatttcggtatccgcattgaagtccagcaggggcgcaactatccatattaaaaaaagaaagaaatgaaaaacatattgattatcggtgccaatggatttacggggcgccggatactgaatgacttatcggttaaccctatataccacgtcacaggatgctcgctgagagatgacatttgtcccggcaaagattatcgcttcgtacgtaccgatatccgggacgaaaatgaagtacggaaattatttaaagaatgccggccggatatcgtaatcaacacctctgccctttcggtaccggactattgcgaaacccatcatgcagaagctgaagctacaaatgttacagcagtcgaaacgatagcacatgtttgcgaacagtatggcagccgtttcatccatctttccacggactttgtatttgacggtaaaagtacccggctctacaaggaagaagatgaagcgattccggtaaattattacggtgttacgaaactgaaagccgaaaagattatagccagcatttgtagtaattatgccatagtacgtgtagtcgtcgtttatggaaaagcccttccgggacagcatggcaacatccttcagctagtagccaaccggttgagaaacggagaaacgatccgtgtcgtatccgatcaatggcgtacaccgacctttgttggagatatttcagtaggagtagaaaagctgatgtttcatacagccaacggcatctatcatatttgcggcagcgaatgcctcacaattgccgaaatcgcctaccgggtggctgattttctgaaactggatcgttcattgatcgaacccgtcactaccgaggaaatgaaagagactactccccgcccgcgtttcagcggattaagtatcgaaaaggctaaagccgaaatcgggtacaccccgcgcacattggaagaaggtatggaggcttctttgttctaacttcacagcagaggagagcagaaaagtaatttcccatttatcaggagcaggcaacagccatcatggtgcagtcgtttcggagctgttgtgccagattctgaacgataagggttcttgggatgcccctcagcggttaaacggctctttcggcactcccggcctgcaatctctccaacagttcttcaatgctgttcagcgttacggcttccccttcctgcggatgtaggatgaatccgttaccgtctttcagatcaccggtttcgatgtaggtgtccgactcgacagtacgattagccaaaatcccgttacgttgcagggctttacgcaccatggcatatttctgtccatgccccaccaggcgtatctgcgatgtatattcgttgtctacccggaacaagcccgtctccaaatcgaacacaatgcctttacgggcaaagaaactactcagtttgccactcagtgacagatcttccggagtaccgatagtcaccccgttcatcttgtccatcaaccagattttatcggcaatctgtaaagccagctccagatcatgtgtggaaagaaaaatcgttttattggtctggcggctcaaccggtgaagcaactgcatcatctccactttactggggaaatcgagaaatgccgtcggttcgtccagaaagatcaccggagtctcttgtgccagcgctttggcaatcatcactttctgtcgttcaccatcactcagggtatgcaccatgcggtgtgccaggttctgaatcttcaccaaagcaatggaacgttcgaccacctccttatcttctccgcgaagtgttccccaaaaaccggtatacggactgcgtcccaagcctacaagctcgtgcaccgtcatattgcgaatatcacatttctcagtgagcactacgctaatgacggttgacagttccttgtcggtatatgcatcgatctccttgcccacaatctctatcttaccccccaatttaggttgaaatgccgaaagtgtacgcaacagggtggacttccctactccattagctcccaacaggcaagtcagttcgccacagttaatgccggcattgatacgatcggccacaactttaacatcggtcttacccaggtagcctatcgaaagattctctatatgaatggttttttgcttcatgattctttattcacttaattcacttttacgcttacggaacaacactgatgccacgaccggcgcgcctaccagcgcagtcacggagttgaccggaagagctccctcaaagcccggcatgcgggcaaccagattgcataccaaagccaacgaagcacctgccagcaaagtggccggcatcaggatgcggtgatccgaggtatgaaagatggcacggcaaagatgaggaaccgccaaaccaatgaacataatcggtccgcaataagcggtcacgatggctacaagcactcccgaacatgaaatgaccaacaggcgggcacgcttgatgttcaatcccaagttacgtgcatacccatcgccaagcagcatcagattcatggttttaatcaacaggaaagagagcggaatcagcacaaccatgatacagacgaacaaggtcatctgatcaccggagacgcgggcaaagctacccaacccccaaatgacgtaagcgcggatgtcttcttccacactaaaatatttgagtacaccgataacggcactcgccacatagccaatcatcacaccgataatcaacaaagttacatttcctttcactttttgggatacatacacaataagcgccatcaccgacagggcaccgataacggctgccaacgaaagagccacctcgcccatatatcccaatttgctaagtgccacgcctccaaatgctccggacaacaataccacgaaagccactcccaggctggcaccggaactgataccaagtacagaaggtcctgccagcggattacgaaatacggtctgcatctgcaagccactgatagaaagtccggcacccgccaccaaagcggtcaaagcctgcggtacccgtgacttccagatgatattttgccagataacggattcatccgttccgccccaaagtatgttccataccgaaccgatgggaatggaaaccgagcccaacaacagattcagcagaaaaaagacaaaaacagatgcggctataagcagcataagaggtattgtcggtcgtttcatcggacagattaattgagtcgttcgtaatagacaggcgtataatcgggcaacaagtccggatgaaaagccttaatcaaatcttccagtaccacttccggctgggtaggcatactttcataaaacggcttttcacgcatgttgcaatatatcacccctttctcacggaaagcacgaaaatcggcatatctcggatcttcactcttcaatacatcataagagaaagtcccgtcgaaactattgacaatacgccaatagtcggcactttccgcctggctgtacactgtttcgaagtcgagcgtgacacctcccgaccggggatcgtctttcagaaaataatcggcacctgcatcacgaaagagctgtgccagaaaacttttaccgcccacggcataccagttgcccccgcggatctctccactgaacaccaccggacgcttctttacatgggcaaccctttctttcaattcattataatgcttttctatggctgcaaatttccggttggcagtctcttcctctccgatgaaaagtccgataaacttaatccattcggcctgtcccaacggagtcatctctttgtatcccaaatgcggcaccagcggaatgcccacttcacgcatggcatcgtatccgccgcgcttgaaaggagaaatgaagatgacatcgggattcacactcatgatcacttcattatcaaagttcccctcgatacctatcttagccgttttaccctgcttcaagcgttcgttcatttctttgttgaagagatgacgggtgctcgtgatacccactacatgatttaaagcatccagtttaataaagttggataactgcaaggaagtcatacagataacactcttcacgggagtctctatcactgtatagccggcaggaatattttcaggtttcgtccctccgggcacaagagcgtaatgaaaagattcacctccttctttctgcggatcgctgatatcgaccaagcggcatgtaggagtataggtcactttaaaacctttggcataaactggtgtgatacggacagaagatgtatcggacacctcactggttactatcgttacattctggttgtttttcggacgacaaccggctaaagagatacaggccagcagtgcgcatccgatcaggaattgtttcatcgttatttgtcttttaattcagattacagcggtcaaagatacttaataattcttgtttcatagggatattttcctcacttttgcagaacattaagatgataaaccgataacaaatgataactacacatcccatacgtttcgtatctttaggccccggagaaccggatctgattacattgaaaggactcaaagcactgcaaggagccgattgcatcttctgtccggccaccatgactcaagacggcaagtcctcttcacgggcactctccatcctgaacactctcggattctcggacaccgtacagtgtttccggcttcctatggacaaggacaggacactggcattaagatcttatgaagctgtatatgaaagcagcaaaatactccgtgcagagggacaaaacgtcgtaattgtggccgaaggagatgcgggtctttactcttccatccactacatctacgacaagctgcaacaagacgacatccccgttgaacagattgccggtattcccgcttttattgcttccggagcgatggcgggcctgcatattgtcagtcaggaagagcggctgatcgtgataccgggtcacgtcaccgccaaagaactggacgactacctgaaacatcagacggtagtggtcataatgaagctatcgcaatgtatagacgaggtacaccaatgtataattaaccatccggaataccaataccactactttgaaaatgtagggaccgagaaggaatactactcttgctccaccgaagaacttcgggaaaaaagatatccttatttctcggtaatgattatcagattcggataaggttacacctcgttaaagtccccgaccaatcacgtactagctatacatcccggcacatacgagttgtacaactcgtacatcaccagttgcacaactcgtcgtgtaccagttgtacaactcgtctacgattacatcggatgatcgcatattcaagatagattgattacatttatatcccctaatactcaatgatcatgaaaactaccagactccaactttcccttttagccctttttctggggtgcgcttctctacaggcacaatacaaatgggcagacccactcaaacaagactttcatacagtacgcggacaagcatggcaggacgaactgaaagattcttatgcccgcctcccgcaaagggcagaagataaagtacgcaagcctttatgggatttgtcgcggcaaagcgcagggctgtctgtcgccttccgttccaacgcatccgaaataaaggttcgctacgtagtaaaaggcggactctctatgccccatatgccggctacgggagtttcgggcatcgatctgtatgctacagacaataacgggcaagaacgctggtgtgccggaaattattccatgggagacaccattgtctacaatttcaggggactttcatacgcagctaaatccggcaacggatttgaataccaactattcctgccgctatacaacagtgtatcatggatggagataggtgttcctgccgacgcttctttccgttttcttccggtttcacaagaaaagcctctggtcatatacggcacttccattgcgcaaggagcctgtgcttcgcgtcctggcatggcatggggcaatatactgaaccggaagttgggacatccggtcatcaatctggggttctccggcaacggaaaactggaagaagcactctttgatcttctgtcagagatcgatgcacggctatatatcattgactgcatgcccaatctggcaggaaaagaagcatcggccgtagtgtaccaacgcactttggagggagtgaaaaaacttcgtgaaaagagccgggcccccatcctgttggtagaacacgacggatatagcaatgaattcagttccgaaagcgcggaggaatcctatcgtgtggccaatgcagaactacgcaaggcatacgagacgctgcaaaaagagcaggttcctactgtctattatctgaccaaggaagaaatcggtatgccgatggatgccatggtagacggtgttcattccaccgacttgggtatgcagcaatatgcggacagttaccggaagaagataggtgagatcttacacgaagagagtgaagggcctacttcatgtatcccctgcaagcagcaaagagatccatacgattggtacggacgccacgaagagatcttgaaactaaataagcaaagtgctcccgaagtggtgatgatcggcaactcgatcacgcatttctggggaggcgaacctattgcacacaatcagtttggaacagaatcctgggataaacttttcaaaggaaagcgggtccgtaacctcggatttggctgggacaaaacagaaaatgtactgtggcgtatctaccacggtgagctggacggttttcaggcacagaacattttcctgctgataggcaccaacaatctcttgttcaataccgacgatgaagtcatagagggaatctgccgggtcgtaaaagcgattcgcgagcgtcagccccgtgcaaaactctgcgtgatgggcatcctgccgagaaaagagatggaaacccgcattgcccaaatagatgcggcattgcaaaagcgactgaacggcaaagattgtactttcattaatcttgctccgcaactgacgcataaagacggaacaatagaccattcactgttccgtgacgggcttcacccgaatgccgaaggatataaacgcatcgcaaaagtgctgaaaggctacttataaacaaaggactcaatccttaataattatgcctcctcccccttaaagtgccactgcatttttccagagtctgacaatggtatatattcgttttcatcatgaaccgtatgttgctcatactgatccggacaaacggatagaaacgggtaaatatcattgccggctgctgcagccgctctgtaacggctgtaatcataagatactcaaatgaaatatctgagatatacctgtcacggaaatctgtatgccgatgcagaatgtaaaaaaggcaacgagcttgttaatgatctgattccctaccggcccgagtttctgaataattctttgcccttgggaaagaaagatataaagtatggctgccatacaaactataacaagtgcgatcacaaaataattgattccggtttgcaacaatttacctttgacgctggcagaagccatcagagtaaatataacggatatactgcccggaccgatgctgatgggaaacgtgatgggataaaatatcttctgttctatattcttccatttgaggctatccatgttccggctcgattcttcctgatccggggagttagaatcgccgagcaactccatggccgttttacagataagtatcccaccgcccaactgaatgacagggatggccagtccgaacattaacaaaaacaggtggcctatgaccaaagtacccacaccgattattataaagttaagaatcagtttccggatggcggttttccgctgcttgggatccaggtcggtaaaaaagccattcaccacaaaaccgtttcccaaaggattcaccacgggaaacaaagccataaaagaggaagagaatataattagcagattactcagtgacatagttcttgcattttttaaaatactccattaagaatacaatacctatgtaaaaacacagatggactcttattgatgctgcaattgcaagaaacattttcttattgtgatattttaacggactaacactaatgggaaacatacatacgtgtgtatccgcacttccccggaaaagtaaatcgtatattatgcgaagacaactctcacttccgtccccttcccttcttcggaacgaatgctgaccttacccctgtagacagaaaagattttcatggaaagacttaacccgatcccttgaccggcgtattctctcgtattacttccccggtagaatgactggaagataagttccatttcatccgccgggatgccgattccggaatctttgacagctatcccccatcgctcatcttccttgtaaagcctgataagcacctcgccttgcgaatacttgcaggcattgtctatcacgttttgcaaggctattttaaacaagtaagggctggcactgaccacagcgtaccttgcggcatcttccggatattgcagccggatgcgcgggttagcagctccagcctcttccaacaggtctgccagacgaatctcttctacgttattcttccggatgtcctcttcctgtctcgacagaaacagcagatgcctgatcagattggacaggcgtttactttccccggctatccgccggagtgcttcgatgtactcatcggtactccgttctttcaggagacttatttcacattcaccctgaatggcggtaataggattattcagttcgtgagaagcatggctgacaaatgatttttctgctctaaatgccgtatcgatacggtcgagcatactgtttaaggtttctatcagatggtccagttcatctttattgccggtggtcttcaatctgcggttcagactgttgccgcggatctgtttcaactgtaacaggacgtgctgcaagggaatcaatattctcgtagaatagagttgtccgatgaaaaagatcaataccgagctgcataataccagaaaggcggataagagcagcaagtgttcttgtatcttgaccccataactgttatgcgacatgataattacgataaaattgccttcattatcgggatagtatagtgcggctcccagcatatcctgatatacgaaagagaccgatgacatctcttttgactcgagaagctgcttctgctggccggcggaaagatatttattcagcgtatcacgcaccacggcatcactatccatatccaacaaaatctctttggcctccggcagcagctcatcatacttccgttgaatggtctgatagctttgctcatccacttcatctcgctcccagtgtttctgagcggtcagaaaagctttttcccgaaggtatgacctgtacaacccatcgatataccttgaactgaacaggtagaacactccgataactgccatggtggtcagtaccgttaccaacgtataaaagagtgcgattttacgtcctattttcatagcctggcttgttaaagttaagcatacatgatatatcccgaacctaccaccgtatgaatcaatttcttgtcatgctccttatctattttaccacgaagatagttcacataaacatctaccacattggtattcgtatcgaaattcttatcccatacatctttcaataatgtcaggcgcgaaagcaccatgccttgatgggtcatgaaatactccagcaagcggtactccttaacagtgagttctatctccacctccttgcgtctggcacggcgggtgttgcagttaagcaccagatcatcacataccagctgctggacagagtcttcccgccctctgcgcaggatggccttgatgcgcgcctccagttcctgaaagctgaatggtttcaccaaatagtcatccgcccccgaatcgagccctttcacgatatcctccgtggtgcccaatgcagtcaacattataaccggggtgagataaccgtattgctgccgataaagccggcatagctccagaccgttcatcttaggcatgataatatccaggatcaacaggtcgaatgcttcttgccggatgagttcccatccggcatcaccgtcattagccaccgacacagaatgtccaaactccttcaaaccccgttctataaacgaagctatattcacttcatcttctaccaataatatcttagccatccttctttagtttttaaagtggcaaatatactgtttacactcgtctttgccgcaatttaccctctttatcatacaacgttttaccataaataacttctacaatcaacggaaaaatgaatagagtaaagaaagtatcgcacaatacgcccccgataatgacaatggcaagcgggcgttgcgactcagaaccgatgccatgactcaaggcggccggcattaatccgatggcagccatagcagccgtcatcacgaccggacgaacacgcgaacggacggtattctttacagcttccgataaaggtatgtgtgaacgtacgttcgatttaatgcccgagatcataatcactccattctggatgcagataccgaacagggcaatgaaaccgatccccgcagaaatcgaaaagttgaaatgggtaatcaacaaagcaataattcccccggcagctgcaaacggcacattcagtagcaccaggcctgcatctctcgcattcgaaaaaaggatgaagagaatgacgaaaataatggcaatgctgacaggaaccacctgggcaagccgcttactggcacgttgctgattttcaaaatctccggtccatttcagcgtatatccgtccggcagatgtaccgaagccgccactttcttttgtgcttcggcgacagcagaccccatagcacgtccgcgtacggagaacttaacggcacaaaaacgggcatgactgtcacggaatataagtagaggtcccgtaatagtccggatatccgccagctctttgatcggtatcatcgtaccatccatcgcgggcaccagaatcttacctatttgctcttcgttccggcgaaactcttcattgtaacgcaccatgatattgaatttacgctcgtcttcataaagcagggaagccgatttacctcctatagccatctcgataatagactgcacgttctctttagacacaccgtaacgcgccagttgcttttcattcaactcgatgcgaagttccggctggccaatgttgcggatcactcccaaatcctcgataccttgtacggttcccaatactttgtcgatctgcacagccagtttctccgcttcatataagtctttgccgaaaactttaacggcaatagatccttttacacccgaagccgcttcctctacattgtcagtgatcggctgcgagaaattaaaatcggtgccgggataaagagcaagggcagattgcattttctcaatcagttgtcctttgctaagtccgctttcccactccttctccgggaaaatatcgacatgaaactccacattataaaaaccggtggcatcggttccgtcattcggacgcccggtttgcgaaagcacctgtcttacctcgggaaatgccagtaattctctgcgcattctattggcaagggatactgactcatccaaagaaatgctctgcggaagggtagcgcgaatataaatagccccttcattcaactgcggcaaaaattccattcccagaaacgaatagagaaacagaccgactcctcctgccaaagaagccaatccgatagacaatttacgatgggcatgaaagatcgcaaacaaagccgcactcttttctctgataaagtgcaccagaaaattacttctctcacgcacattcttcttcaaaagaatagacgacatgaccggaaccagtgtcaatgtgaaaatcaatgctcccagtaaagcaaatcccagagtataggccaaaggagaaaacatttttccttctactttttgaaacgaaaagatgggaatcagcgctgtaatgataatcagcttagaaaaaaagacagctttggccttttctttggctgtacttcggatcaggcccatttttgacatcctgttgaatacgggcattcccacctctttcgcttttcggtcgagggcaacgaatattccctccaccatcactaccgctccgtctataatgatcccaaaatcaatagctcccattgaaagcaggttggcagacatccccattatgtgcaagcagataaaagcaaataacagggctaacggtataatgaccgcaactactgccgtcgtccgccagtctgccataaaaataaatacaatgaaagttaccagcaatatgccctctaccaaattgtgtgtcaccgtatgaactgcaagatccaccagatcttcccggtcatagaaaggtacgatctccacatccgacggcaggatattctcattcagttcgtctattttcgctttcaacccggatatgacttctcccggattctctcctttgcgcatcaccacaatgccttccactacatcatcttcatccatacgccccacctggcccaaacggggtaaacatgattcgcgtacatcggccagatttttcaccagtatgggagtcccattaatgttttttactacaatgttccgcagttcttccaagtcattaatcaatccgatacctctcacaacataggcctgcgaacttttggtaatcacatctcccccgacattgatattgcttttcgctatagcatcataaagttcaagcgaagtgatgccataattgattaactgattcggattgacactgacttcaaaagttttcacttccccgccgaaactgacaatatccgccactcccgatacggcacgcaagttacggtcgatcacccaatcctgaatcgttttcagttcgcgtacactccgtttgtcacttcgcaaagtataacggtaaatctcacccgtaggtccgtaaagaggttgtacttccggagtcaccccatccggaagatctgcgtcattcaataaattgtatacctgctgacgggcaacaaaatcatccacatgatcttcaaacaacacattgatgaccgacagtccgaatagggttgtcgaacggatatccgtcttcttctgtaccgagttcatggctatctccaccggaatcgtaatgaacttctccacctcttccgcactgcgtcccgcccattgggtaatgatggtcactttcgtattcgtcacatcgggaaatgcatctatcggtgtatgcttgaacgaaaccacaccggcaatgacggcaatcgtcgtacaaaaaaagatgaagaacttatttttcaacgaaaatgccacaatattgtctataaacttatgcatagtattcttccgtttttagtctgcatttaaactattgtagaccaataatacattctgattcagcactctgtcaccctcggaaagcccggaacggacatagcattcctgattttgccgtttgtatacatcgacttctttcactttcaggcggttgtcgggggtgacggttacgacgtaattcttacctccttcaaatatcaaggcatgtgcatcgatccgaggcatctgtttcccggaagatttacactcaacattgaccgtggtgaacatacccggcttcagcagatagtcttcgttacacagctttacccgtacgttcattgtcttactttcagtattcaacatgtggtatactttatctatatttccggagaacaccttacccggatatgccagcgtagtgatatgtaccgatgctccttctgctactttactgatgtcgctttcataaacatctgccatcacccatacatgctccagaccggagacagtaaatatctcctcaccctgatcgggacgaagctgcatatttctgctcacactcttttccacaataaaaccgctaacgggagatttgacttcatagaatgaccggccgctaaagttatttatggaaaaaatttctttgatgcgattctcttccgcttcagcattgatcaattcctgacgtgcctgcaatacatctttatcggatgccaacccggaatcgaacatatcccgggtagcatttacatttctgcgggcaataatcacctgctgctccacctctttcatctgtctttcgtaatcggccacttcaccgctacgcaatatggcaagtatgtctccttttctcacataatccccaacttcagcgcgaagctccgtcactgttccgccaaacatcggatagacgtgtgccacctgttcctgattaaaagtaacacgtccgttcaaagtcaattcatctgccacatcatgcagatgcaccgtatcgacggaaactattttcagtaaactgtctgtcagacacagatcttgattttctccggggtgcttcacttctgatgagcaaccactccccatacccaaaatcaataggcatggaaggtattttgtccaattcataaattatatggatttagtagttaaaaataggttgtccggccaccgcattcaggttctctataccgagcagtacgtttttcttgatttcgtaaagccggatgcaagtctctttgtagctatcataaaagtcgatgaattctaaaagactgatgttacgtttgataaagttctcgttggctccggctatcagtttctcaaaattctgttccagtcccatatcagtcgactgatacaactgacatgctttctctaaagcagtataagctgcgtatagttcggcctcggctttatttcgggaatactcttgctcccgatccgccttcagaagattgaaacgggccattttaatattcccctggttacggttaaagataggtaccgacatactgaatccgattgcaaagtagttattaataaaattaccttggcgatcataactaccttttactgcgaattccggaaaagccaacgccttctgcaatttcagatcggcttgcgaagcagtgacacagctgcgtgccaacttctggtcaggtctcccgtgtaccctctcttgtaaatcggcataagacaaccggtccatgtttaattgtcgaagatctccttcatctattacaggctctgtccgaaagtcggcaggcagattcagtaacagattcaattctcctctccgggacaaatagttgctttcgcattcgttcttgtctttcttcagagaaagcagcatagactcgagtctcgccatctccattaaagagatatttccctttgcatgctgctcttttatacctgtcagcaaatgctccagcgaattgatttctttatcataaacggacaatgactttgagagatagaaaacttctgtaaatgcctcgccaagttcctggcgtaaagtcctcatcacttcttcgaactgataaccggcaatttccttgtttatcttttccagccgtatctgcttattccgttgtccggcaaggcgtatcacctgctctatttcgactaccgactcgccttttttgccgaagtcaaagtactttccattcaatcggttatacacattttgttcgaatgaaattaccggattatcgaacagtccggcctgaagcaacctggcttgtgcgatgtctacattgtagcgctcggccaatagggataaattacatttcaggaaacgttgctctgcctccttcagagtcaagccgacggacggctgttgggcttcggcaaatccgaaaaagccaagaaaaaagagaataaaaaactttctaatcatagtccttgttattttggaagcaaaagtacaactcccccatgaagcaaaccgtttgaaagcaattataagatactcagataagattagaaagttattagaaagcagaaaaaacgggacaaggaagaattgctaatataataggagaaatagctatctgacaataagatctatcttcctatctttgcaacatcaaagaaataaataagtaatcactaaaaaagtaaaaatatgaaagtcattgatttaacaaaagaaagcttcgtagagaaagtggccgaattccaagaatacccgaataaatgggattttaaaggtgataaaccttgcctggtggattttcatgctccctggtgtgtatattgcaaagccctgtcacctatactcgaccaactggctgtagaatatgatgggaaaatagatatttataaagtggatgtagatcaggaaccggaactggaggctgcttttgccattcgtacaatccctaacctgttgctttgtccgatgggaggaaaaccaagtatgaaattaggaactatgaataaaacccagttaaaagcattgatagaagaagttttgttataatttaccggatcaatcatttaatgaaggggtatcgaaacccgtattcaccacagattacacggattcacacagataaatagaatagattaagcttactctgtgtgactctgtgtacccctgtggtgagttatgaaacactctcttgaaattaatatgactattttattccggcagcaagtaccaaccttatatctgcatatgagacatcatcccccaaagctgctttaataaccgtcagtcctttatcacttccatgggcctgtacgtaacggatgattttcgtgattttctctcttgccaccaactgctctattttaacttcaccagagcgtacatagtgttccagatgtcccgctatggttccggaaaccagctcgcgttccttggctatttcttcaatactcttcccctgcctgaaaagacgatatgttacctctttggtatcaggcttcggttctttcaccgatttagcctcttttaaaggtttgggctctttcgacgttttaatcccattattgacagtcaacgtcgctgttggcatttgcggacgttctatgccatgctcctctacgtatcggttcaccatttcaagcaaggcatcaccgtatttttcggcaccgcgttttccgaaatacggaatacgtatcagtgaagccgcatcattcggcaagaggtttacaatacccagaattgctttctgctgtatgatggtatatacaggcaaaccagcttttgcagcttcagaatttctccaggcaatcaattgcttatataattccggatgaagaatatcagtcggtacttctattttctcggctgtccgggatttacgctccgatcttccggaagaagacgcagcttctcctcccgaaacagataacgtaagaacagccttctgttttagaaatgcggaaacagaaaaaccttctttctcagtatagcacaaggtccccagctttacgtgcaatgctgtcttcattgcatctgccgcttcggagaatttctttttcagttctttattatccgtttctacttttgtagaagtaatcagcggagttaataaatcttccagatgttgacggaaatagtgggcaccggccataacccgttcattcaatttcgggttggcggtataatcttcagcccccatcaatagggcagaatattgcagtttaaatgtatcggcgactttcattatctgcgttttatacagatcggcagttgtcttatatcgttccaacaactttggatagagacgatataaatgctcgtcaagcaagcgaagcaaacgtaaaaaatgctgttcaatcggatgaaaatcaaactgttcgcacaacaattcatagaagtaatgttgacgcaatagagccaatttatgcttgtcgggagtcatctctccggcattacgggtaaattcatcaatcgtatcgtcactgataatggactctcgccttaaaggagaactaagcaccaatccctgaagcgacttacaacgactcagagcgacataaacctgtccatgggcaaaagaggcatttgcatcaatgattgcacgttcgaaagttaacccctggcttttatggatggttattgcccatgccagacgaatgggatattgccggaaagtaccttccacctcttcggtaatctctttcgtctgcggattcaggctgtatttactatttgtccattcttcggtttcaagcagaaagtcctgtgattctccgttccctttcacccggatgccatctttactgacagccgtaaccaaaccgatcattccattataatatcgatgttcaccggaagaatcgtttttaataaacattatctgagccccttccttaacggtaagcatttcatcagccgggtatgccgattccggaaaagtgccttccaccttcgcctggaaactgaaagctcttcctgaaagagaaagcagttgtcggtcgttatattgctgagcctgatagttatgtgtagtcagtcggatatatccttcttcctctctcggacggaatcccggaagataacgtttgttcaattcttccagaacagcgtcgtctgcctctttctctctgattttattcaataatccgacaaattccgtatcactttgccgatagactttctttaactctatcgtgatatattccgtctctttcagtgaatgactgccaaagaaaaatgctgtatcatagtaagagctcaacaggctccagtcctcttctttcaccacgggagccaattgctgcaagtcgcctatcatcaggagctgaacaccgccgaaaggtttcgagcgatcacgataccgacgcagtacagcatcaattgcatccagttgatcggcacgtaccatactgatttcatcgatcaccaacaagtccatactacggataatattgattttttcttttccgaatttatgaaaaccttgctgagcagaattaaatgtgctttccggaatgtaaggtgcgaagttcaactgaaaaaaggagtgtatagtgacacctccggcattaatggcagcaatccccgtaggtgcaaccactaccatacgctttggggtaagttcttttaaccgacggagaaaagttgtttttccggttccggcctttcctgtcagaaaaagatgcgtaccggtattttcaatgacttgccaggctaattctatttcgtggttctcttccatgcaataatactttgcgacaaagttaaagcaaaagaaagaagaaagcaatataataataagttatttcacggtagaaaccacaaaggtcacggaatgaaggttatcaacttttcattaataaccattccgtgacctttgtatactttggtgtggaaatctatgccatactgccacctacaatatcgagcaattcatttgtaatggcctgctggcgggttttattatactgctttgtcaactcctgaatcagttcgttggcattgtccgtcgctatctgcatagccaaagtacgtgcagcatgttcggatgcattagaatcgagagcagctgtaaatatcttctgactcaacacctgcggaatcaagtctgctatcaattgagctgcagaaggttctatgatatagtcattcactactccacctctctcttcgtcattttgaacggcagacaagtcaatcggtaaatatctttcgcgcaacagttcttgtacccccattgacttgaaatggtgataaatcaactccacacggtcgatatttttttccagaaaaagttccatcaacaaattggccaatgcagcggcttcatcatacgacggtttatctgccaacttctgataactgccttgaggaaagaatcctaacttcttgacagcttcctctatttttttgcccaccggatagatcaggatattatcttgtcccaactcgcgatattctcccaccgtctgcaaaaacattttcagtacattcgcattgaaagcaccgcataaagaactgttggaagaaaaagccacaatagcgacccgcttgacgggacgttccacacagaacggagactctaccggaagatcagcactcagaaagttagtcagaatcttattcaacttcctctgataaggcagcatattctcaatggctccctgcgccttgtgtaacttggcagaagccaccatcttcattgctgaagtgatttttcgggtactttgtaccgaatttattctggtttttacttcttttagtgaagccataatcttctaaatgatttataattaactatactgtttggcaaccattgccgccgtttcttcaatggccttcgttacctcgtcattgatcactccggttttcaatacatccagcacatccgcctgatgatcgagagcaagtgtattgaggaacgctgcttcaaaatcttctaccttatccaacggaacatttcgcaataatccgtggataccgcaatagagaatggcaatctgcttctctaccggcattggagagtattggggctgaaccagcaaacgggcgtttttctgccccttgtcaatggtcagtgcggtaaccggatccatatctccactaaatttggagaatgcttccaattcgcgatattgtgcctgatcgattttcaatgtaccggccactttcttcatagccttaatctgcgcattacctcccacacgggaaaccgatatgcctacattaatagccggacgattaccttgattgaataaatccgtatctaggaatatctgaccgtctgtaatagagatcacattagtcggaatataggcagaaacgtctccggcctgagtttcaataataggcaatgctgtcagcgaacctccacctttcactttacctttcaggctttcgggcaaatcgttcatctcacgggccacttcttcctgattaataatcttggctgcacgctccagcaaacgggagtgtaaatagaaaatatcacccggataggcttcacgtcccgaggggcgacggagaatcaaagacacttcacggtaagatactgcttgtttcgacaaatcatcataaacaaccagtgcatgtcggccggtatcacgaaaatactcaccgatggcagcccccgcaaacggagcaaaatattgcaatgcagccgggtctccagctgtggccgccaccacaatagtataatccatcgcaccatattggcgtaaggtgtttacgatagaagctaccgtggaacctttttgtccgatagctacataaatgcaatatacaggatcaccagcttcataattacttcgctgattgatgatcgtatcaatggctatcgatgtcttacccgtctgtcggtcaccgattatcagctcacgctgtccacggccgatagggatcattgcatcaacagccttcagacccgtttgcaaaggttgattcaccggctgacgatagatgaccccgggagctttacgctccagcggcatttcataaagttcaccacctatcagcccttttccgtccaatggttcacccaacgggtcgataacgcgtcccaacatactttctcccacacggatagaagcaattcgcttggtacgtttcaccgtaaatccctccttgattttatccgtcggtcccagcaacacggcacctacattatcttcttccaagttcatcacaatggccttgataccattgtcaaattcaagtagttcgttggcctcggcattgcgtagaccataaatacgcactacaccatcgcttacctgtagcaccgtacctatttcgtcaagctgcactttggtctcgatcccttcaagctgctgccgcagaatgtcggatacttcgcttactcttatattttcagacataatttttcactaattatacaattcttcgattcttatcaatgaattgttgtttgactttcttcaactgtgtagcgatactggcatccagtcggtaatcgttaatatcgaaaacgaagccgccttctatagaagggtcaaccactgtttccaactccatatatgcatgcaaaatatgtgcagcagtttgtcggatacgctcttctgtagctttgtctaccggaacagcagtgatcagtttccctacaccgatgtgtttcttcttccggtaaagatccagatacatcagactcataaattgcagataggtctcccttctctccttgagtaccaaccgaatgaaacgaataaattcttcactcggtttatggtccccatcggctgccgtacagatcagattaaacttttcgttaacagaaacaataggattgtcaagcacggcacaaaatcccttcacagtacggaaactgtgcgccagtgtgacaagctcatgataaagcctctcctccgctcctctctcttcagcataagccatcagagctttcgcataccgcattgaaattattccgacttccatcttcttctgttagttcttcgttaatacttcatcaagcatacggtcaatcattcccatctgctcttgtttatcatccagatttttgcgaatgaccttctcggctatatccacagaaagcagagctacctgccgacggatatcacgtatggcttcgtctttttcaatctgaatctgtcgtttcacttcatccagttccttctgagcagctatttcagcttgtttgcgggcctcgtaaataatcttttcacgttcctgcatagcctctttcatgatacgtccctgttccttgttagcggcagccacaatagcttcgccctcctctttcagtcgtgacaactgggcgtttgcttctctggctacctccaatgattcgtcaatgtaggttttacggccttccaccatcttaataatgacggggaagccgtattttgccaatactgcgaatacaattccaaaagaaaggagcatccagaatatcaggccactatcgggtagtaacaatgacataatcttctttgtttattataagaaaagtaccaatagacaaacaactaatgccaacaacgctacaccttcaaccaaggcagcggcaataatcatattcatacggatatctcccgatgcctccggttgacgcgcaataccttccatggccgagccaccgatcttaccaataccgatacctgctccgataacagctaaaccagctccgagagctgctcccaatttacttaatcctactcctgcagcagcagcttgcaataatactgatagtaacataattttcagttttaaaatggtttatattattcttttacttcttcttttttaccgccttcctgggccagtccgatgaatacagcagataacatcgtgaacacataagcctgaataaaggcaaccaacacttccagcaaattcataaagatgttgaataatacggaagccaccgtaagcgaaccattgatagccggtcccatgcttgccgatataaatatcaggcaggtaagcactaacatggccatgtgtccggacaacatgttggcaaacagacggatcatcaaggcaaacggtttggtaaatacaccgaaaaattcgataaacggcatcatgggtataggtaccttcagccaccagggaacatcaggccagaaaatatctttccaatagtgttttgttccgaatatattaacaataacgaatgtgaataaagctaataccaatgttatggcaatatttccggttacattcgctcctccgggaaagatggggatcagtcccataatattgttaatgaaaatgaagaaaaaggctgtgagcagatagggagcaaactttttatagttgggtcccacacaactcttaatcacatcatcatgaaccatcataataaacatctccataaatccgataaatcctcccggagcatatgcaccctgttcacgtttgcgataccaatgcgctacactcagaatgatcgccagcaaaatagcgctattgataaagagagacaaagttacctttgtaatggaaatatcccacggacgtacttcctctcccgtcgcattacgttctactactttcccctcatacttgctcccggcaggagctatataaaatccctcgtatttgccgccattctcttctaggcgcgaagacagaaaagcatgccaaccagaagtttcgctatacacgataatcggcaacggaatgcaaatcgaagtttttcctatattcgtgatatgccactcgtaagaatctccaatatggccgaacacaatgccttttacatctacctgattagcttcctgattgattgtgtctttacctacaataatctcctgctgcaaagtagcggtggtatcacccggtacaggctcctgtgcaaaggttgtagcaggcaacattcctcctatcaagacaagcattccggcaactatgttacgcaactgtttcatatttttttgatttctttttaagtttctgattccactcgaaaacgaagaaaaaccaactttcatatataagatagcccagatagaacgccaggaatgtcaatagaaattcaatagcggaatcgggcacagccacacaataaatgattagtaagaaaactgatacaatcattttcaatacttttgccactaaaaagagcatcaccatcttctccggtgcatgacgcctgcaggcatcaaacatataaatataaaatacaccgaatatataaaagtacaccggtatcaacggataacctccgaaataatgtccgggttccagataatgcaagaccaaggctcccaatcctccccctacaagagtaaggatgctgagataacccagaaaattgcgttttgtgatgctcatattcatagtaaaaacagattattgtgcggagatcaaggctcaggatacgcaaacggaagcttcaccattgcttagctccacaaaaccgctgtgaatatccagcgtatgctcttcgccatccgttgtcgtgtaactgactgtcccttcttgcagggaagaaacaatcggtgcatgctgcggcagaatagaaaagactccactggtgcccggaagggtaacactcttcacttcaccattaaagacctctttttccggcgatacaatattcaaatgcagttctttcatgattccttattttatttgttagcctgttcaagcagtttcttacctttttcgatagcttcttcaatggttcccacattcagaaacgccggttcaggcagataatcgacttcaccatccaaaatcattttgaatccttttattgtatcttcaatggccaccattgctcccggtactccggtaaactgttcggccactgtaaatggttgagacaggaaacgctgtaccctgcgcgcacggtttaccaccagacggtcggcgtcggataattcctccatacctaaaatagagatgatatcctgtaattctttattgcgttgaagaatctgcttcacacgttgcgcgacatcataatgctcttgacccacaatgtgcggatcgagaatacgagaagtagactccaacggatccactgccggataaataccaagctcagtaattttacgactcaacacagtcgttgcatccaagtgggtaaaagttgttgccggagcagggtcggtcaagtcatcagccggtacgtaaacagcctgcaccgaagtgatagaacccgtttttgtcgaagtgatacgttcttgcatagcacccatttcggtagccaacgtaggttgataacctaccgcagaaggcatacgccccaacaaagccgaaacctcggaacccgcctgagtgaaacggaaaatattatcgataaaaaacaatatatctctcgctcccgactttgcccccatatcccggaaagattcagcgacagtcaatcctgacaaagcaactgaagcacgtgctccaggaggttcgttcatctgtccgaacaccaatgtagcctgtgacttttctacctcattataatccactttcgagaggtcccaatgtcctttttccatgctttctttgaatgcttctccataacggattacacccgattcaatcatctcacgaagcaaatcattaccttcacgggtacgctctcccactccggcaaatacggaaaaaccattatgcttcttggcaatgttattaatgagctccataataagtacagttttacccactccggccccgccaaacaaaccgatcttacctccttttgaataaggctcaagcaggtctatcaccttaattccggtaaacagaacttcctgtacagtggttaaatcttcaaatttgggaggatcacggtgaatagaatatgcaccgtcgcgattgagttctttcattccatcgatggagtcgccgactacgttcatcaaacgtcctttgatctgttcgcctaccggcattgtgataggacctcccgtcggaaataccttcatcccgcgctgcaagccgtcggtactatccatggcaaccgtacgtacggtattttcaccaatgtgttgttgaacttctacaatcagctttttgccgttgtgcctttttatctctaatgcgtcgtggatacttggcaatatcaagtccgattctgtaccttcaaaatacacatcgaccacagggccaattacctgagagatatgtccgataatctgtgacataagcaatctttttatatattattcttctaatactctaaaacgttatagcatggtaagtcgcgtttttaccagtttcactattaacataacgttcgatatccggttttgttcacatagatagttaaacaaacaacttcgcaaaagtagaaacttttttttcccgttgtaccatttttctgttttttctctttagataacattcattaaacttacaaaggtgtgaaaatgaacaacattagcaccctttttactactatacaaagcatattagagccaatacgctctatcctctgcccaatcagagaattgattaagttttcaagtagctgtagcgttttcagtcaattagtcaaatgttagatagtacaacatgcaacgagttttatacaaacaaagggaagttgcgtcttaaaggcatttttcgctctttacgccatgaataagatagagtattaacaattgcaaaagtggagagaacaaaggtataatcagataaaaaacaggggtgtaccaagactcgtattcaccacagattcatacagataaaagttatcaatagattaagttcatcctgtggtactttgtggtaaacaggagtttcggcacaccccactatggtttttcaaccaataatcccggtatttaatatacttctactttatcggctatccgctttgccttatcacgcaaagcatccagatccgaaccgtttggagcatagcaaagcactactcccatacgccgattcacacgtgtatacggcttaccaaatatacgcagataagtatcctcttctccggtaacttcctccatacctctatactgcggacgttcctgactggcaatcggcgacagaataacggcactcgctcctattctttcttgttttattcccggaatgggcaaccccaatacggcacgtaggtgaagttcaaattcattcagattttgtgttccggccaatgtcaccattcccgtatcatgtggacgtggagacagttccgaaaagtaaaccccgttttcatggctcaggaaaaattctactccccacagtcctgcaccggtcaatgcacgagttactttttcagccatatcttctgcttccttcaagtgtgcaggatcaatgtgtgcaggttggaaactttcccgataatccccacccttttgtacatgcccgataggcggacaaaacagagtcggaccattcttctgtgtcactgtaagcaaagttatctcactatcgaatttgataaattcctcaatgattagctcacgaatatctccacggctgccattacacccatattcccaagcatgttccaactcggcagcgctcttgaccaatgactgccctttacccgatgatgacattaaaggcttcacgacacaagggaaaccgattttctcagcggcttccttcagctcttccaatgacttggcataatagtatttcgcagttttcagtcccagttccttagcggccaaatcacggatagcctttcggttcattgtgtaattaacggcacgtgcactcggcactacctgaatcccttctttttcgaaatcgtataaacgttccgtacgaatggcttcaatctcggggacgataatgtccggccgatgcttttttacaatacgctccagttcttcaccgttcagcatatcgaatacttcgcattcatcagcaacctgcatggcaggtgccccggcatatgaatcacaagcaatgatgtgttgacctttacgttgagcagaaattacaaattccttgcccaattcgcccgatccgagtaaaagtattttcttcatgattgaatattttaagatataatgacgcaaaaatactacttttcttccaataaatcccgaacgagctactaaatgattacgataaaagagagaaaaaggcaattagatagaaaaagattaacataccacagaacaacaagctgttcttcaagaacaaagtcctcctttaaaagagaacgggaacattacttaacagcatattaatcatgattatcaagcacttacaccgatagtaaaaaagagattttacgaagttaatatcgtagttccaagaagttaacttcctgcagatacgatattaacttcgtataaatacgttgttaacatcgtacatgacaggatgttaacttcgtaaatgtcataatataatttccaatattataacaaataagacacatatagccaaagagaaatgttaatttttggtctaattacacaataaagaatatttaaaaggataaaaagaagcggatatggtgtattatccggaattaatgccttactttgcaacatcaaacaataagaggtttttattggtttaactctcacatgtatttcctcaatgttcgcattgagaactttcatctctgatttacacttcctaaagctttattgttattttattaattttttatttttgtatatttatgaatatgtacgttggaaatcttagctataatgttaaggagtcagatttgagacaagttatggaagagtatggagtagtagaatcagtaaaactgatcacagaccgcgaaacaagaagatctaaagggtttgcgtttgtcgaaatgccggaatcttcagaagcaagcaatgccattaaagaattgaacggagcagaatatgccggtcgtccgatggtagtaaaagaagctttgccaagaaattgatctgaaaagcaattaaataataaaaaggggatattcgccgtgaatatccccttttttattttcctttgattactgatgctgttcacgcaacaggtcgttcacagtctttaccggattgaaagtggaaagtggaacctccacaaataccgtactccaatcgctcatagcaccattccacaaaccgggaagttcaagagctttcagatccttaccactcttcgacttataagagatgaagccggtagctttatccacatatttcgccaaatcaaatttatgacccttataatcacgtacggcgcaaaccagatcgaccgggttgaagtgcgtacccttttcaaacatttcctttgcttccggattattcatatcgatttgtgagctttcaaggatttgcagggagatagttccatcactattatatgccaggaacggaccaccgcccggctcgcccacgttcttcaccataccacaaacacgcatcggacggttcaatttattcttcaggtaaatgaccaactcggcatcttccagatcttttgtttcaggattcttacagaaaagtttcttttgtacaaattgcaggatatccatcacctgctcatgtgtataacgaccactatccaataattccagatattgaaaagcttgcttctggagagataccagtacaccggcaatcagtttcttataaagcactgtatcgcctttcaatttatcaggaaccacattgtcaatgttcttaataaaaataacatccgcatccagatcattcagattctcaatcagcgcaccatgcccgccgggacggaacaaaagcttaccgttatcgcggaatggctggttttccatatcagcggcaattgtatcagtgcttggtttctgttcggagaaagtgatattataatctacgccataacgtttggcaaaagcatcgactttttcggtaaccaatgatttaaacagttcacggtgctcggtagagacggtaaaatgcacattgacttttccgctttttccggcagcgtacatagcaccttctgccaaatgttcctcaagcggggtacgcgaaccttcttcatacttatgaaacttaagtaaccccttgggaagcgcaccgtaattcagtcccgctacattaagcaatcctgaaacgaccgctttataattgccttctgcaatcagggtaggaatacctttgccttctgtccgcacacaagccgtattcaagtcatcataaaaagcaaatttttcaatcgattcaaaaaaagtttgttcgaactttgtagtgggttcagtatagtcagcatccaaaaattcaaatagattcttgaacatacggctggcagcacccgaagcgggtacaaacttcacaatcgttttgtctgaattggtataggcatcccatgctgcaagataagctttctgctcctcggcatcaggagccaaaatgcctttttctacagatgcggcagcatctaacttcaaataaggaaagcctttttggaagcaagccaactgctcagcgatttgtacttccgaaatgccctttttggcaagcaattctttgtcttcaggtgttatcatactatctaattttattaattcatgcccaaaaatacaaaaaaaggaagaggacaccctacaaaacccggaaaaaaactatctttaccgacgataaatttgagctgcttatggaaagagatgaattctttacgaaagaagagagagaattattgttctcactatacaaaaaactactgcgtctcaccggagaaaccttacaaaaaggagattgcagaaagctgaaaaagcatcttatcgactccactcaaaacaatacgatgcagagggacagttttgggctgaatcctgttatcaaagatatgcagactgctgtaatcgtggctgaagaaatcggcatgaaacgggcatctattttaggcattatgctacacacgcctgtacgttgccactcttatacaatagaatacattcaacaggagtatggtgaagatgtggccggaattatccggggattaatcaagatcaatgacctttatgataagagtccgaccatagaatcggagaatttccgcaatctgctactgtcttttgccgaagatatgcgggtaatcctgatcatgattgccgaccgtgtaaacgtgatgcgacaaataaaagatgccgaaaatgacgaggcccgcagacgggtggccaatgaagcggcctatctgtatgctccgctagcccacaaactgggattgtataagctgaaatcggaactggaagatttgtcactaaaatataccgaacatgacatctattaccatatcaaggaaaagctgaacgagacgaaaaagtcacgtgaccgttatattgccaacttcattgctccgatacaacagaaattggaggaagcaggactgcatttccacatgaaaggacgtaccaagtccattcattccatctatcagaaaatgaaaaaacagaaatgccagttcgaaaacgtatatgacttgtttgctatccgtatcatcctggaatctcagtttgaaaaagagaagcaggaatgttggcaggcatattccatagtgacggatatgtatcaacctaaccccaaacgtctgcgtgactggctgtcggttcccaaaagtaacggttacgagtcattacacatcactgttatggggcccgaaggcaaatgggttgaagtacagattcgtacggagcgtatggacgatattgccgagcgcggattggcagcccattggagatataaaggcgtgaagggtgaaagcggactggacgaatggctgacttcaatacgtgaagcactggaaaatacggagaacgacctggaaatgatggaccagttcaaactggatctgtatgaagacgaagtattcgtatttacaccgaagggagacctttttaaactgggcaaaggggctaccgtacttgattttgctttccacatccacagcaaattgggatgtaaatgtatcggagcaaaagtaaacggtaaaaatgtacagttaagacaaaagctgaacagcggggatcaggtagagattatgacatcgaacacacagactccgaaacaagactggctgaacattgtcactacttcaaaagcccgtactaagattcgtcaggccctcaaggagatggtagcgcgtcagcacgattttgccaaagagaccctggaacgcaagttcaagaaccggaagatggaatacgatgaagctgtgatgatgcgcttaatcaaacgcttgggattcaagaacgtgacagagttttatcagaagattgccgatgaggtactcgacgtaaacgatattctggataaatacatcgaacaacaaaagcgggacagcgaacgtgatgaggtgacctatcgcagtgcagaagaatacaacctgcaaaaccagatagacgaaacaacagtcactaaagaagatgtactcgttattgaccaaaacctgaaaggattggatttcaaactcgccaaatgttgtaatcccatatacggagacgatgtattcgggtttgtcacagtatccggaggtatcaagatacaccgaaatgactgccccaatgcaggacagatgcgcgaacgcttcggctatcggattgtaaaagcacgctgggccggtaaatcggaaggtactcaatacccaataacactccgcgttgtgggtcatgatgatatcggtattgtaacaaatatcacttcgatcatctcaaaagaaaatggtatctcgctacgttctatcggtatcgattcgaacgacggacttttctcgggtacattgaccattatggtaagtgataccggacgtctggaagcgctgatcaagaagttgcgcacagtaaaaggagtaaaacaggttagcagaaattaagaatggaaaaattcagcaccagaaaaagaatacgaagcttcggatatgcctggaaaggtatccgaagttttgtaagcaaagaacataatgcctggatacattgcacggcaattattatagtaacagtgaccggattctgtttcggcatcacccggaacgaatggatagctatcatactttgttttggagtagtactggcagcagagggattcaacacggctatagaaagattggtcaatcttgtatctccggaacgtaatccgatagcaggtgatgtgaaagatatcgcagcgggttccgttctgatatgtgctatagttgctgccattgtaggaattatcatcttcatgccttatgtacttgctgttttactgtgtaatatgggataaatgatacattaaaaaagcggactccgtatattatgctacaattcgttgcaaatatacggagtccgcttttcataattatatcacatttatcttaccttcttccttttaaaataaggatacgtaagtaaaacgaagaatgccaaagacacgattgccgataacaatccgacccgataaacggcctgttcattagccgtaagatgtaaatgacacgcagatgcaatacccaatccgactccaagttcccatgcaagtagatgagtggtattagccgtgccgcgctggcagtgttgcgacaatttgacaaacatcataagaaactccggagtgaccaagctgagtcctaaacccatcaatacagctgccggagcattccagcttgtttcaggagagaacagcatagccatcgatccgattactgtcaccagcccgacaactatctgcaaccacattttgttatcatagcggaaaaacaatttcacaattaatactgataagagaaatccgcatccgaccaaagcaaaaaaaggtactgtctcgcctcctaccggcacatcactcggcgcaccggcaagcacaggaagcatcaatcccggtataaaagcaatcaatattaaattgaatgccggaataagtccccggagaagcaggaatcggtccatggaacaaactttcatcccgataggtgcacgaaagggaacatatacccttgacacaaataatattcccaacgctcccaacgccacagcaacatatagcaaagtctcaaagccatgtgtccgaaacagatacacccccaaagccgctccgataatcatccccaagcgtgcagcccaggaaaagaccacattacctgcgctgcgaaaagtggaattggtgatatcgatggccaatgtgatgcctgccgtggcagccattccaaaggataatccctgcacaatgcaaagcatcaacagatgtgttgcgttctgcaccaacgtataaccggctgttgctgcaaccattaccccaaacgaaagcatacatatatatttccgcttgtaaacatcgaccaaataggcatggaacgggccgataaaaaacattgcaagcgtaaaaagtataaatatgactcccgtctgactgacaggcacgcctaaacgtgaagccatcattaccgggagtacagggtacaacaaatacagggacatgaacaacaataaattagcaaggcatatccgcataaaatgcaatgtccataatttagtcgccatacgacaattaatattgttctttctcgttcgggaagtcgcagttctttacatctgaaacatagtgactgatagcatcggtcattaccgtataaagatcggcataacgacgaaggaagcgcgggcggaaaccgttattcatacccaacatatcctgaattaccaatacctgtccgtctacatctccaccggcaccgataccgatcaccggaatggtcagttcgcttgcgacacgtgatgccaatgctgcaggaatcttttcaagaacaagtccgaaacatccggcctcctcaagtaaatgtgcatcacgaatcaatttctctgcttcggcatcatccttggcacgaaccgtgtatgtaccatatttattgatagattgtggcatcagtccaagatgtcccatcacggggataccggcactcagaatacgtttcacagtatctataatctcttcaccaccttccagtttcaatgcatcggcatgactctccttcattatgcggatagctgaagcaagcccttccatttcattaccctgataagagccaaaaggcatatccactactaccattgcacgctttacaccacgtacaaccgattttccatgatagatcatctgatccagggtaataggaagtgtagtcacattacctgccatcacattcgatgcggaatcgcctacaagaattacatcgataccggcaccgtcgacaatctgtgccattgtgtagtcatacgatgtaagcatagatattttttcgcctctttgcttcatttcgattaggcgatgagtcgtcacttttcttgtgtcatctgatatataaccagccatatccaatctttttaaattaaaaatcgggcgcaaaggtataacttttaattcataccatacaagtaaaagtgaataaattagcggatccacattaaaaggtcagcaaccatttttgtagttcatcagtccataactccttatatatgaaactgtcacgaaatccgaagctatgtccgccttccggataaatatgcagtccggcagagactccatgtttcaataatgctgtataatagacaatactgttgagaggagatacggcctgatcatcctcggccaaaacgatgaatgtaggaggagtatcggctgtgacgtgaagttcaagggatagtgtttctttcaaaccttcagagatagtttctcccaacatacgttcgcgtgaaggccaatgagtcagcctgtcggtcatgctgataacgggataaagcaatacttgaaagtcgggccggtctgttccggtataaagagttgcggcagtagcagcgatatagcctccgatagaagctcccataacacccagttgatggattccccactctgccgactgacggcggatcaggcgaatcgcttcacgaatatcctcacgaatcacttcaacatcaccgtgaggcatgcgataattcagtacggcatatgtgatgccctgattattaaaccacgcagcaaaatcacgtccttcatgatctgaagctatctgattgaacccaccaccgggacacataataatggctttacctcttggcttgcgagccggataaacccaaaggacagccgaagaagcatcttttcctaatgaatattcgataaaactctgttccataactttattccttatcatttaatttcctgaatcatttttttcactatacccggcccttcataaataaacgaagaatagatttgtatcagattggcccccgcatccaacatcctacgggcatcagcgggagtaatgattccgcctgcccctactatcagaaggctttttccggcatgggcacgcaaatagctgacggcttttaatgacctctcccctatcccgcgtccactgattccaccggagccgatcttctgtaattgtgcaggtgaataaccttttaagcaactccgctccatggtaggtccggtagctatcactccatctacccggtacagacgagtacagtcaatcacatcatccattccttcttctgtgatatcggcaggaagtttgagtagcaacggaacatgtatgttttgctccacacgaaaagctgccaacccctggagcacctgtttcatcagagcaacatccacagatccccaattaagtgtgaaataaccgacatgaggatgtaactccttatacagacgcaaaaagtctgccaccgcttgctctccttccgaagagggattcttatttatatttacacctaaaacatacgaaccgcttttctgttcaagacggcgtttaataacatccaatccgggattattgaagcccgtacgggaaattaaagattcacactgaggcaagcgaaaaatacgcggacggggatttccatcctgagaatcgggagttacagtacctacttcgataaatccgaaaccataatcggccaattcatcaaaaatttcggctcctttatcgaaaccggccgacagaccgatacggtttcgaaaagtaagatgattccatatcaactgtttgtcggaacaagtataaaggtgacgtatccagcatctgcaccatggcaaatgccggtaacatttgaggcaggaaaccaacaaggcatgtaccttttcgggttccatcagaaataaaacaggacgaatcgtttgcttatacatggctttctctctttttaaataccatgcaaagctaaaggattcttccctgagatgctattcaatctttcttatcagatataacgtgaagttatagtcagcagtttttcgtaagtcatccctctgaaatcgtctattacatagtctgccttgtcggcaatggcttcgcgtgaattcgtagttgccaatccgacaacaatggctccggatgatctaccggcctgcaaaccatgaaatgaatcttcgaacacatacgaatcttttgaatcggaaccgaaaattgtcattcccaacaagaaacattcaggatcaggcttagaacgcttaaaacgctctgcagtcaatatttcatcaaaaagggatttaaactcgggatgggcatgataaacattctccatttttgccgtattggaactggtaaccaaagctattttcacaccatgccgacgcagatctgctataaactcaactattccgggaacatagtcataattcatttttatttcaaagcggttcaatgcctcggttatatcccgctgtttttccgattctcctgcaaagtatttatcataaatctgtaccagtgtctggcccttaaccttggaaccaaagtttgcatcatttacatacttttggcccatttcattccagaaaacggtatactgcccttctgtatcgacaattacaccatcacaatcgaataatgccgttattttctttgttgcatccataaacattcttttacgtgtttgttaaactctgtgggcaaagttcagaataatcatcgaatcaggcaaattatttgtacctttgctgcacttaaaaatatgtaacgcttcactatatggcacaacaaaccgatccccgcatactgggtacagaacctattggcaaacttctgttacaatattccatcccggccatcatcggaatgactattacgtcactttataatatcatcgacagtatttttatcgggcacggtgtcggtcccatggctatctccggactggcgatcaccttcccgctaatgaatctggtcgtagcgttctgtgtactgatttcggcaggtggagctaccatctcatctatacgcttgggacaaaaagacatcaagggtgcgaccgatgttctgggaaatacattgatgctttgcctgacgaatgcagtgctgttcggtggattggcttatctattcctggacccgatattgtttttcttcggcgccagtaccggtacacttccctatgcccgtgattttatgcaagtgattctcttgggaactcccatcacttataccatgatagggttgaacaacgtgatgcgtgctacgggatatccgaaaaaggccatgttgacatccctggtgacagttattgccaatgtcatcatcgctcctgtcttcattttccatttcggctgggggattcggggagctgctatggctacagtcctgtcacagtttatcggaatgatatgggtagtaaaccacttccgtaacaaagagagttttgtccatttcatgccgggtttctggaaaatgaagaaacgcatcatcggcagtatcttctccataggaatgtctccttttgccatgaatgttacggcatgtatcattgtcatactcattaataatagtttgcaaaaatacggtggcgatatggctatcggtgcctatggtatcattaatcgcctgttgatgctgtatgtaatggtggtaatggggttgactatgggaatgcagcccatcgtcggatacaattatggtgcacagaagattgaccgtgtaaagcatacgctccgtctcggtatcattgtcggtgtattgataacgagtagcggtttcattatctgtgaactttttccgcacacagtttcggccatctttaccgatagcgatgaattgattgacatggcatcgtccgggctgcgcatttgcacgctgatgttcccgtttgtaggtgcacaaatcgttatatcaaatttcttccagagtataggaatggctaagatcagtatttttctgtcactttcgcgccagttagtatacctgctcccgggattacttctgcttccacccttatatggtgtaaagggggtatggatcagcatgcctgtctctgacggattggcttttgtaacagcggtagtgattttgatggtgtatatcaagaaagtaaaagagaaaacatccggacagaagctataaaccggtgaaacagagacttgataaagacaaaagaaaggcccggtttcagcgaaaccgagcctttctttcatggaattgaaacattactcagacttgatgctgttcaccggattttcattagcgatatgccaggatctccctataatgaaaacaaagataaagaccaataaacaaatagctgtcactacataccaacctgcataaacacagattgtatcttcaaattgacttatccacaacagactcatgtagtaagctccgtatgtaccgatggcaaccgagagaattgcaacccagaagatatctttagataataaaaagagaatagatctggcttcggcaccatttattttacgaatagctatctctttgctacgccgacggacttcatcatttatataaccaatcaatcccatcagagtgataaacagtatcgttataaaagccaaaaaagtggcgtcacgaaaaattattgtggggcgatagtatcgttctaaatcctgttctaaagacctaaactctatatcctcttgcggatatatctttttcatttcattattcagtctatgcaagttctctgtaaaaggttccttgagacgaacatggacattcctcaaattagtaccatattcaatttccaaaggttcattatcagccggaagcacaccacaacaaaaaggagcaagcacgccaaccaccgtacctcgattaggaactatctcgccaaccccactacccttccagcccatcttctctacatatggctgattaaccagaaactgcctttcacctgtaaaattacgcccggtcttgatatgaagtcccaacaatggaacaaagtctttgtcgaatgccgcacaacgaggagtgaaaagaacttttccaccttcatcagttacctcccgattcccaaaccaggtcatacttccacgaatagaagctaccccctccacataaggtaaagatttcaggttattacgtgcgttgtcaggttcagcaaaatcatgcttacaagatgcgacacccttcggctgatatcccatatccctatttataatgtagtgacactgaagatatgccacacacatcaatccaaagataaaagccacccctgcaaattcaataaacaacaatatccttttccatcccctattctttttaatatagggatggaagacctgagtaacgggaatcaaagaaaatacttttccgggcaatatgcctccaataacaaacagaaaggtaactaccgataatggagcccataaattatgccaggtaaaaagagatgataaggatacctctgccaattcttcgatcttttcctgaaattggaatagaaatatgatcataagcaccagggaaacaccgataatcaaagccgtttcatatataaacatagaaaatatagccttatcggatgcaccgttacacttatgaattccaattcctttagcacgctgagaaagtgaggaaacaaaaataagcacatagttcatggtggccgcaaaaagaatggcgaatcctaacaaagataatatgagaatcgtccttttcacatctgaatgttccaggtgaatagtccgcaaaggaaccacaaacatatgtaagtgcatattcatgtctgagggaatatgttttgcaattactttatcaatgtcagtattaataacatcagcactcctttctccatcctttaaacgaataaaggcattgtaattaccaccactcgtccagccaggacgtccccaaccatatttactatgactggcaaaagacaggactgcttcgtgacgttccaacgatacattatacggaagatcggcaaatactccttttaccaaagcttctacgggagtgccccaaaccatcatatgcaaagtctttccaataggattttcttcaccgaatgcttctcgtgcaaccgactgtgataaaaagagcacatcaggattggtcaaatcattcggattaccactaatgacctcaattcccatagtacggaaataaagggagtctgataaaataaaagatttattcatcttccgattacctattttgaaaatagcttcaaaagatatacttgagcaaaccgcactttccacctccttcggaaactcctcagcaactgtcgatgctatcggtattaatgtatatgatcctgcatttcctttgatcactccatccttaatccattccgtctttacaatgtaaaggttgtccacatcctgaaaacagttatcatagctcagttcgaaagctacccgagaaaataaaatgatagataccaataatcccaacgacaatgagatcaccttaatgacacaacttctacgatcgcgaattaatgtctgaatggtataatggaattgtttcattgttttgtctttttacatattaaatcatcactattcgttcttgatactgttcaccggattctcattagccacattccaggacctcccgatgacacttcccatgatcaacaacaagataattatgatcacgacaagaaaatgtcccccattgactgatacccggtcagaaaactgttccagccatttattacttacaatatacgcaaatactattccgaccagaacagcacttagtgccgtccagaaaatattcccggaaaccaaacgaagaatatccggcacttcggcaccgttcactttacgaatggcaatttctttgctacgacgttgaatttcatcatttacaaagccgaacagtcccatcaaagcaatcaacaggatagcaatagaagctataatcacgacattacggaaacggcggacctcttgatattgcttatcaatctcctgacgggcagaacggaatacaatatctactgtcggaaaagcctctttcatcaatgtgttaatcttagccaggttctcaccaaaaggttctttcaaaataatattccgtttattaagcacattcatccattccaaattactcatcagtgctacaggagcctgtggcatgtatgcactttgtacaacatagtctttcacaactccgacaatcgtaccaaagttatttttgccatcttccagattcttaccgatgggactatccgtccaaccaatttgacgaaccatctcttcattaatcaagatctctttatcttgctggatattcctgccttttataatctgaagtcccataaccggaacataatgttcatcaacaaattcgatacgtcccataaattccttcccatgtgcatctgtgtaaggttgccccatgtagccaccataaataatcgtacttgcattacaaaactcctcaactatgggcagtcctcggagaataccatccattttatcaatttctctatatggcgaccacccaactgccaaattatcaaccttatatcccatgtcacgagtcatcacctgatgatactgtaaaagaataaccatcaacaggcctaaaataaacgcaattcccgtaaactgtataaaaagcaatgatcgcttccagacaaaacgatgtgcagtaaaacgatggaaaacttgtgtcacaggaatagcggcaaacaacttgcccggaaatagtccgatgaccagaaataaaaccaaagaaaccaaaatcggtacccacagagtttgccatgtaaataaagcctttaatgaagctccggaaagatcttctatctccaacttaaaagtgaataacaggactgtcacgaacaataaagaaagcaatatcaatagtgctgattcatacagaaacatacgatagatatgcccatcagaagcaccattacacttatgtatgccaacagacttagctcgttgagccaatgatgaaacagaaatcaagacattgttcatgccggcaaccaacaagatggcaaatccgagtattgaaagaatcataactattttacgagattccggtttttgcaaatgatactgtgaaggagtcataaacgaatactcctctgattgacccttatagttgtgtatatactttttcagcatttcaggcatacgtacctccactttctctctttcatcgggatggcggaaacgaaccatacaatgataactggaatcatatccccagccaccacgttcagaaccatattgcttagatcgggtatcgaaggaataaactccgtcaaaatgaaattcggtattttccggaatatcctcaaaaactccttgcacagtcaacggataatcaatttcaatattgattgtttttccgatcggatttgcgtctgcaaacaaacgccgggcaagtgaacgggagataaaaataacatccactctgtcgagttgggaaacatctccgagtaagactttaatacctaaagtagaaaaaacgtgacttttagaggttgctaagattacatgttccatcttcttaccctcatgatagagaggactctggctaaagagatcaagcacggtcgcatcttctacttcatctgggaaattttcgcgaatggcctctgctaacttaccatagttatcgatattcggctctttttttatcccatccgaaatacccgtacgtaaagttatacacaaattctccggttccgaataataactatcataattcagctcgaatgcaacgcgagcaaacagcagaattcctaccagcaatcccagtgtcagtgaaattactttaattacattacttccacgtccccgtagtaatgtttgaatggtatagtagagttgtttcattatgtttttttattggttaagctttcacactggccactatgctaccatcgaacagatgtatcgtacgatgtgcaaacgaagcatcgtgctgagagtgcgtaaccataattatcgttgtaccttcacgattcagctctgtcaacagattcatcacttctgcaccatttttagaatcaagatttcctgtaggctcatcggcaagaatcagttttggattggtaaccacagcgcgggctatggccacacgttgttgctgcccacccgaaagctgttggggaaagtgtttggcacgatggctaatattcatccgatgaagaatattgtctaccattcggcggcgttccgaagccttgatatttaaataagtaagcggaagttccacattttcataaacattcaattcatctatcagattgaaactttggaatacgaaccccaacttccctttacgcacacgggtacgttccttttcataaagatcggctacctcctgtcctatgagtttataagaaccctccgtaggattatcgagaagtcccaggatattgagtaaagtagactttccacaaccggaaggccccataatggccacaaattcaccttcttctacattcaggcttacatgatttaacgctacggtttctacttctgaagtacgaaacactttactaatgtcattaatttctatcataatcattatttttaattactcgttcttaatactgtttaccggattttcgttagcaatgcgccaagattttccggtgacacttcctaaaatcaataataatattaataagagaagcaaaagaaaatgccctgcgttgagattgatctgatcggtaaattgttccacccatttatgtccgacgacataggctaaagcgattccaacaaagatagccggtaaagcaatccagaaaatattatgattcaaaagattaataatatttcccgactcagccccattcaccttacgaatggcaatttctttactgcgccgttgtacttcatcattcacaaatccgaataaccccatcaatacgattactacaatcgaaacggaagctacaatcacaatattgcggaaacggcgtactacctgatacagattatcgacctcctgacgagcagaacggaactgaatatcctccgtaggaaatgtttctttcatcaaagccctgattctagaaagattctctttaaatggttctttcaaaatcagattccgtttattggcttcccatctcctttccaagctattcaccaatgccacagaggcttgtggctgatacgcactttgtgctacataatctttgactaccccaaccacagtcccccattcatagttatcttccatcagtttccgtcctataggcgaatcagtccaacctacttgccgtagcaattcttcatttaccaatacttcaccatcctgatgaacgttacgcccctgcaaaatctgcaaacctaaaatcgggacgtaatgctcatctataaaatcgatacaccccataaaacgttttccgttaatatcagtaaaagattgtcttgtatgaccattatagataaatgaagcactattacaagatgcttcaataaaaggcaatccccggagaatgccatctattttatccattgaatcaaatggcccccaccctataactaaattatctattttatagcccatacttcgattcatgacttgattgtactgtaaaagaatgatcattagcaatcccaatatgaaagcaactcctgtaaattgtacaaacaacaacggatatttccaggaagcacgatacccggtaaaacgatggaaaacttgtgtcacagggatggaagagaaaagctttcccggaagcaagccaatcagtaaaaataaaaaaatggttactaatgcaggaacccatagggtacgccatgtaaacagggttgctaatgaggcaccagacaagtcttctatttccggtttaaaatagagcagaaggactataacccccaaaagagaaacgagaatcaataatgccgattcccataagaacatacgatatatatgtccggttgaagctccgctgcatttatgcactcctactgatttggcccgctgtggcaaagaagaaatagaaataagtacattattcatcccggcaatcagcaaaatagcaaatccgagaatcgatagaatactgataattttacgtgattcctttttctgcaaatgaaactgtgaaggagttataaacgaaaattcttcaaaccagtctttattatactgtatatacttcttcatcatatcaggcatacgtgccgccactttctctacatcttccggatggcgaaaacgaaccatacatgtatagctgatatcaccccgccatccaccacgttcatctctgaatctattagcacgagtcacaaatgaatagaccccatcaaaccgaaactcggcattttccggaatatcttcgaaaacacctcgaacagtcaatggataatcaatattaatcattactgtctttccaataggatcggcatctgcaaaaagactttgagcaagagaacgggatataaacagtgcatccatattatccaattcagacacatttccggaaagtactttaacgcccaaagtggaaaaaatatggcttcgggaagtagccagtattgcatctttcttttcctggccttcatggtaaagcgaactgcgactaaataagtcaatcaaagttgcatcttccacttcatcaggaaaattttcacgaattgctgctggaagttttccgtaattactacaaacaggctctttcttttcaccttgcgaaacaactgtacgtaaagttagaaaaagattttccggttcttgataatagctatcatagtttaattcaaatgctacgcgggaaaaaagtaatattccgacgaataatcccaaagtcagtgaaactatcttgatcatattgtttccctgccctcgtagcaatgtctgaatagtataataaaattgtttcatcatatctgccgttaagttaagctttcacactggcgacaatacttccatcaaaaagatgcactgtgcgatgagcgaatgaagcgtcatgctgtgagtgagtcaccataattatagttgttccttcatggttgagttccgtcagcagattcattacttcagcaccgtttttagagtcgagattgcccgtaggttcgtcggccaagatcagcttcgggttagtaaccaccgcccgcgcaatagctacacgctgttgctgaccacccgaaagctgttggggaaaatgtttggcacgatgactgatattcatccgatgaagtatattatttaccatctgacgacgttctgaagcttttatacccagataagtaagcggaagctctacattctcatacacattcagttcgtctatcagattaaaactttggaacacaaatcctaatttacccttacgaacacgggtacgttccttttcatgaagaatagctacttcctgtcccataagtttataagaaccttctgtaggattatcaagaagacccaaaatattgagaagtgtagatttaccacaaccggaaggtcccataatggctacaaattcaccttcttctacattcagactaacatgattcaacgctactgtttctacttctgaagtgcggaacactttactaatgtcactaatctgtatcataatcatttctatttaattcatttgtttattcacttttaatactctttaccggattctcgttggcaatatgccaaaccttaatcactgcactcaaaaaaatcatagccaatacaactatagctatcagtacaaaccaatatacctgtaaactgattcgttcagcgaactgtccgagccattgtatgcccacaaagtatgcaccggcagttccaaacaacaccgcaggcgaggcagtccaaataatatctttggaaagcaagttcaaaatatgagatacttccgccccattgactttacgtatagcgatttctttactacgacgttgtatttcgtcagaaatatacccaatcaaccccatcagagatatcagcaaaataacgacgaaagccaacattacggcatcacgaaaacgacgtacattctgatattgatcctcaatgctataagacagggacttaaaaacaatatcctctgtaggatacatctcttccattgatttattaagtgatcgcaaattttcctcgtatggttgtttgagccggacatgatagcaattattaatctgctgttgaccgatgaatgccacgggatcttgctcttcataatagctgtttaccgggaaattctccatgactcccactatggtgaaattttcatatttctttccgacagctccatcagtccaacgcatttgtcgtacaaactcttcgtttaccaatgcctgatcgggaccattgagattccttccttctttgatacggatacccataaacggaacatagttatataagcacgcattcaaacgtgtagtaaataaaataatcccattctcatcggtaacagccaaacctccatatcccgagatgatactcgattcactatctgaaacatcgctgaccataggaagtcggcgaagattgtctaatgcagactccgaatcggcaaaattatgatatgtaaatgcgactccttccggattatagcctatcggtttcgtagtgatccggttatattgaagcaacaccacacataagatacccagcacaaaagtgactccagtaaactgaagaaaaagtaaagtacgcttccatcccccctttctttcggtatagttccggaagacatgggtgacaggaatagaagaaaacaaatgtcccggaataatgccggcaactataaacagaatcacgataacacaaataggtacccataaagtctcccaagtgaaaagagcaccgattgaagcagaagcaagatattcaatatcctctctgaaattcaaaaccaatacacccaccagtatcagcgatatcattataatgatacccgtctcccagagaaacatcgagaaaatattcctttcactggcaccattacatttatgtacgcctattgctttggcacgtcgggcaagtgaagagatagagattagcacataattcatggcagcgataaaaagaatcaccaatcctaacagtgacataatcattaccatcttttgtatgacaggagcgctagcatgaactccacgaataggttgtaatgaatagcgtatggcaaatccctcttcaggtctgaaaggaagatgtttttcgattataggatcgatacgtgagttgactttatccagatcagaggcatttttcaatcggatgtatccttgaaaactatctccacattcccaacccatacattcccaatgatgcttttcaatagtagagaaagagattacaacttcgtgatataaagaactgttctccggaatgtcttcataaactccttttatcgtcatgggcaaagtgcgattataaagtagcgttttccctatcggactttcatcaccaaatattctacgagcaaaactccgtgaaacaaacatggtttcaggattgaccaattcacgtggatcgccgctaataatatcgatacccattgtcttgaagaaaagtgaatcagaaagaatcattttcggacactgacggacattattataaaaaagagtgttatcaccataccggatacgaacaactgtagatgattcgatctcgtcaggaaaaccttcggctatggcacccggaaccggagcaagaacgacctgatgtgcctctcctttctctccgccaacgtaataaacagcattaatcacacacaatctatcaacttctttataatgaccatcaaagctcaactcaaatgcaaccctggcaaataacaggatgccgaccaaaagccctaaagttaacgaaattattttggtcagatttacacctcttccacggagaagagttcgaaaaatgtagtacaattgtctcatatcagccctgtttgtattttagaattttaataaatataaggtgtctctttcatgcagatcacctgaaattcttaatcgcacaaagcgtgccaaaagaagtaacacgcaatataacaacggattacataattcatagtgcgagaatattgtctaattattagacacagtcgtctattaattagacagcaacattttgtttttcataaagaaaactctatctttgcatcgagttttcatgcactaaaataaaaattatgagacaaataaaaggaattaccgcaatctttctttgttgtctgctagttgccggatgtgacttgatagattatcatccatatgacgtcgacataaaaggagaaagagacattaatgcgaaaaatattcaaaagatcgaagccaaatgcctgggaaagtctactatacgctttatcgccatgggtgactcgcaacgctggtatgacgaaaccgttgactttgtaaacgctgtcaacaaaagagacgacatcgactttgtagttcatggaggcgacttcagtgacttcggacttaccgatgaatttctttggcaaagggatataatgaataaactaaaggttccttatgtaggacttatcggaaaccatgattgtttgggaaccggagaagatgcattccggcaaatattcggcgatacaaacttttcgttcatagccggaggtgtgaaatttgtatgcctcaataccaacgcaatggaatatgattattcggaaccgatccctgattttgactatattgaaagacaactcacagaacgtgccgacgaatttaataaaaccgtattctgtatgcatgcccgtcccctttgtgatcagttcaataacaatgtggccaaagtgtttcaaatgtatgttcgccaatttcccggtttgcaattttgcactgtagctcacgaacatcggatcagtgcgtcagatgtgtttgacgatggcgtgatgtattatggaagcaattgtatgaaaaatcgcagttatttagtattcacgataaaacctgatggttatgattatgaagtggttgaattttaattccattattggcatggcagtactatcgctgctgttttacacagaaaacgtcgctgcacaaaccgacaaaaacgataccaaacaaaagatagataccatccagacaacacagccggaatacagcaaatatgacaaacgtattcaccgttttcgtaaaggatggaattcacttatacctacacacaacaaaatacaatatgcgggtaacatgggaatgttctcgttcggaaccggttgggattacggaaaaagagatcagtgggaaacggatctgttcttcggcttcatacccaaacatgactcccatcgggctaagatgaccatgaccttaaaacaaaattacatgccttggagcctggagcttgggaaaggattttcaaccgaacctttggcatgtggtatctattttaatactgttttcggacacgaattctgggtacacgagcctagccgttatccggaaggatactacggattctcgtccaagatacgcacacacatctttctgggacaacggctgacatacgatatagatagagaacgccggttctttgcaaaatctgtgactctcttttatgagctgagtacctgtgacctgttattgatcagccgcgtaaccaacagttacctgcgggctcgggattatctgagtttatccttcggacttaaattccaatggctttagttgatacggaagtaaaataggtgcataaagacaaagacaccttatttaaactctttcgaaattcataagaataaggaaatgttgctaactttgttgccgacaaattattattcgtatttaatattctattgaccaaaatgggaactatcatcattgttgacgataacaaaggagtgctgacagccgtacaattactattgaaaaatcatttttcgaaaatcattaccttatcctctcctgtcagtctgtccacagtgcttagagaagaaaatccggaagttgtcttattggacatgaatttcacttccggaatcaataatggtaacgaaggtctgttttggttacatgaaatcaaacggcaatacagagaccttccggtagtactattcacagcttatgctgatattgatcttgccgtacgggggataaaagaaggagcatctgattttgtagtgaaaccatgggataatcaaaagctgttggaaactcttttaaatgccgcttcacaagcaaaagacggaaagaaaaagaatcgcaaaaaggaatcatctccggtttctgccatgtattggggtgaaagcagtgctatgcagcagctccgcacgttgattgagaaagtagcaacgaccaatgcgaatatactgataacaggtgaaaacggaacgggaaaggaaatgctcgcacgtgagattcatgctttatcaccacgctctgccgagagcatgatatccgttgatatgggtgctatcaccgaatccttgtttgagagtgaactgttcggacatgtgaaaggttcttttactgacgcccatgccgaccgtacaggtaagtttgaagcagcagaccgaagttccctgtttcttgacgaaataggaaaccttccctttcatttgcaggctaagctactgacagccattcagcagagaagcatagttcgtgtaggtagtaaccaatctatccccgtagacattcgcctaatctgcgcaactaaccgaaacttgcaggagatggtagacaaaggcttattccgtgaagatttattataccgtatcaacaccattcatgtagaaattcctccacttcgcaaacgtaaagaagatattgttccgctagctgagcgttttatagcccgcttttgcaaacagtatgacaaagcctctatcagcctgagtccggccgcttgcgagaaactgaccgcacatgcctggtatggcaatatccgcgaattggaacattccattgagaaagcagtcattattagcgatggtgaaaccatccccgctgaaatgttccaattagtgcagaaaacggagaacccggaaacagagacctctactcttgaagatatggagaaagccatgattcgcaaggctctcgacaaatgtggaggcaacctttcggctgtagccgctcaattaggcattacccgccaaacattatataataagatgaaaaagtttggtttatgaaaatccatttaaagttactcacagagcgctattggtttcgtctcggactaagcctctgtttcgccataactgcggctctgtcttatgccgacagagacttcatttggatgggattgagcctctgtttgctactattcagcatttggtggcaactttcactttaccgtattcataccaaacgagttcttttcatgattgacgccctcgagaacaatgacagcgccattcacttcccagaagagcagataatgcctgagacccgagaggtcaaccgtgcactcaaccgggtcggacgcatattatataatgtaaagtcggaaacggtacagcaagaaaagtattacgaactgataatggactgtgtaaacaccggtgtactcgttctcaatgaaaatggagcggtttatcaaaaaaataatgaagcgcttcgcctgctcggattaaatgtgtttacccatatccgccaactgaacaaagtggatatacagctgatgaagaaaatagaattctgccgtccgggagataaaatacaaactattttcaacaatgaacggggtacaatcaatttatccattcgtgtatcaggcatcactgttcgtgaagaacaattgcgcattctcgcttttaacgacatcaacagtgaattggatgaaaaagaaattgattcgtggatacgactgacacgtgtattgactcatgaaatcatgaattcggttactcccatcacctctcttagcgaaacactactatcgttggccgatacccgggatgaagaaatacgccggggcttacaaacaatcagtactacgggaaaaggcctgctctccttcgtggaatcctaccgccgttttacccgtatcccgaccccggaaccatccttattttatgtaaaagcttttattgaccgaatggtagaactggcacgccatcaaaacaaatgtgacaacataacgttccatatagatattgctcctgctgatctgattgtgtatgccgacgaaaatctgatttcgcaagtagtaattaatctattgaagaatgccatacaagctatcgatacacaggccgatggaaagattgaaatacaaggacgatgtaatgctgctgaagaaatattgattgaaataaaaaataatggccctgccattccttcagatatagcagatcatatattcattcctttttttaccaccaaagaaggaggtagtggtatcggattgagcatttcacgtcagatcatgcgcctgtcaggtggaagcatcactctgctgcaaggcaaagaaactaaatttattctgaaatttaaataagtacatagattcatagtgtaattacttgcatcattaacaatgtaatagcaaggatatccggcaaacaataagaaaagatttctgttattaataatatcatttcaatcttaaaattatgacctacctcgctaccaaccccctattccatggaatctctccagaaacgctttcccgtgattttgacggaatcgtatctcacctccgcatgttccgtaaaggagacattcttgccaggcaaggtgatgtatgcaatcggctgatgatattactgaaaggcagtgtccggggagaaatgatcgattactcgggcagattgattaaagtggaagatattattgctcctcgtgcaattgcccctcttttcttatttggtgcagacaatcgctatccggtagaagttacagcaaacgaagctaccgaagttttcgaaattccgaaagaaagcgtactgaaattatttcgacggaatgagaaattcttagagaactacatgaatctttctgccaattatgcccgaacacttgctgacaaactgttttttatgtcctttaagacgattcggcagaaacttgcttcctatctgctacggatgttgaaacaacaaggagacagtccgatacaacttgaccgctcgcaacaggaactggctgattatttcggagtatctcgtccctctctggcacgcgagctggctcatatgcaggatgacggcctgatcaaaacggacaggaaattagtgcatatcttgagaaaagaagatatgatgcaactgatacaataagtttgagcaaaatttaaagcctgtttaagtatcagacagatggaacggtaacagagtgagaatcggacctttttcgctaaagacacggaggaaaacaaaatgcttttataggcataaacagatagaataatagatacatcacactatatatcaaaccattgcgcttgctttctctaccaaaacagaaggtggaagatggaagatcgaaatgcatttttgtaggaagagtgtacaaaagctcctctttgtatcagtcactcaagcgtccggatctttgatacctgcctgtatcacccggacagaaggtccgcttatggagtaacgttcggttgccacatcctcgttatcgaaataacggactgaaatgattccggaggaaaattaaaacagtctcttagacaaactctaagatttccaatcttttttctcttgtttgtaacattggttacagaattaccccaaatcctcctcctatctttgcatccagaaaagaaacctattaatacgtaaaaattatgagtatgttctgttttcagtgtcaggaaaccgcaaaaggtacaggttgtatcttaagcggagtatgcgggaaaactcccgaagtagccaatatgcaagacttgctgctttttgtagtacgcggaatcgcagtctacaatcaggcattacgcaaagatggacgttcttctgcccgggcagataagtttatctttgacgcattgttcactaccattacaaatgccaactttgataaacactccattatcgagaaaataaagaaaggactggagctaaagaaagatctaagtaaccaagtcacaatagaacatgcgcccgacgaatgtacttggtatggtgacgaaactgagtttgaagagaaagcccaaacggtgggggtactgcgaacttctgacgaagacattcgatcattgaaggagttggttcactatggtatcaaaggaatggctgcttatgtggagcatgcctataacttaggatatgagaatccggagatatttgcattcatgcaatatgctttggctgaattgacccgcgaagatattactgtggacgaactgataaccctcacactcgctacgggtaaccatggtgtgcaggctatggcccaactcgatactgccaataccagccattacggaaatccggaaatctccgaagtaaacattggtgttcgaaacaatccgggtatccttgtcagtggacatgacttgaaagatattgaagaacttttgcaacagactgaaggtaccggtatcgacatatacacacacagtgaaatgctaccggctcattattatcctcagttgaagaaatataaacacctggtaggaaactacggtaatgcctggtggaaacagaaagaggaatttgaaagtttcaacggtcctattctcttcactactaattgcattgttccaccacgcccgaatgcgacttataaagatcgcatctatacgacaggcgcaaccggcttggaaggtgctacctacatacccgaacgaaaagacggaaagcagaaagatttctccgttattattgagcatgcacggcgttgccaaccaccagtggcaatagaaagtggtaagattgtaggtggatttgctcatgcgcaagtaatcgcactggccgataaggtggttgaagcagtaaaaagcggtgctatccgtaaattttttgttatggccggatgtgacgggcgaatgaaaagtcgcagttactacacagagtttgcagaaaagctaccggcagatacggtaatcctgacagcagggtgcgccaaataccgatataataaattacctctgggggatattaatggcattcctcgtgtactggatgcaggacagtgtaatgacagttactcattggctataattgctatgaagttgcaggaagtcttcggactaaaagacatcaatgatcttccgattgtatataacattgcgtggtacgaacaaaaagccgttattgttctgctggctctgttggcacttggagtgaaaaagattcatttagggccgacgcttcctgcattcttatctcctaacgtgaagcaggtactgatcgataattttggaattggcggtatcagtacagcagacgaagatattgcaaaatttttagcatgataatgtacaagtaagtaagaggagcgttataattcaccacagagtaacacagagtgaacttaatctatttatttgtgtaatcctgtggtgaatatgaatactgacacctcttcttacttttttcattcatctctcttctcttggcagtaccagattcaagcctactcctaccaatgcggcaagaccgattcccgacagtgagaattcgccccatgccaatacggcaccaccgatgccaatagtcagagtcagtgagacaataatgatattacgtgtccggctcaagtcaatacaattattgacaaggttagcaattcccgcgcaagcgatcgtaccgaataagagtaacatgattcctcctaatacagccgaaggaatagacttcaataaagcgctgactttaccgattacggaaaacagaatggccgtaatcgccgctattcttattacttgaggattcgtcactttagtaagcgacatggctcctgtaacttccgaataggtagttacaggaggtcctcccaataaaccggcacaaagacatgccaagccatcacctaatagtgtgcgatgcaacccgggatcttttacatagtcttttcccgtcacagtgtttaccacatacacatccccaatgtgttctatcaccggagcaatagccaccggcatcataaacaaaataggttcccacgaaaactgtggaaacacaaactgtggaaaacccaaccacgcagcgtttctgactcccgacatatcaacatcataaaagatcagcgcagcaatatatcccacaataattccacaaaaaataggtattaacttcaatagtcccttcgcccgaatagatacaatcacggcagtaaacaacgaaagcaacgccaatgtccagttttcctttgccatattcactccagtcccggcaagtgaaagccctatcaatataattaccggaccaataactaccggtggaaacaggcgctcgatcaacctgataccctgccatttaactaaagcactcataacaaagtagaccattgcaacgcctaccattcccgaaagtgtgccggcaagtccatacagttcggttgctttaataataggagcaataaatgcaaaactactacctaaaaaaatagggaccttcccttttgttaccagatgaaaaagaagtgtgccgataccggcagtaaacaaagctgtagaaggatcgagcccgaccaataaggggacaagtacagtagctccaaaagccacaaaaaggaactgtactcctactactcctttgcgtaaaggagaaagatgatttgaatccatatagaatagaataatattatttaaactgcaaaaataacatttttaaactattttacagctatttggaacataaatacatccaaagagcgtttctatttgttacataatttaagtaacttcgcacagtgaaatgtaaaataacaaattaacaacccttagtactcattgcttatgatttttaccgctgaaaacattctactcattggttctattttactatttgtcagcattgttgtcggaaaaaccggatatcgcttcggagtgccggccttattattattccttcttgtaggtatgcttttcggaagcgacggattgggattacaatttcataatgccaagatagcccaatttataggtatggttgcccttagcgtcattctgttctccggaggtatggatactaaattcaaagaaattcgtcctattctttctccgggaatcgtactttcaacagtgggagtatttctcacggcactttttaccggattattcatttggtatctttcgggaatgagttggaccaatatccactttccattgatcacttccctattacttgcatctaccatgtcgtcaacggattctgcttcagtattcgccatcctccgttcgcaaaagatgaatctgaaacataacctacgtcctatgcttgaactggagagcggaagcaacgacccaatggcctatatgcttaccatagtcctgatacaattcattcaatcagatggcatgggtacaggcaacataatcggttcattcatcatccaattcttggtaggtgctgctgccggatatatcttgggaaaactggcgatattgatactcaacaaaataaatatcgataaccaatcactttatcccattctgttattgtcttttgtattcttcacttttgccatcaccgatctgcttcgcggtaatgggtatttggctgtatacattgccggcatgatggtaggtaaccataaaataactttccgaaaggaaattgcaacattcatggatggtctgacctggctgttccaaatcattatgttccttatgttaggactgcttgtcaatcctcacgaaatgattgaagttgccgttgtagcattgcttatcggagtattcatgatcgttatcggacgaccattaagcgtattcctttgtcttttaccatttaggaagattactttaaaatcccgtctgtttgtctcgtgggtagggctacgaggagctgtacccatcattttcgcaacttatccggtagtggcaaacgtggaaggatcgaatatgattttcaatatcgtgttttttattacgattgtttcattgattgtacaaggaacaagtgtttcgtttgtggcacgcttgttacacttgtccactccactcgaaaagaccggaaatgacttcggtgtagaacttccggaagagatagatactgatctttcggatatgaccattactatggaaatgctgaatgaggcagacaccctgaaagatatgaatttgccaaaaggtactttagtaatgatcgtcaaacgtggtgatgaatttcttatccccaacggcacactaaaattacatgtaggagacaaactactgctgatctcagagaaaaataagcaggaaacggttaagaatgaatagaaaatcatgataaaaacacagagaacgtgaaatccacatatcattttcgatattggcagaacgtgtctctgtgttcattctatcttagataatcgataaatagaatgacctaccctccgttaatttaacgtaaaactttacgagagaattcggtttccgttaatagaatattaattttgcgcagtttttaactgaatgtgcagaaattacaaaatggaacaagaacaacggttcattggttatattgaacaaagcatcataaacaactgggatgcaaacgccctgacagactacaaaggaatcacccttcaatataaggatgtagcccgcaaaatagccaaatttcacattatattagaaatggccggtattcaaccgggtgataagatcgctgtctgtggccgcaatagtgcccattgggctgtaacctttttggccaccgtgacttatggtgctgtaattgttcccattttacatgaatttaaggctgacaatatccataatatcgtcaatcactctgaggcaaaactcctctttgtaggtgatcaggtatgggaaaaccttaatgaagatcggatgcctttacttgaaggtatatcttctttgacagactttactccacttgtgtcgcgcaatgacaaactgacatatgcacatgaacaccgtaatgagatatatggacagcgatatcctaaaaattttcgtccggaacatatctcctaccgtaaagatatgccggaagagctggctgttataaattacacatcaggaacaacaggttattccaaaggagtgatgttaccctatcgtagtctttggtcaaacattgcttattgtcacgagatgcttccggtaaaacctggtgatcacatcgtttcgatgcttcccatggggcacgtattcggcatggtctacgattttctttacggattttctgcgggtgcacacctctacttcttgacacgtatgccgtctcccaaaatcattgcacaatcatttgccgaaatcaaaccgagagtaattgcttgtgtaccgttgattgtagaaaagattattaaaaaagatattctccccaaactggataataaaataggtaagttgttgctgagagtacccattgttaacgataaaattaaagcagctgcccggcaggcagcaatggaaatttttggtggaaattttgatgaaattattatcggaggagctccgttcaatacagaagtggaagcttttcttaaacaaataggatttccatacaccattgcctatggtatgacagaatgtggtcccatcatttgttccagccgctgggaaactctcaaacaggcttcatgcggtaaagctaccagccgaatggaagtgaaaatagattctcctgatccggaaaatattgcaggagaaattatttgtaaaggtacaaacttaatgttgggatactacaaaaatacggaggccacttcacaaatcatcgatgtaaacggatggctccacactggagatttggctaccatggattcggaaggatatgtaacagtacgaggtcggagcaagaatatgttacttacttcaagcgggcagaatatttatccggaagaaatagaaagcaagtttaataacatgccttatgtgtccgaatcgttggttctactccagaaagataaacttgtagcactaatctacccggattttgacgatgctttcgcacacggactgttgcaaagcgatattgagaagataatggaaaccaaccgaatagaactcaatcaacaacttccggcctactgtcagattactaaaatcaaaatccacttcgaggagtttgagaaaacagcgaagaagagcattaaacgattcatgtatcaggaagcaaaaggataaaaggatcaaagaaccaattcctcgaacaaccgctccaatgtttcctctaaattgtcagaatagccaacatgaggtcttgaggtctgaatgcaggaactacgatgggctgtcaaccaacgaaaacgttccggaacttccagtttagcaatgactcctcccgtcggacagcctgcacacactttactgaaagcctccaaatatttccggaaagaatcgatatcaggttccggtgataaggcctccaacctcttcttattaatttcataacgcatccggataaaggcagcctgtttagaaaacaagataaccccaacgttgataaattcctcacgctccactttcggaactatccgaacaacggcgtattcataaatatgcttttctggcatgttgtgcttcttttacaaatatttcagaatgttcaatcctttctttcaaaaatcgataatagatatcacgaatatcttgaggagtttcatctttatcacgccactctatccagctatcaggaatcagatccactatttcacgtattttttccgaagtcagtaatttccgaaattcggcatccacttcgtccaacttaccggcaagcggcaataaggcatggtctttaacttgggtaaaagaactaagtgcatgtttatgccaattgacccatgaatgatgaaaaaatagagatgcaccatgatctatcaaccacaactctttatgccacataagcatattggtattcttcactgtacgatctacattagtcaataaagcatctaaccataccacctgtgatgccagtttttcatcaacttcagtgacaaccggatcgaatggtagagcccctgagagaaaatgtagtcccatatttaatccgcggcttccttgcaataaatcctgtatctcttcgtcaccctccgaacgtccgaaagcttcatctaaattcaaaaacactaactccggtacacgaaaacctaatactcgtgcaacctcaccgccaatcaattctgcaattaatgccttggttccatgtcccgctccccgaaacttgacaacatacttaaaactgtcatcagcttctgccaatgcaggcagtgaaccaccttcacgcagaggcataatataacgagtgacattgacagtacgcaactccatagataaagctcctttctatatgctattacaggtgataaagatacgatattgtttctatttcaccaatttcaatcaataacactttcttatgaatatatgtttatagaacctattgatagaccaaaatacaactatgcctgattttagcagaaaaatctcttaaatttgcacaaaatttagagattacatgaaaactgtcaaaacacatatcacccaattgttgcatgccatgaacatgggaattttcgaaaaagaacatcccatcgcattatcactactctccgcaatttcaggagaaagtattttcttcctcgggcctccgggagttgccaagagccttattgcaaggcgcttgaaactggctttcgaccaaagtactgcttttgaatatctgatgtctcgttttagcacccctgatgaaatattcggtccggtatctatctctaaattgaaagatgaagacaaatacgaacgcattatcgaaggttatctcccctcggcaacaatcgtttttttagatgaaatatggaaagcaggaccaagcatacaaaactcactgctaacagttatcaacgaaaaggtataccgcaatggacaatataccatacagttaccattaaaaggattaattgcagcttccaatgaattgccggctcagggagaagggttagaagccctgtgagatcgtttcttaatacgctattttatagggaatatcgaacaggaattcgctttcgatcaaatgatagcctctgtcaatgacatggaagcagaaattcccaccggactttctattacagaagaacaatatacagattggagaactcaaatcagccaaatcaagatacattatactgtttttgaattaattcattccatcaagcggcaaattgaaaaatataacatacagaaagaagaggttccacactcaacgctctatatttccgaccgtcgatggaagaaaatcgtatcgctgctcagaacttctgcttttctgaatgaaacagataccatccgcttttcagattgtactttattacttcattgcttatggaatgaaatagaacaaataccaattatcgaacaaatggtgtcatcggcacttgacgaatgtatcagccattatctttgtggcgaacggactttagaacaaaagctgagcagtattcgggaagacatgaagtcagaacacagtttgcgtgaaacaaaagatccggccctgcaaattgtagacactttctatcatcaaattgaaagatatcctgtagcaggcaatctgttgatttttgcttccgactaccaaagtttacaaaaagatactcaaaaattattttacgttcaaagagataaatatcgtcctgttaactggatattaaaagtatatgaccatgtccgcaaccggaacatatcccaatcagccatagtttcactcaagaaaggcacacgttctgtattcatcaacaatcaagagtatccactagcttgcaacgcaggatacgacatagcttaccctcaagaagcctctttaccctttgaatttcgttttcaggaagtgatcgatttatatcacaacagggagagcgaattaaagcgcatgaccgacattgaactgacctattgtaaagaacatctattcatggatgacaaacaacgtaatatggtcaaacaaatattaaacagacaaaaagaaatgttggaaatttaccaaaatgaaatcagagaaatagcttatacgcatggattggaaaataaggaatattaggctacaagaactcagggagatttatcaagagaagctgaaaaacattgcttatagagtatacgagtcacattttcaaaatggtatcgtgaaacaagaggaacttgagggagaaattatgtcttattatcaacatacacaaccttctctacaagagttttattcacactacgctacacagtgggaacatttttacgagggacatgagcttacagacagtgcatttttacgctttcttgaaaattcggcttaccctctacaaatgaaatataaccgtggtgatttaaatcttcaatattatattgaacgatttcatacactcaaaaaacgatcaaaagagtggaaacaccttcgtaatcttttttttgataaatggtatcacctgttggcaaataatgaatataattaccaaatagaacgtatcaacaatctttgtgagagattctatcgcttacagaaaaatattgcagatcaacttccccaacgaggcaatgcccgtttaatgtggctgttgagaacacaccaagaacttgccaaacaactgtttcattatgatgaaatagccaaaaatcatccggctatcagagaactgacaaagatactgggaaagcagcattatggtaaagaaaagaaattccgtatggttgcaggtatccaccgggaacaaatcatcactcatgccactaaaagtgatattaccggagtatgtgaaggtaatgatttaaacagcctcctacccatagagtattgttatctgtcagatcctgctttgcaaccacttttctttgagcgattcaacaagaagaagctgcaaatgatggattatgaatcaaaagatcaacatcgcattaaagatataaaaatacaagggaatgaaattgtagaagaacaatcaggcccatttatcatttgcgtggatacttcaggatccatgagtggagaaagagaagagttcgtgaaatcggccattcttgccattgcagaacttacagaacaacaagatcgaaaatgttatcttataaatttctccaacgacatagcttgtatcgaaatcgaacgtctgggacaaaatatacaggaactggcaaactttctttgtcaaagttttcatgggggtacagatttaactcccgcacttctacacgcaatacacattctaaaaacaaagtcctatcgaaatgccgatttagtaatgatgtcagattttgaaatgcctcctttaaacgaagaactttcagaggaaataaaaaaaataaagcaaaataagactcatttatacgccctctctgtacataaacaaagtgaaaatacctatttaaacgtctgcaataagttctggtttgtttaaagtatgttataaaacacattttccattctgaataatttgctatttaaaccaaagtacgtacatttgcaatgtgtttttcatagtattagattttaaggttaacaaaggttggagtacggcggtactccttttttatttctatccttaacaggattatatttccaccataaatttcatttgtcctcttgcttctttattacccattgataaatgcaataaaggttatttgccagatccttttcttcgtctgtctatcgataataccatatataccatctacaaaaagtccgattgatttttctaaagttttgattttatacttttagaccgtcaagagtttctttacattttatagagtccatctccacatcctctataaaatagctaaagactatatcccagcttggtaacacagaataatatattaattaaaaagccgtagggtccttttataaactctacggcttggggttgtgtgtgttcagattttcatgtgtattagttagctaatcccggattggcagcaatagcatctctcggaataggaattgtataacgaggatcgtcctgttccaatatataagttttaccttgaagtactttcaccatccgaggacgtgtagtacgacgaagatcaaaccaacgatgtccctcaaaagctaattcacgagcacgctcgttcagtatttcactaatcaaggcatttttatccatcacattcactgcattctctttcttgtcatatgcttcgggagtataacgcttccgcattaattctaaaagacgcatacgtgcatgtggcagtttatccatgtttgctgcagcttcggctgcgttaagataaagttcacctacacgaaaagtacaagaaaactctctttttcctcctttagaactttttcggttcccattttcatccggagcagcaaaataagcggccaatctcttatctccttcctgataaagagccagaaaagtagcaggtacccacacagcattgttgacagaagaacccataacctgttccaaagcagttatcgattcaaccgactcaaaatgattgggaagagccaaaggagtttcattcatatcgacaagaacagatttctttgccaatactgcttcagccgattccaaacacttcggccatgctcccatatataagctgacacgagactgtaacgcatctacagacaaaacattgaaccgatatgaaaagacagtttcccacttttccttatttattaattcacgggcatgctctatatccgataaaatagaagtataaacttcttctaccgtattacgtcccaacgttttttcaagatccgtgtccaattttaaaggtattgattttgaatttaaagcaccggacttcgtatatggctgtccatgcaggttcactaatacaaaatgcaaataagcccgaagcaaatgagcttcacccaccaactgattcacgacctccggagttccttctgtaatctccttttgactctcaattacttgattagcaataaaaagtacattatagaaattagaccaggtaaactggctggttcccggaaatggtgacacatcgttccaacgttcaatgtctccatacgaatttcggtcatattcattatcattaaccaacatttcatcagaacgaagacaagccagccctctgtcattgggcacattcagataagcacgtgccagcaaagcacgatactcctcagcggtttgaggaatcacgctccccacgggtctgatatcaagataactgtcacaagctgataacatcaacagacagctcaacaaagccaaaacatatattttcttcatcttctttttttcgacttaatgattaaaaatttaaattcaagctaaacgtaattgatttagggataggcggtgcatacggattatacatcgactccggatcaagaaaattcttataacttgaaccaaaaacaagtaaattgcgtccttcaatagccacagaagccgatcccattcctaaagatttagtcattttctcaggtagacggtaacctaaacgcaaattttgcaaccggaaataatttaatttctttacccaaatatctaaattcttgtaaatttcgctcttctgatcataccaataatactcgtcagcccgtttctcgctggtgattaatgccggcagacgcccatcggtattctccggagtccaacgatctaaaatatcactatttacgttctgccctctatcaaaattaatgaaattataggaaggcgttgtacgcacatatcctcccagattaaatgataaattggctgttaattcccaatttttataactgaatgtattgatcaggccacccgtataaggagtatcttgtgaaccaatatacgaataaaagctacgctcttctgccggagttacatccgaattaaccgtaaaacctaatccaaaaggatcctgcaagcgatacagttctttcaaagttacttttttcccttctttatcataaaacaaaggataaccttcttcatccagaccggcagtttttatcgcgaagatagcatctaccggatacccctcacgtcccggaatagtttgcgcttcaggaatagcttctctcaataccttgttattgttataagcaaaatttaaattagtataccacgagaaattttttgttgcaacgtttcgcgtagaaagagatacctcaacacctttattgaccatacttgcccagttgatattggtcgaaacaaagccggtttcaagtggaagcatttgttttccgattaggtctgtacctttacgataatagtaatctacactcagattaatcgcctgattgagtaccgaaaaatcaagtccaacatttactgattgagttttctcccaacgaagtttcttgtttggagcagaatttatatcaatcatatgttccgaaccacccggcaaaatattatctacaatatatttacccaacagaaagggagatgtatttttatcaatatttccctgaataccatacgaaacacggaatgcaaggttatccatccattttctagttccctgcataaaaggttcatttgacaatctccataatccacttacagagtacagaggcaaataacggtatttcttgtctacgccaaataagtcagaaccatcaaaacggatacttcctccgaatgtataacggttcatcaacgaataggaagctgtagagaagaaagagacataggcattttctttatacgttttctgatgaagaggaaactgtctggcacggtcttcatccggaaagacaaccggttttgtagtcaacgtctggcgatcaaaaccatatcctgcagagaaaagtgtttcataccaagttttacgcaactcggtacctaccattacttccagttcgtggatatcattgaaactgtcccggtactctcccattgctttccaggtaatctgggagttcgtattctcatacgctttatgcactcctccgtccggaataaagtatttattgctttgagaggcagaatcccaatatttactgtttttgcgaattatacgcattgaaaaactctccttatcggcaatctgttctttcgatgctttatccaattgcaaaccaagttgagttgtaaacttcagtttatcattaaaacgcaactctgcatcaaaaatagacgaaagcgcattaatcgtttcctcattcgaagtatttttacgctcttcaaaaatattaaaccctaaatccgtatcagaattgttctgaacatcgaaatcatatacataatttccgtttgcatcgaaaggttgatagtatggattagccttacgcgaatagtataccggattcaccaatccataagtatcggtcaggtaggttttattgttacggcgattaacaaataaagaaactccgaatttcaacatccggttgactttatatgaagtcttcgctacaatattcagacgatctagcccgacgcctttaacattaccattttcttgataatatccgatagaagtataataagtcacccgttcgttacctcccgaaagacttaaactatactcctgattgaatgcatcgcggaaaagaatatcgccccaatcagtttctgtattccgcaaccgacttatatccgtttgagcttcgggagtcagcgcaccccaccccccttttttataggcatcagtcaatccgtaaccggaaattattttagaaactccccccttattgtcaccgtacgcaaaattagaacgaagcaattcaagttccaaatctactttctcttgtgaattcaacatattgagtcggtttgtactcaatgtaggcatataagtaaacttcgaggagaaattaatcaccggttttcccacttttccttttttagtcgttatcacaattacaccatttgcagcacgtgctccataaatggctgtagctgccgcatcctttagcacggtaatattttcaatatctgcaggattcagtccggcaatagacgattgctgtatattagaaacatcattcaatacattcgactgaggtacatccgtaccttccaacggaataccatccaatacccacaatggatcctgagttccgttcaatgacgaagttccacgaatacgtatttttgcaggtgcacccggcgctccggaagtagaggttacggaaagaccggcaatttgcccggccagtgcctggtcaatacttttcacagcaccgatggtttcatccgaaatgttcagtttcccgacagctgctgtcaacttacggcgttccactgtctgataaccagtcactaccacagcatcaagcatctgagctgatggaaaaagcgtgatttcatattgatcttttccgggaacgagcttgagttcctgtacttcatgtcctacataactgcagaataaacgtgtcaccccctccggtactgaaatattgaattttccatctatatcggtaattactcctgttattgtcggagaattaccatctttcgacaggtcttctgcttttatatagacagaagcaccgatcaacggcatattatcttctgaagagatcaccactccttgtacttgcctactggcagcaaaagcagaagtcaaaactccggcaaaagacaataaaagaataaaaacgtgtcttttcatttgttacatcctataaaattaatactcattttgaaaactgtctgttttggtataaatacacaaagtccctcgctcagcaaataaattcgttgagtgtttgtcagagagaactttgtgttttggtgtttttatttcgaaatgcccaacgcagtatttatgcgtaaaatcaaatctttatagtgatatttggtagctacatccgatgtgcccaaacggctttgaagcaaatctttaatgcgaagcaattcaccacgttttactgaaatggcatcggaaatacggtttatctgagacccataaaaattcagttcacggcgagcccccatgcgatcagtatgtgccgaacgatgtgcatggtcatcacaactacaaatcggtgtctgaaggtcgaacaagaagtgattatcaatcaatttcttgttaactttcactccctcgctttcggcagcagcagtaatcaatgcatctacaaaacctttctgtaagttacgtgtcataacatcgggcagtccaccacgctctgttacagcaaaaatacttttatgcaaaccatccatcaattcaacagctgtgaaggcttttttcccgtttaccgattcattctcaagcatacgcatcaggcgattattcgacagtaaatcccagaaaacataagcctgtgcatttttcagcacttgtgttggggcattctctactactcccaaaggagtatttttaagcagataagtatattgagctatttcagggtcgaacaaccatttcggatagcatagcacctcatcaagcaaaaacctcaaagcagcctgctgcttctccttttccacaaacgtataagttttctcaccatcacctaccgttgtattttcaatataaatacctccaatgttcgccattacatgataaagataattattccattgattaataacggcataatacaaacgagaagcctcttcgtacgtctgtcctttctctccggtagttgtccattgaatgatttggggaacaatacatttcaaattggcaatgccatactgtgaagaacggatcggatcatcgccaagatcttcgttctgtgcacgagggtcaacggcatcccgcggatcctgtgcctcactatatttataaagccgatcagtgtgtttcgctaaaaaatcctgcaacaattctttttcttcttccggtgtttgcttgccataccaacgataaccatattctatagcaaacatatcatacggcccgatgtgaggagaaagtgcctttataccatcacccggctgtgccacatagttaaagcgggcataatccatgatagacgatgaagtcgaattcattcggtcggtaaatgttttcgaacggagagaatctgtaggaaaagcccatgaccccatcatgttatggcgcagtccgagtgaatgtcccacttcatgacaggcaacaaagcgcatggcatctcccatcagactatccggtaaagcaacaccacgagcctcaggacgcactacacctgtttgtaccgtaatccactcctgaagcattgaaagtacattatgccaccacatgatatcagcctcaaggatttctcccgaacgcggatcaagaatagaaggtcccattgcatttgctttggtagatgcggcataagtcagcacagaataattcacatcatccatatctacctccatgtcctcggtaatatctttagcgataatggcatttttaaatccggcacgttcaaaggctacttgccagtcttcaattccttgtttaatatacttcctccaacgataaggtgtcgaattttctatataaaagacaatcggttttcggggttctacctgttctccacgtaaatacgctgcccgatcttcaggcctgggctccagacgccatcgagtaataaattgttttttatttacccgttgttgtccatcactgaaattagtcagaggattagtgaaatatcccacacgcggattatccaaacgtccggtcatcggcacttcaggaagcaacaaaatagaggaactaacctctaccgtcacatagatagtagtagtaccttcggtcacacgagtagtcagttcggaggttgctaccacattattatcaaaggacttgatggatagaattcttgataaattcttgatggccgatgtgccaagattaatattggtaaatacgttatttatgcttgtctctgtaccatcatatatatcgttcactttaatcagcatgctggtagaatcattgttatatgcttctaccttaaacccggctatcagcggagaaatataattatccttcaccgattggctaatggcatcttcagatggtgaaataggtaacggacgactttgacggattaataatttattagccgatttatccaactcaaagcggatcatctgattctcataattagttccacgattcactccggcttcattcagttctgcaggtacccgttgcagtttattcaccaccagcatatcacgccccaacagggtggaaggaatctcaaagtaataatcgttcttcttttggtatacattgaacataccacgacgaacgacactatcgcttcctgttaatttctcatactcattcttaaccttaatactgtcttggggattactcttttttttctttttcaaaaaccatcccatatcaggagttgcgggaggttcaatacacatagcagcaacaggctcgcacaaaaatgaaccggtggccatagtggtcagtaggattgtttttagtctcatgttaaatctaattagcacttaaccttattctacgctatggaataagggggcgcaaaggtaacaaaatagctcatattacctaataagaatgatctatttttatcttttttctctatttcacgaatgaatctcacatttttatgcaaaattctaatcgaaaagaaagtatcggcatactctctttctgtgctgaagtgtccgttttctcgtacaaaaactgtatatttgccacgaaactaattaataaattaaccccatgaaaaactatttaggactgattttcctcttgtttgcttttacagcaaccgcacaaaacaatcgttcagccctgttgcctatgcccaatcacatagagcaagtgcaaggtaaaccttttagcttaacaggtaagaacatcacgattcaccccggacaaccggaattaaagtttgcggctactactctgcaaagtatactgaaagaccgcatgcaagtagacattcccctttccggctctcgccaatcccccatccggttaattattgatccacaattggaaggaaaagaacattatcaactcaaagttgaccagaaagggatgaccattagcggagccagtgcagcagccgttttctatggtgtaatgactgtcgatcaagttctcttgggagatgtatgctccagcaatcggaaagaaatgactcctatcagtatcgatgatgcgcctcgctttggctaccgggctttaatgctagaccctgcccggcattttttaccaatagaagatgtaaagttctacatcgatcagatggtacgctacaaatataatgtgcttcaacttcacctgacagatgatcaaggatggagaatcgaaattagaaagcatccgaaacttaccgcaggacaatctttttatactcaagaagagttggccgacctgattcgttatgcagccgaacgccatgttgaaatagtgccggaattggatattccgggacacactgtcgctgtattagccgcttatcctgaactgggatgtacacacaccgataccattgcaaagaatgtaggtgagactgtaaacttaatgctttgtgccaataatgaaaaagtgtatgaagtgtacaatgatattattgatgaagtaagtgctctctttccttcacgttatattcacctgggtggtgacgaagcagttatagaaaagaactggaccaaatgtgaacgttgccaaaagatgatgaaggaactgaaatacgaaaaggcttcccaattaatgattccttttttcagccgtatgctcagtttcgtagaggctgatggaaaataccctattctctggtgtgaattagataacattcgcatgccggccaacgattatctgttcccttaccctaaaaatgtaacacttgtgagctggagatacggattgacgccaacttgccagaaactgacccaacagcatggtaaccctctgattatggctccgggagaatttgcatatctggattatccgcagttcaaaggagatcttccggaatttaataactggggaatgccggtaactacactcgaaacatgctatcagtttgatccgggatacggaaaacccgcagcagaacaggcacacattttgggagtaatgggaacactttggggagaagcaataaaggacattaaccgagtgacatatatgacctatccccgcggtctggcactggcagaagcaggatggacccaaatggaacatcgcaattgggattctttcaaagaacgtttatatcccaatctgaataacttaatgaaaaaaggcgtttcaatacgtgtaccattcgaaatagtaaaaagaaaataatcattatccaatacaaactgtgaatgagcgaactcattgtctataaagcctccgccgggtccggaaaaaccttcaccctggctgttgaatatatcaagttactaatccggaatccgcgcgcctatcgccagattttagcagtaacctttactaataaagctactgctgaaatgaaggagcgtattcttagtcaattatatggaatacagataggcgatccggattcggatgcctatctaaaacgcataattgccgagacagggcattcagaagacgagatacgaacaacggcaggcatagctttgggttatatgcttcatgactacagtcggttccgcgtcgaaaccattgattctttttttcaatcggtcatgcgtaatctggctcgtgaacttgaattgagtcccaatctgaatatcgaactgaacaacgtagaagtattgagcgatgctgtggacagtatgattgaaaagttgggacccaattcacctgtactggtatggctgctcgattatatagatgaacgtatcgctgacgataaacgctggaatgtttcggatgagatcaaaagtttcggacggaatatttttgatgaaggatacatcgagaaaggtgatggtctccgccgacgcctccgtgacccgaatgtaatccataattatcgtaagacattaaaagagatggaaacagccgctcttgaacagatgaaagagttctctcaacagtttgaaaatgtactttccagtcaatcactgaaaccaactgatttaaagaacggaaccaaaggaataggaagctatttcaataaactaaaaaacggtatactgggagacgagatagtcaatgctactgtaatcaaatgcctcgatgacgagactaattgggctgcaaaaacatcaaaacaatatacggatattatattgttggcttcttccatcttaatgccgcttctacaaaatgccgaacaatatcgctcacgcaacaatcgaatagtgaacagctgccgactgtcgacacagcacctgaacaaagtccggcttttaaccaatattgatgaagaagtacgtcaactgaatcgtgaaaacaatcgtttcctcctttcggataccaacgctttgctccaccaattagtgaaagacggtgactcctcttttgttttcgaaaaaatcggaactaacatccgcaatgtgatgatagacgaatttcaagacaccagtcgaatgcaatgggataattttaaactcctgctacttgaaggattgtctcaaggagccgacagcttgattgtaggtgatgtcaagcaatctatttatcgttggcgaaacggcgattggggaatccttaacggattaaacaagcaacttggatatttttctatccgtacagaaacgttaaaaaccaaccgtcgaagtgaaaccaatatcatacgattcaacaatagtatattctccgcggctgtggactatctcaacgaaatgtataataagcagttgggaagtatttgtgagcctctgatcaatgcatatgccgacgtggaacaggaatccccccgaaacaaacaacaaggatacgttaaggtagagtttctcgaaccggacgaagaacacgattatacagaacaaacccttatcagcctgggaatggaagtagaacatctgttacaatccggcgtcaaactgaacgatatagctattctcgtaagaaagaataaaagtattccgcgtattgccgattacttcgataaacaactaaattataagattgtgtctgacgaagccttccgtctggatgcctcgctcgccatctgtatgatgttggatgccttgcgctatctttccgatccggagaatcggatcgtgaaagcacagttggccactaattaccaattacaaatacttcattcggagtatgatctcaattcgctgctcctccataaagccgaagaattatttccaccggcttttctggaacgaatggcagaactacggttgatgcctctgtatgaactgttagaggaacttttcagtttatttgaactgcaccgtattgaacaacaggacgcttacctgtttgctttctttgatgcagtaaccgattatctgcaaagccactcttctgatccggacagctttatacgatattggaacgagacgttatccgggaaaacaattccgagtggcgaagtggagggtatacgtatcttttcaatacataaatccaaaggactggaatttcatacggtactcctacccttctgcgactggaaactggaaaatgaaacaaacaaccaactcgtctggtgcgtacctcaagaagcccctttcaacgagttggatattgtgccggtaaattactcttccgccatggcagaatcagtataccgcacagattatttacacgaacgcctgcaactatgggtagacaatctgaatctgctttacgtagcatttacacgtgccggcaaaaatttgattatctggagtcggaaaggacaaagaaatacaatggccgaattgctaaccggagcactaccacaggccgccaacaaattagatcaggaatgggatgaagaacaggtatatgaattaggtgacctttgcccatccgaaaatgagaaaaaaatcgattcaggtaacaagctgactcgcaaaccggagaaacttccggtcaatatggaatctatgcatccggatatagaattccgacagtccaaccgatctgctgattttatcaaggggctttctgaagaagaatccgatgaccgcttcataaatcacggacaattgttgcatactttattttctgccattgagaccaaggatgacatagaaccggccattcatcacttgatattcgagggaatcattggcagcaaagaagcagaagaacgaatacgttctctgaccgtaaaggccttctccctgcctgaagtacaagagtggtactccggtgaatggagattgttcaacgagtgcgcaatcatttacaaagacaaaggtgtattacaaacccgtcgccctgatcgtgtaatgatgaaaaacgagcaagtagttgtggtagacttcaaatttggtaaagcaaacaaaaaatacaacaaacaggtaaaaggatacatgcagctcctctcccgaatgggatacaaaaacatcacaggttatctgtggtatgtagaagaagaaataatcgaaaaagtatgaaaacatttctccaattggtcgcgcaggacctttactgtaaaataggaaatgatctgtcacgcacagctatcatattccctaacaaacgtgccagtctgttctttaatgaacatttggcaaatcagtccgatcaacctctttggtcaccggcatatttaagtatcagcgaattatttcagcatttatcggtgttaaaactaggagatccgattcggttagtatgcgagctttataaaatattccgtgaagaaacaaatagtgacgaatcactggacgacttctacttctggggtgagttattaatcagtgattttgatgatgtagacaaaaatctggttcatgcagataagttatttactaatctgcaggacttaaagaatgtcatggatgattatgaatttctcgaccaagagcaagaacaggctatccagcagtttttccaaaatttttctatcgaaaagagaacactgttaaaagaaaagtttatttctctttgggataaattgggtgatatttatcgccgatatcataaaaagctggaagaattaggatttgcctacgaaggtatgctctaccgaaacgttattgaacaacttgaaccggattcattgaaatatgactgctatgtatttgtcggcttcaacgtactgaacaaggtggaaactcacttcttccaacaattgcagaatgcgggtaaggctcttttctattgggattatgacgtgttttacactcagcttccttcccggcaaaaacaacgccatgaggccggagaatttatcaaccgcaatctcaaactcttccccaatgagcttcctgccgaattgttcaatgaattgataaaacccaaaaaagttcgttttatctcttccccaaccgagaacgcacaagcccgttatctgcctcaatgggtacatgagaacctgagtaacgaagaaaaagaaaatgccgttgtgctgtgcaatgaagctttacttctccctgttttgcactctataccggaggtagtaaggaatgtcaatatcaccatgggatttccgttagcacagactccggtatatagttttatcaacgccatactcgaactgcaaaccagcggataccggacagactcgggacgatatatctatgatgccgtacagacggtattgaaacatccctatacccgccgcctctcagataaagctgagccgctgcaacgggaacttacaaagaccaaccgtttttatccttttccatccgaattaaagaaagacaaatttctggacatattgtttacgccccgcaatggtatccgtgaactctgtgtctacatcacggaactgctgaaagaagtatctgttttatatcgtcaggaacaggaaagcgatgacattttcaatcagctgtaccgtgaatctctcttcaaaagtttcacattagtcaacaggttgctcaatctgatagacaacaacgaattgcaggtacgcatagaaactctgaaacgtttattaaataaaatactgaatgcagccaacattccttttcatggtgaaccggctataggaatgcagatcatgggagtattggaaacacgtaacctcgacttccgtaacttgctccttctatcgcttaatgaaggccaattgcccaaatcgggaggtgagtcatcattcatcccttataatttacgcaaagctttcggcatgactactattgaacataagaatgctgtttatgcctattatttctatcgcctgattcagcgtgcagaaaatataaccttaatgtataacacctcatcagatgggttaaacagaggagaatggtcacgtttcatgctacagtttctgattgaatggccacatgaaatcagccgtgaatatcttgaagccggacaatcgccacaaaacagcaaggaaatccgcattacaaaaaccccggaaattattgaccgtttataccggacttatgacttctcacgcaacccggatgccctaatactttcgccttcagcattaaacacctatcttgattgtcggctgaagttttatttccgttatgtggcacgccttaaagctcccgatgaagtcagtgctgaaattgactccgccctgttcggaaccatcttccaccgttctgcccaattggtttatttagatctgacagccaacaaacgagatgtccataaagaagatcttgaacgcctattgcgcgataatatccgtcttcaaaactacgtggatatagcttttaaagaaatattttttcatgttcctatcgacgagaagcccgagtataacggaatccagctaataaactcaaaggttatcacttcgtatctccgccaactgctgcgtaatgacctgcaatatgcccctttccgaatgatgggtatggaacaggaagtagtggaggatatccggatagaagggcctgtgggaaagttatcactaagaatcggaggcaccatcgaccgtatggatagcaaagaaggtacactccgaattgtggattataagaccggaggcagccccaaagtaccggcaaatatagaacaattattcacacctgccgaaggacgccccaactacatcttccaaactttcctatacgccgccattatggcacggcaacaggcactaaaagtagctccctcgctactctatattcatcgggcagcttccgagagttactctcctgtaattgaaataggagaagctcgcaagcctaaactgccggtcgatgatttttcggtttatgaagatgaattccgtgagcgtctcctgaaattgcttgaagagatatacgatgacaaagaggaattcactcaaacagaggatacaaagaaatgtgaatattgcgattttaaagcaatgtgcaaacgataataaaaacctcctatccatatataatcccagaaacaacaccggaatccggcaatagaaaaaatggatctgtgtcgaaatgaagtaaaccccgaaagttggacaaaaaactttcggggtttacttattatgttaagacatcacagataacactgataaagttcaccctgtgatgaatgggagtacatctccatttttattagaataatctatattcggaacgattcttccatcgctatcggaatccttattttttcagtggaatcgagaaatagaaagttgaaccttcatctttaacagaagtaaaccacaactttcctccatttttcacaacaaaatcctggcacaaaagtaacccgagtcccgaaccttcttcattattagtaccgaatgtactgaaatgtgtatcggtatgcaacagttttttctggctttcttcgtcaataccgcatccgctatctttaacactaactaccgacattccatccgactcttcaacttttataagaacttcggaaccttcattactgaatttaatggcattgcttattaaattgcgtatcaccgtctttatcatatcgatatcggcatgtaccgcctgacattccggcgattcaattcgcaaacgaatattcttcaggccggcaaccattgcgaagatttctcctactccttctacaacttccaccatgtcgatatcctgatatacgactttaagcttacctatctggctttttgtccatttcagtaagttatccaacaacgaaaacacatcttcggtagtctgattggccatagtcagcagctcatacatatcttcgccgattttttctttgggcaaactaagaatcagcatattaagcaccatcttaatagatcccataggcgaacggaggtcatgggcaatcacagaataaagcttatcacgcccgataatagtctttttaagttcctccgttttggcttcaataatacgtttggccgctactaaagaaatctgatgactgacccgaataatcagttcttctttattaaaaggtttagagataaaatcgttgccgcctacctgaaatcctttgactatatcggcagtactattcaatgcggtcaaaaagatgatcggaatatgggccgcttcgggatccgccttcaacttttgagaaacttcaaaaccactcatatccggcatcatcacatccagcaatatcaggtcgggattctctttctttacttggctcaatgcctgattcccattgctagctgtcactatgttaaacttctcattggtcagcaataccttcaataaaaggacattggacataacatcgtctacaatgagaattttatattccgagggattaatttccatattcatctttatgtagctttaatcttgagttcttattttattataacttatacttcattttgaaacagtcaatcatacgatccaaaccttcatccagcaaaatagtcggttgccaacccaatttttcctgtgccagtctgatatcaggcttacgctgttggggatcgtcgtgcggcaggggcttaaaagtaatcttcgacttcgatccggtcttctggatgatcttctccgctaactgaagcatggaaaattcattcggattgccaagatttatcggtccgataaaatcatcacccgtattcatcatccggatcataccctcaaccaaatcatcaatatactggaagctacgggtttgctcacctgtcccatagatagtaatatcgtcgttcttcagtgcctggataagaaaattagaaaccactctcccgtcattcggcaacatccgaggaccgtatgtattgaaaatacgaacaattttaatgcgtacgttattctgccggtgataatccataaagagagtttcagaacaacgtttcccttcatcataacaagaacggatgccgatcggattgacatttccccaataagattcaggttgcggatgaacctccggatctccgtaaacctcactggttgaagcttgcaatattttagcattgagcctacgggctaaccccaacatattgatagctcccattacggatgttttaatggtttgaatggcatcgtactgataatgtatgggagacgccgggcaggcaaggttgtatatttcgtctacttcagcactatatggaaatgttatatcatgacgtaccacttcgaaatggtggttatccatcaaatggataatattttcttttgatccggtaaaaaaattatccagacaaataacgtcgtgcccctcgttgattagccgggtacaaagatgcgaaccaataaaacccgcacctccgctaactaagattcttttcatgtaattattttataatgacaaagggcaaatacatgctctcttctcatctatatctggacaaatgtataagatttgattaaaatatgcaagtttttcgaacatatatttttaataaaaagaaactgattctaaaaattcttttataccccggacgtactacgccagctttcaaattctgctcttttttcttttggaatgcagatttcaatttcatcttcatgaaccgtactcaccaatgtatgttcgataaacttctcaatcattgcattactcagcataacgcactttaatacaatctcatacgcctgataaatgcgatcatacgcattgaactgcgaatataaaaagcaaagatgccgtgcggaattatcgtgcgcactccagcaatctccctctttatacagaaaaatacgactatcattgtttatctctctaattaataccttttctaaatccatcgtaatcgctttaggggtttgacataaaaaacaagctttccggcttatgtcacaaaactacatcgggattaaaggatatttgtgaccggcagaatgtttctatccctccggccctttctctatatgtagattgatcgtgacagacttcctctttttgcaagtaagggcatcaaataaaaaatagttgcgaattgcgaaacaagccgggggataaaagtgttaaacagagaaacagtacaaactgaaaattatgataacaaacgaattaaatataggcttaatagaagccgcaaaagaaaagatgccgaccggaaccaacctggcaaacactctaatggacattttatatataggtaaggaggccatctatcgccgactgcggggagaagtaccgtttactttggcagaagctgccgtcatctcgagaaaattgggtatatcgctcgacaaaatgatcggtgtgagtttcagcaacaatgcggtattcgacctgaacgtcgtacaccataccaatacattcgaaacctatcacgatattctcacgaaatatgtcgatgcattcgataacatccgggaagatcccactacagaaatggcaacctcttcaaacatattgcctcaagcattatatctcaaacatgatgtactttcaaagtttcgtctgtttaaatggatgtaccagaatgaaaatatcaaatgcaagcattttgatgaactggaaattccccacaaaatatataacatccagaaagactttgtcaatatgacacagcagatgaagacgactgattatatctgggacaataccgtattcgaacatgtagtgagagacatacagttcttttcggaaatccacctggtttcggaagaagacaaagagttgataaaagacgatttattgcttctgacggatgaattggaagagttggccggaaaaggtaagtatgaaaccggtaacgatgtacgtatctatatctcaaatatcaagttcgatgccacctatagctatgtggcaaccagcaacagccatatcagtatgatacgcatatactccatcaatgccattacaacgcaggatgacggcatgttccgcagcctgaaagagtgggtacaatcactcaaaaaattctcaactcaaatatccgaaagcggagagatgcaacgtatacgtttctttaatgaacagcgtgaaataataaataccttataactttattaaaaacgaaaaacgaaacaatgtaggagaacagtgacaattatcggaaataggtggcaatgccatctgttttttttcattctccagccatccctccgacaagaattctccaatcagaaaattcctcttttttctacacatgatataccatacaaaagttcggtctacttactctatatttgcatatgtcacaagccattgtgattctcgcaatattattaatcaataacccaaacggcagttatgaaaaattatatcgttaacgaacttattgcagcaatgaaagaacggattccccgtggaataaatctggccaactacctgacagatgccctatgtatgggaaaagaggctgtataccgaagattacgaggcgaagtggctttcacctttgacgaaattgccatgatttcatgcaaactgggaatatcaattgatcagattattggaaatcaccagtcgaaccgtgtgactttcgatttaaacctgcttcactcacccaatcctctggaaagttattatgagattatagaacgctatctgcgcatattcaactacgtaaaagatgatatcagcacgaagatatataccgcttcgaacgtaattcctttcaccctctattcttcgtacgaatacttatcaaaatttcgcctgtgcagatggatttatcaaaatgggaaaatacgtaccccaaacagcttatcgggaatgcacataccggacaaagcggtccatgcccataaactgttgagtgaggccgtcaaagcgtgcagaaagacctgttttatatgggacagcaatgtcttctactcgtttgtaaaagagatgaagtattttgccggcctcaatctgatttcggaaacagacctgatacatttaaaaaacgaactggagctgttgctgcatgaactggaacagatatccgcaaaaggtgaattcagtaacggaaacaaagtagccatttacttatccaatatcgattttgaagcaacctacagctatatagaaaagaaagatttccaaatcagtctcctccgggtatattctattaactcaatggactctcaaagcccacgaatttgcggcatacaaaaagactggatacaatcattgaaaagacactccacactgatttcagaaagcggagagtcccaaagaattactttcctggaacagcagaagagtttcatcgaccccctgtaacccccgaccgaccaatacctgtataaaaatatggctacaccctacagaagaaagggtgtagccatatcggcattagggtgtagccatccggaacggatagctacaccctgatacttaaactccatcgacctcttgcttccggatcaaccaaccgttgatctgtacatccacacttatataatttccgttgccatccatacctttaaagaatagaataataccgtgtttatcggcacggtccagatattcctgcaaaggtatatcagcatattgctgaagcctcagcgcattaagatatttattcaaggggatgtcaagaatcacattacccgatgacttatgcgtgataaccaatctgttttcggtatcagtcatcagacgcaacgtattcagttcggctatagctccggtctcaggatcgtcttcggtatgataagcagtatattccactttctcgtccgtttcgtctcccaaaagcccattttcatggttgtacctcccattgggcgaaataattcgaaaatcataatcatccacgtgaatactgctgtcgtcgagcatctgcatgatgatacggaatttcttcgtattcttcagcaaagagacagtggtgatatcattattatactgtggagatacctccgtctgtttgccatgccacagtaaatggagttctctgtcgaccacccctcctccaatccgggttttcagattgttgacactgacttccagatcttccaacgtagataccccgggagtcagggtaactttgtcatacgacttgtcatacaaccccgaccaagccacaaaaatatatcttctgcctgccatggctccgggtaaagtcatcaggtaatccggtgcaaaagcaccggattcttctttcaattctgtcacaaatacacctttttcatcgaatacatacaggttcatcttggttgcctgcttatgaaacaagtctatgtattccaggttgtagtcgtatacaaagcggacataagagttgcaatcttcatccatcccgtctctgacgcaggaagcacatagcagaaggcagcaacatgcaacctgtatgtatccgataaatctgttcatagttacttcagtttagtttataagaaagaatttataaaagttcctctacattctgattacggatataccaccgcataatgttgacgtcagccgagatccaggaagtgtcttcgtcatccggatctgttccgggaggattgatcaccggctgtcccggaccgataatcttattgatactaagctgatatacattattccgtaccacgccatagcgtccgtatcccatcaatacaggtaccatgttattggagaaatgacgaatcagaaccgtataatagcacactccttgatagtagaaatgaatgccaccctccgaaaaagaagccgtaggtgaattaaatgcattcgggttccaggccagtacgttctctatagcctgttccaaacctgcatcacgtaattcctgaggaatctgccccctgtcatttaccatatcccgcatggcttccactctgatagcattgcctttgaaatagtagaaactgatgccccctccgttacgagtcgcaaccgatccgaagccattcggcgtgtaagttccgctaatcactacacgggtagttacgtcatgccgctggtcggcagcgtccatcgtattttccagcgtataatcatagtcatcaaaattcttgctcaactccggagtccctgacaaatactcaaactgtccgacagggtttcctccattccaggaactgaatcttgtaaagttaggatcttcggcatagcgttcctcgcggtatccggcattgagttgttccatttcattcggaacaccacccgagttagctataaaagtcatcttacgcatccagtaggtatacatattggtcacatccagtccccatttcagattgtcaatccgatcaccgtgcggtactacctcaggcactccgctgacaacgactttagctaccgcacgttccacctcgacccttaccggattttcttcggccatccgttgattatccctcaactccacctcaggaacaaaaataaggtcctgatgattagtcatataaaagttattatcggcagcaataccataaggctgtatcagcgactcttttgtcatattggctgcacgcgataaataacttctgggatttccctgttcggtaatctccagcaattcaccgggaggattgatcaatatcaataactcataatcctgtttcaccacttcacgacctactgtaacaaaacgactcacagtcggcgtagccgatggcacatcttctcctctcactacatctcctccggtaaattcattcattccgtcagtagatacattcaggtcccaagagtaacgcacggtattattcttggtttcatacagcaccatgcgtacatgattcacgacttgctcttcagtacgtcccgaagttgtcgggtcgactgccacccgggtaccggccaacgaaccggtagacaggcgcatggagagaaatgctttctcggtcggttccggagtttccttaccggtacttccaccagggtcaaaattctcttcatcactacaagatgccatcatcatcattccggctccgattgcgaggccgaacattagttttttccattctactttcatagttctacaattgtttaattaaaaaaaaatacatttataagtcactcctgggtctttagccaagctgctaattgccccatattatatgctgccgcttgaatgccggcatcaatcgctttttccagatactctcctcctttcttataatcttgtttcaagatgtatgcgattcctaaattattccatgcttcaggcatatccgacttctgaagtcggactatggcagcatctatagcgccattctccagttcaagtgccgcagtgttgagccgcgctaccgggtcatcgggataaatgcgggcagcaatgtcaaacacctctttaaattcaccgctgtccttggggtaagtattcgccacgagaaacatttcattcagactgaggtactgaggtttggttttaataagttgcttcgcctcgtctacattgaaagcacgcgccacataagaaatggtatattcattacgacgtaaaggcggataatagtccctcagtaacatccggtaggtagttcctccattcagcgcctgcaaccgattttttcgtgtggcgaaatccgtatgtccgtcgataacggcaagtatagctcccttatcaatcagactcgaagccgcaacttcacgacgcaggccggaccagtcttctcctttccaatcgactgtcagcagagattcgtcaactcctccgtgattctgcagataaccgacaaatgccaatgcacggttttcggacaacttcatgttgcggctatagttaccttcaggagatgcatagcctgtcacccgaaattccgttacggtcaggttggaatcgttttgtatctcattggcaatccggtcgacatcagcaagcacgttggcattattcttataattgcgcagcaatacatatttgtccacctcaaaattcagataggctgtatgtgtctcgctacgctgcttcaacggttctaccggcggagtcacataactcaactcataacgaggtgtaaattgttcgtcgaataccgatgttataacggtatggtcaccctgactgacaggacaatcggcacaaccggtcacctcttcacgtaaaatcagctctgcccggcgcatccattcatgatagggtaatccgaagtggagattcacagtctggggagtaccgctctttcgtttctcgacaagcataggagacatttcaaaattgtcagtgccgaaagctaaagatcgtttcagcacccgatagcgacggggtccggctatcactaccggagctaatagctgttgttcttctccttctgtagatcgcaagaccggtgtaagcacaatcatttgctgtgcagccagctttacagcccctaaatcaagggatacctccacgttcaactcccctcctttccggaccacatggtgttgtccgaagccgatatgaccttcgtatgaattttgcgcctgcgcaaccatgccgcagaggacgatgcccaatatcagaaaataaaactttttcatatctttcattttttatcaaattcaacttagcgaataaagtagaccaatgaaacagccgctttggtaggaccgacatagtttttatgcccactctttattttaggactgcaattcacacaacgatacttatcgtatacccaatgagcatatcccactccgaccgaggcctccaggctccaatgtttactcaacagccattgatgtcccacactgacacctcctccatagaagtatccttcatagcgatggtctttaagagaagggaatattttgaaaggtaaactgataccggccacgctaaactcacctccatgcagatgtacaccccagaaggttccattgaaacgctcacaggtccagtaacggaattccggctgtgccaaccagtgcttgaaacgcttgtgatttccgaacgtaaacggattatagccgccatacaggtcaagcgtggtcttcttccccaaccctacctctaatgccagattgggtgtggtggtagcatcgtacaggagattatttttcagagcgacgtgctgtgcacttacagctactgaaatcgatattgcggctccaaacagaattagctttttcatactcgtttcttctattatatatactgactaaaacttgctcaaaatgaatatgacaaatatcgcggaattgtatcattccggaaattgtattcatttctcttatagaggaagaaagagtaataaaacttctaataatggggctttaatgaagtgaagttgctaaatataaaaaagggaggagaaagttctgtgcagtttcattttccgcaaataaggtaaccggacgttgcgattcggacaaacagagaggcaaaaaaacaggcatagattctatacggcatatatctgctgacgacagtatatgcatctataaaatccacgcctgcaaggcaaactttaacgagtaggtttcttatctacatttcccggctggtcatcttcgggaacactgaagtcacgattggcaaacagatcggccaaacccgatatttgctttaagcgcaacaactcgtcccgatccataccgatattcttcataatccattgatcggacatgcctgccttatcaagttcggcaacaatatggcacatcagttctatattgtgcgtaccccgggcacgattatggcggatagtggaactcatacgattggaaagatccttttcgattaccacaataggcaacatcccgttttctctctgaaagatacgtttcgaagtcttcagcacagaataacggtggaaaccgtcgacaaggatataaacatccttttccttatcataatagcagacgcagggcatagtgaagccgtcttcccagatagaaagttcaagaagcctcatctccggaggagccaccacattcggattgtaatcgttggcctgtactttttctacgggaactgctattacattatataccggacttttctttatactcattgcaatatgtttttatattgttcgattacttgatttcgtttactcatttcctcttttgtcggagagaatcccatatacttgcaagcatgatcatttttcagaatacagatgcacatgcgcttgtaggtggggatttccctgaactccggaatatcaatatcatcctgatattccatgcggaccggcttcttggtcgttttataattggagttgtccattacaataataggtaccttggcttcattcagcctacgaatagtttcgtcactcagacaccctcccttattacgccagaattgtacactgacctgtaacttccggagatatccgtttcgggcacggtcgggcaaagtggaaagcagaaaatacatgaattcccgccaggtatatccttccggaagcttaatggactgccatcccatcgcatgggttcctccatacatactcgtgaagttcactccattgacacggcctatcattttcccccacgtattcggatcgatggctcggtaaagtgccagactctcttgtgcctcacctatgaacgggctggcaacgcgctgacgttccagattgactcccgcccaatagtaatagtcgtatagtttattgtaatcccacttaaactttccgttagcagtccatacatccgtagttttccagtcgtatataggatatgcattaaagatatcgtttcctaccttcgaagtccaccgataacgatgatacatctggtacttgcgattgaggtaaatacagcgccaacgattgaaactctcctgcgtacgaataccgatcagacagcaggtgcgcacggcatcctttttctcatgaagccaactggcaaaacgcatttggaactcataatcccacatttgtgtattataaaaaggaaagtcttctttagtcatggcgttctcaggtaacggacgcacccagaggtcttttttactatcttcccacggacgccagaaagactggtacatggaagtacaggtagctaccctgaaaggtacacaaacccggtatacttcaagaatatccttattgtcttccaacatacgggctatatagtcaatcgtcatcttatattgtatctcataatccatatggaaaaccccgagttttatcttcaggttattccggcgaatataatcaatacataagctcaacagcactccgctatcttttcctcccgaaaaggaaagatagacattatcgaactcattgaagacgatacgcaaacgttcttgcgccagttcatacacatttttaggtacagttgtagttttagtcatcattcatctttttgcattcttacataacgtttccatgccttctccattataaacccgtgttcctcaaatacagcctgatggttgaccataacaacggcaaacaaacgtacttcttttccgattgcttccaaaacactggagattaataatgagagtgtttcacggttatcaccgctgacataatagttgttgattacgcatccgctccttctatgctccaccggcataaaaccaacaaccgattttttatcgatagcaatgaaccacacgtattgttctgtcgttttaaaaggataattattatttgcacttaaaacatccggattcatcaccaatggagcaataagttggtataagcgtttttctgttccttgtacttgtattgtctgtatcatgatattaattccctttgggtatataatctatgaaaaagacaaaaatagataaaaaaatgaaagcgaaaggcagatataactataaaaaaacaaaaaggaaaaagatggcacgattatagaacattgtgtctttttaatataaaacttcccgctctgtttttttgttttcgtataattattaaacaagaaatagtttaactatgaaattattacatatagaacgacacaccacttgcctcaattatgtatcagattacaatatatgctttattcatcaaagactcttctccgggggcgattttaagatagataaccatcaccactcgtgtatcttatttcttttaaaaggggaaatactgacatcctgcagcgagtttcacgatcagcacatcgttgaagggcacatggttctctttccccaaaacgatcctaatcaaagcaaaagcatgacagaaacagaatttatactactgttcttcgacaatcaagtcaatcttcacaataaaatgtcgattgaattgtctgccattcatcttgagtctgaaaagagttgtttttattccttatctatctgtcctccgctacgacatgtgttggacagtatttgcttctatctcaaacagaaagttcagtgtagtcatatgcatgaactgaaacagaaagagatattcatggtattcggtacattctacaatcgaacagatatggcccacttcctgatgcccatcacagggcgagatccgaatttcaaaagtttcgtattggaaaactacctgcagatacgaaacatcaaacagtttgcacaattatatcattgttccgaacgttctttcaatcgtaaattcaaaagctgctttcacgatactccctacaattggattcttaatcaaaaaacacgccatattaaagggcaattagccaatcgtaatataccgatcagtgaaatagccagaacctttcattttgcttcaccttcacatttcactacttactgtaaaaaaagacttggaatcactccgagcgaattcagagaaaaaattgcaaaataagaagttccgaccctaaaacatggaaaaaatagagattgtattacgccgggaacaaaataacagaaatggcatttatttaaattacatcaacggatattggtatacttacgaatggtcagcctttttgctatgtatgcttcatccggaagtcgaagtcagaaaatgtattggagtgcaacccgatgaaaactatgctatagcccgcgtcaataaaaaaattataaaaaaattagaaaggaagtatcagacatccatgatggatgactccataaaaatactacttccgccgttcaacgaagatgaaaatatcttcctgaattggaaagcgctactccctccataatttctttatcgcagctattcatcacccatctgcgcataaggtcatcggtctatattcaaaactgtcgtatgtttaatctcactaagaacaaacgaactctgcatcttaactataccgtgaactttagtcagtttctcaaaaacgaatcggttataggcatccagatctttcaagaccaccttaatgaaaaaatcataaataccgccggtagaatagcactccataatttcatcgatctccttgatctcctcttgaaagcgctttatatgttcgtcgtcgtgaactgccagagagacattacagaaaacaatcaaaggcaatccaacttttttattatccaccaaagcgacatatccttttatatacccatcattttcgagtcgtttgatgcgttcatatatcggcgtttttgatatatggagcttctcagaaagctctttagtgttcactttcgcatctttctgtaatacctgaagtatttcaacatccgttttgtctaattgccccatagtcttttttcctatttttaatgttttcgattcgccttttcaggaaaatcggataaagatacgggcaaatataggaattatatcgtatttttagttgagacataggaaaataatccattatagatacctttgcaggtacaaaagtatatagaatatatggaaacaaagattctttcaaatgccacacacaaatgtgttttagtgatcgataacgctcaacctacgggcatagtagccaatattgccagtgtcttatccatgacgctagggtgcagagtcagcaacattgtgagtcatgatgtatatgataaacaaggtgaaaggcatttgggcataacacaactgccgattcctatacttggagcttcacaggagaagataaaagagctccggaactatttccactctttagaaattgaagatctggtactggttgacttttccactattgcccaacaatccagaacttatgatgaatatgaacgtgaaatgtatagtgccaatgaagatgatctgcactatgtaggtatcggtatttgtgcagagaagaaagctataaataaagcaaccggcagcctgagtctgatcagataaaacccaaagaccaattaacaaagtttcccgaatctgattcagatcaaaaataaatattttttctgtattgggatggcgttactccggtataatgacgaaaatacctactcaatgtcgtttgatcgggaaaattaaccctggcggcaatcgacttaatgtccagggatgactcccgtaacaatgacttgatctcaagaatggtataataaacaatccattcacgcgctgattgaccactgatactccggataagatttgtgagccttttgggagaaatacccagtttctgtgcaaaataggccacatctttatccggagaatgatcttctataatcagacgtacaaattgatagacatattcgtctttacgtgtaaacttcagactcttctcagcctgaggatcattgatatacacagtatagacatcccagaagtaaacccttaacagttgcatgattgattcctgacgacaattttgcggtgtatgcttcatcctgtataccagaagattacaatacgccaaaaaacgaccgatcaactccccgtccgggattgatacaatatgcttgcgcatgtacagcaaaaacccggaagcgggtctccataatgtactcagagtttctgaaaacatatctttggaaattttgaaaaaagtgatcctgaaatcctcactaatctctttgataaaaacgagttgccacggcatcagggtaatgaccacattcggtacgatttggaatggaacatcaaaaactacgatagttgccgtacccgattcgcatacaccgccgatcccctcttcaatataagacggacaaccggtcataggaagatctgcaatatccgtatagatcccaaatccaatgtcatcgtcggcctgagagttcattttgtttgcttttacattatctgccattttgcgttcattccaaagttttatgtgacggaggtactgcaaaggacagaaaaagttcctttttatcaaacaaccaccattctatttcatcttttttaacccggtcagttctcacacttatctaaacggaaaacatagccaactaaagaaatgatgtgtttttcactattaataggcaataattgcccaaataacaatagatacagttttataaatacctttgtctataaatgcattgtttggaaaacatgtttttactctaataaaaatataaatgtcgaattcttctattaaatcaaaaacggcgctactccgaaacggggaaactcaaaaaggaaatggctatccggaagccaatgattattccgccaggattcttgaaaccatgcagaccggtgtggtctttttcaataccgaacaaatcatttccggcatcaacaacttggcatgcgaggatttacagatcccccgggatccttccggacataaaataacagacatcatttcaatcatccaccaagaaaaagatatcttcccggaactgatcgcccgattgaagtcttcggaaacggatatggagaaattgccaatagacactttgatacgttctctggaaacgaaggtgcaattctttgccagtgggtgtatcatgcagttggagaccggacgttatttattagcattccgtaatacgatggatgaagtaacgcatgaacaccttctgagcatgattctggcaaggacaaagatctttccatggtttttcgacttgaaacgtaataaaatgttaatcgatgcccactggttttcttatctgggtatcccggcaggagactgtgagataacaatcgagaagttcttctccagagtacatcccaacgaacgggatatgcttgcagatgctttgcaaaaacagttatcagaaaaagaaatacccgattcattctcctatcggctgcaacggggcgatggaagttgggagtggttttctgaacagtcgatgtatctcagcaaaaccaatgacggttcaccttatcgtattgtaggcgtatgccatagcattcaggagcataaaaatactgaagataaattgcgcgctgcacgcaataaagcccaagaaagcgacagactcaaaagtgcatttctggctaacatgagtcatgaaatacgaactcccctgaatgctattgtcggtttctccaatcttattgcaggcgggattgtcgacttggatacagaggaagccagagattactcggcattaatcagtaaaaactgtaattatctgctcacactggtctcggatgtccttgatctttcatgtatagagtccgacacgatgacttttaagtttacagtatatccacttacccgacttctgacagaaatctatcagaaatatgaaaacagaatacctcaggaggtacagtttaatttgctgctacccacagataatgttgaaatagaaacagatgctgtgcgcctacggcaagtgatagagcacttgttggataatgcggcaaaatttacagtaaaagggcatatagatatcggatatgccctgtcggatcatggtgagaaaatatatgtattcgttgccgataccggttgcggtattccaagcgatcaatataaaaaagtattcgagcgcttttataaaatcaattcattcgtacagggtgccggtttaggactttcagtctgcaaaactattgtagaaggtctgggaggtacgattaatgtatattcgcaactgaaagaaggttctcgtttttccgtgatcctaccgctaaacagactccataaataaaagttttgcaaccatgcataaccgatggaccgaatgcatttcaatcttccatctcccacccaaagtctctgctacccagtcccatccccccccgcagcccgggctgaagaacgcagatatccggactgatgggcccgggtagcaagactgacataaagcaacccatagcggaacctataaaatgcagcttctttgaagaagtgcgttgctccggacaaaagcacctcttttcatccatccggcacagtccggatgtgaagtctgcatttcacttcattcatataagttacaataacccactataatgtccatcccaatgtactttcttgaatgttccagagcttccgatataaaccatcccggcacatcaattccgaatgcgtaccttgttcttccacttttccatcggataagacaacgatgtggtcggcccccattattgtcttgagacgatgggcgataacgataaccgttcgtcctttaatcaacgtatcgatagccttctgtatctctacttcgttctcgggatcaagcgaagcagttgcctcgtccagcagaacgatctgtgcgtctttcagcatggcacgcgcaatggaaagccgttgtttttcaccacctgataacgtacagcctccctctcccaccattgtatcgtaaccatatggcagatgcatgataaagtcgtgacaacaggcctttttggccgctgctacaatctcttcatctgtggcatcacttttaccaaaccgaatattgttgcgtatgctatcctgaaataaataaacatcctgaaaaaccatcgaaatacgactcatcaatttttcaggttcaatctctcgtaccggtactccaccaaacagtatacgcccttttgtcggatcataaaaacgggcacaaagtttcattaccgtactctttccacttcctgacgggccaacaagagctgtcagtgaatttcgcgataaaatgacagaaatgccatgtaggacctctttctcctgatagccgaatgacacattttcaaagatgatattaccgtcttcgggagcttcttttgtccctttcatttcgggttcgttcataagagaaagaatacgtcctcccgaaatagaaaaatgacggaactctgtaaaattggtaagagcggaagtcagcgggtcgaatacacgggaaccgacaacaaggaacatgacaaacgtgagaatcgacaactggccacctaaaagcaggtatgttccgcacagtaccatcaatgtcaatcctgcacgcacgagtgtaatagccaatagaacaaaaggtcccaatagagcctccaaccgaatgcaggcacgacgtaattcggcaaaagcatcacgcaaccgaacaaaacgatcacccagcagattgtaggctttcatcacccggatgccttgcaggtactcttccaggcggtttccggcattgacttttgctttgatctgcctgccactcagcctctcctgtacgctcgtgctcaaccacaaaatgcccattgcaaacggaagagccacgaacatggcgaccgccatgcgccaatcgatccaaagaagcgaaacaaaagccagtacaggcatcaccaatgctcccatcagttgaggcaaataatgcgagatacctgtttccgccattgtaaaatcggtaataagcatggatgataaatcacccggatcccgtttacccagaaaacctaacgaaagtttgcgtaaatgttctgccaaagagatgcgtcccgatgcactcatttcgtaagcaccacggaaattggcacgataggcagccctttccgccagtaccataacagctatataacctgtcatacagccaaatatacaccacaaccgggtggtatcaagcgattgcccgcctccgttgaaagcacggaatataatacgaatcgcctcgatagaaaggcaaaaaggaacaatgttcaccaaattggcaagcatagtgtagcctacaggtttataaagcctttccgtacggcctattgtaatatttcttattgcactcattctctattctttttcttgtttcacattcaattgccagcggaacgcactcgtataagcattccacatctttttatataccccttcttgagaggaaagttcttcatgccgtccgcattgtactgcccttccatctttcagtacgatgatccggtcggacgatacaatggaagaaaggcggtgggctatgatgatgaccgtcttatccttaataagtgatttcaaagcctgctgcatcttgtactcgttctcgggatcggcaaaagccgttgcttcatccagtacaagtataggagcattcttcaaaatagcccgtgccacacagactcgttgtgcttcaccaccggaaaggaaaacgcctttatctccaatacgtgtttcgtatccgttcggtaacttctcgataaactcatggcattgcgcagcacgagcggcagcaatgaccgtatctctcgttgccctggacgaacctacggcaatattttcatagagtgtatcgtaaaaaaggaacgtatcctgaaagacgaacgaaacgagatccattaactgctccgttgcaatatccttcacattcacattgccgataaggatttctccctgctccacatcccaaaaccggggaatcagattggcgacggtagatttaccacttcccgacggaccgacaaaagcggtaattttaccttgaggggccgtgaaacagagatcgtgcaacgcttcggtacgagtagcctgctccttgttttcataggaaaacgagacatgacgaaactctatatcatacgtcgcgggaattttcggacaagcaggttccgagaccggctgattttcaagaatacgatcgatacgcgatacaccttcattgatttcccgcgtactgctgcccagatacatcaacttatagacgggtgaagccacgcccggaccgagtatgataaagaaaagccatacagctgccagcgtaagactccgggagtcattttgcattagtaaaatgccgacagggagaatgaaggtaacaatcgaattgagcagtacggtaaaatatgtcatacccgattcgtaagtgtcgcaaactttcaatgcataggtcttgtaagcttcgatttcggcattgaactgacggaatgagcggacactctgtccaaagattttcaccacaggcattccgcgcacatattgcacggcagaagcactcatctgctcttgcgcgttgtaatagatgcgtgtaaattcccgtgccttttttcccatgaaattggaaaattgcaagaatatacttagtacgatcactgccaaacagacacctgccagccatccatcgagcgaaaagaaaatgaggaacatcaccactactgttgccataacgttcaccaaatcgggaatcgtgtgggctatgaagttctctatcttttctacattctgttccatcgtcttcttgatggctcccgttgatgtcccgttcagataacccagcggcaatctcccgatatgttccgtcaaccggatacgcagtccgtagagaatacggtatgctgccacatgagatgacatcagggaagcatacagcaacaataatccgccgatcagcccgccaaaggctatccaaccccaacgaatcatattggtctcatcgatggacgacagcgcccggctatggttcaacaattcatagagtatccggtagatcgcccaataaggtatgagcatacacaccgcactcccagccgataacaagcctgccaacagaagcagactttttttctgtcctgcaatctcaaacagacgggacagcccttctttcttcttatttaccatgatcaaccgatttatttatcctattttatacccgagcatggaactgaacttgtagcacaacctcgtcatcctgcccaatatctgcccgaaaaaaaatccccaacggaaacgaaagaatttcatataattggcctgctccaacaaatgcaatccgggttcccacaactccaccatatgcccgtcatctatccccgaacgtatctgcgccttatgttccctcaaggaatcgggcttcacaccacgtcggctcatcatcgttccgcatacatcgaaccacaactcgccgccttcgaagcgcatggttatgttatgtagaaatgtccgtacctgttcctcacgaaaatacatcaatactccttccacaacaaagatgaaatctccattgggatgaaggagtcggatcctatccatccaatcggtttccaacaacgatgcagacaggtaacaatcattctccggttcgggtatcaaccgacgacgtatagcaataacctccggtagatccaactcataaaatacggcctttccatcatttccgacacgctgataacgggtatcgagtccgcaacccacatttaccactaccgggcgggtgtgagtgtcaatgaaccgccagatagcatgatcaaaataccaaccgcgtatcacacaacctacttcactcaacttggccccatcgaacctggaataatcatattcgatgttctcaaccagttgctcagccaatttgtcacatagaatcggatttttccgacggttctccttggctctcatgtaaagcggaatcaataatgtttccgccacgatgttttcaaattcatgtttttgtttcattctatacttttatgatgttagtgtcagagtagcgctgaaaaatgaacggtattcaaaatcgttcacaaaaaaagaagagaaccttcgtaaagattctcttctcaattttaatccggtaaacggtgatttatatttttgtcttctattgctcatactctcagcaaagccctccaaccttgaatttcaaacaatatatactcatgcacgatatactccatttccttgctatcgatagcatgcttcaacatttcttcaaaaagggtgaacatccagactgcttgcagatggatcataaaatccgataccaccacattgatttccggatgcttctctttcatttcggcaaaccatgttttaacaatctccgtcgaacggtttgtatagtcttccctgaatgtttccaatgaagagccttgtgaatggaacaatagaatcttcatcagctcaccatgcttgtttatcaaggatatatattcatcgacagcagacttgagatactcttcggaacatataagcatgatatctgctcctttggctccatgatgttcctgcagcattcgctccaaagcatccgatacaggacgaagtatcacacaaaacaactcatctttattctcaaaatagttatagagatttcctacgcctacatctacagcatcggctatttcgcgcatagaggtcttcaaatatcctctctgcataaattgctcttttgcggccgacagaatccggttgcgtatatccgatttgagtgtttgcatatgacgaacagcgttttatttccggacgtaaaattacggtatttcactttgacacacaatacctataaatagtggttttggaatgacaccttcaaacattcggacgacagcaatactcaccctttatattattttccccaatactgtgttccccaattctacactattccacataatttatttcacaccaccattattccagacaaccaacacattaattttcaacaatttatatttcaagtgttttttggcatcccgtttgcaatactatttgtacaagagataacaggttagaattttaataatcatttaaaaaattacgatcatgaaaaaggtattagtagcagtagcattggtaatgggattaggtagttctgtagcatttgcacaggaagttgaaaactctacggcagtagaaacgcaggcacaagctccacaagatgagtttacgaaaattgatgccaaaaaacttccggatgcagttatgaatgccttggctaaatcttatgaaggtgcctcaatcaaagaagtttattcggctgacaaagagaccggtaagatttataaggtgattcttacaaccaaagattctcaggaagttaccgtacttctggacgaaaagggcgaagagataaaagaggcataacgaaaactttgaatgcaaagaatcaatgaaaaaatccggttcataacgaaccggattttttcattggtatataaatataaaagcataaccttgaatataaaaggtttcatttattctttaaaactaataggttattatatacaagacaacaccctgtaaaaatgatagaagccgctataagaagcaattcctgcttatatccacccggattttcccacagaccggggaacaaatggatacgatcaaacacctctaccgctatccaaaaaataatgacggtggcaaagccgaaccgtaaactcatatcccacgaggcatgacgcagcagtttggcaaacataaaaatcgaaccgataagtcccaacattcccaccaacagtgtcaccggatggtgatcgccaaagaaccgttcatcataacaaaacatcagtaccaggtaacacgtccatagcatagtgatcacttccataaaagctacaatacttgtgtggcgcgtcatggcccggacaacaatctcctttttgtgcttgccgaaaaataatttctgccaccagttcaagaagttgcatccgttccgggtacagaacagatagagtatcatcaccataacccaaaaaccgaaggtagcaggcagtaacagatactccggccgactgacgacctctcctgtcaccggatcgagttgtgcctgcgtaccgaaacggttggcaaaatacataaacagaaagtcgacagctcccatccaatagaacattcctccgaacaatcccaataaagtctgccggatatgccctttcacaaacactcccgcaatcaccatgaataatccgaaagcccccattcccattccggcatagaactgctccactcctgtggttccctctttcaggacacgtgccaggctatgggtcaacggcatagcagccagtgtcactactatggacacaaccgctttaccccagtgaagtttccgcatacctgccgtttttaatttactatctttcattttaccgtttttttttctttgcactcatgtaccagagataaacagcaaggataatgaacacagcaagaataatacccatctccatcacgtggttcatcggatcaatccatatctcactgaacagattcatgcgtcccagtatctccaccggtgtccagaacaccaccactgtagcaatagccatacgtatattcgctccccacgaggcaatgcgtaattgcttgacaaagataaagaacgctcctaccagacatcctaatcccactaacagtgtcaccggatgatgctcgccgagaaatacatcgtcataacaaaacatcagcacaagataagaagtccacaggatcatcatcagttccataaaggtgatgatcgacacatggcgtgtcatgggacgtgccgctatatcggcttttcgtccgcgcaataacaaacgctgccaccagttgatgaaattgcagccattcttcgtactgaacaaatacattaccatcaccatcatccaaaagccaaaagaagcgggcagtatcagatattcaggacgggtcacgatttctcccgtcaccggatccagttcaggttgtgtaccgaaacgattggcaaaatacataaataaaaattccacccaacccgtccaaaaaagcagtcctccaaaaaagccccatagcgtctggcgggtatctccttgggcaaacacgcctataattaccatgaccatccccaccgctcccatagcaaaagcagaataatgcaacacggtctcattcatgacatgttccatgataatcatcagtgcatgccccaaaggcatagtaaacagtaccatcaggaaagaagctattgctttccaccaatagcgtttagaaccggcagatggcatcaggttcatttctgtcgtctttacatcggttatttgttccatatttcattagtttactttaatatacttaattatacaacatggcgccactgacaggacggcatgcaactatttctatcacattacttcttctcatggttgcagttcgtcacagtaataacttagacgtccgccttcatcacctatctccacattcgcatcataccaactgatgatctgaatcttgaagtaatgtttgccatcagcagtacgtaccacataagtatgatatgagggagtatatacaggaggcgggccggcaaaactcatggcttgagccagtacgggattagcgttggttgtagtcttctgcggtccgttattcggatcaaaccatggattactgttgaagtccaaaccattttctatcagatagtgattccagtcattctgagacatagtgacatacacctcttgattgtcttccacccatttcagatcggagggtaattgagccacacttgtccaattttcgtagttcccatagcccaaatcggcagctcctccccgaccgatcccactcgtaccggaattggtacgcatcacgtaaccgcaaaaagccagatcccagtctgtgcgattcatctgcccaccttccttgatatcccggtttacccccagtgcattgaaaatctctcccgtacgcaggttgaagtaaatccagtcatttgtcactccggtggtatagcccgacttgcggggtaaagttttcccatcgaagggttgtatatcactgtagtccacgcaggcagacagtagaaggcagcctgcacaaaagcagagggttttgaataatcctgtatgtttcatttctttttctttaaagagtttatcacatcatccagcatgaactctacctgtacccatccacgtgctccggctgtggcaggcacattgaacatggtgatccctgagccaagtgttttaggtacatagttgaagagattgtccattcccaacgtcaatttcaccttattccaaaaagtctgcgaaacggataaattacaaagtacatattgtggcaggtcgcaccgaaaataggcatcatagcttttattctcctcctttacaaacacccggtcctgtacatcaaactttttccctcccatataagaggcactgaacacagcgttcaatcgataatttttcttcatgtatttgtaatccatgcttgccgtagccgcatggggcgaggtggtattcacctgtatgcctttattcttacttacatctacaaaactgtaagttccattcagcgtcagacagtccagcacactccatcgtgccagcacttccagtcccagcagacgttgttggctcaggttggtatactcaaagttgtactgcatatcgtaaatacgccatacaccttcaatcttatcacgaaaatagttaccgtatgctgttccggaaacaaacaaacggtcgttactgtactccgctccgagcgagaaataattgtttttctccggtcgcatattttcattaccgcggatcatgaacattcccagatgatcccagttgaagaacaactccttgatactcggtgagcgataacccatcgaatagttggcacgaaggctccaatgcttatcaggcgaatatttggctgccactttgggcattcccatgaaaccaaatgctttcgagaagttagtacggataccaacagatatcatccaccgaggattgatggtccattcatcttgcagaaagtattctgtttccttcaatgcacgcgttttcaggtcatggttagcattgccggagaaacgatcggaagtcaattcatccgacgtatgctccatacccaatattaagctgtgtccgttgaagtaattgctcgtaacggtcaaacgtggctgataaatgctactttcataatccttctgccgcttgtcgatacgttcatggcgtttgaagcgatcgtaaaaatcagcgtgcagacttcctgtcacactaaaccagtccttcacatgataagtcactttagtcccggctgtccaatctcgtgcctggctgaacatcatatcctgtatcaagtcatacgtgttcatgaaaaaagaactgccataaaccagcaccgacagattcggattcggattatagtacagtttctgcgataccgtaatgtgctctttgccttcgatacccatgggtggacggacagcattgctgaccacggttatgtcatgtggcaagaagggattcgcttcctttgtgtaaactttcttgtcattttccgcctgatacatataaaaggcatcactctcgctataccatacatcggtctgcgacgtgaattttccggccttgaatccggcagatacccagctttgtaagttagggcgatcggcattttgctcaaacatgtaaaggaagtccttcggttgcggatgcttgtaattgcgttcattcatctgcccataacgtattccggcatctatcgagagaggtttgtctgttttcttggtaatcaaattaatgactgcaccggctgcacgtgatccgtagagggtactgctcgcacctttcactatctcgacgcgatctatggcatgcaggttaaaacgttcgtaatccaaattacccgccatgtcgcctgtcatgcgctctccgtccatcaaaaacaacacgtggcgtgcgtccaacccttgcatggagatttcattaccgaaccccaccttctgtatgttaagtccaggcgtttcctgctgcagtgcctgttgaagattactatatccggcatctaccagtgctttgccgccaagtacctgtgtcgtaaccggagacatcttgatgggacgggctgtacgtgaacctgtcacgacaacttcatttattcccaaatcatcttctttcatataaatgactttttcgtcttgtgtccctccaatcttccccgtcacaggtacatagccgatataagtcaccttataatagcagattcccttagaaggaagctttaattcagcctgtccagatgtattcgtaatggcatattggggatttcgcaaagcttcattatcggcatagattacattggctgcgataatgggttgttccgtgcccttctccaacacctctaacttgactttttgttgtgctgccgtatgaacacatatcagcaacattaagaatagaattgtagttactcttttcattcgtcgttaaaaacatattatgcaacggaagaaagattaggcctttccttggtctttcttagcctcttccaaatctttttcgtattgtgcaaactcttccttaaagcgatcgatacgggttttatcgattgtttgcaaaaatgtttcagtgcggacattcatcatattgtaatctacaataaactctatttggttggtattcacgttcaaataaccatctactctcgctccgctcccttcttgattatcttcggcatcatcaccggaagtcgtaacattaccatctgtacctacaaacttaatccatccatctccgggatattcatcctgttcccaactgttgagctgcatgattttcgtagcacatttgaagctaatggcaaatggcatagcacctacgctgaaatcactcaggttcagtatcatcataccgtcctcacgccaggaaaagttaaatttggttgggcaaccactcttcaacaatgtcttgtccacaccattcattgttgctctggtagagagtacaatatctcctgcaagaatctcttttgcctttttaacgtatgtctgggaaggtggctcctgtgttatcttttcatcgctatcacacgcacttaatccgagaattgttatcataaagaagcacatcaacataaaagtatcaaatcttattttattatacatttcagttttctttttatatagtttataaatgattttcttttattggtttcttctacagatacctgtagaaagaaataaaacatactgcaaaccactatcgaactaaaggaagttagcaaaagcagggcagcaggattaaagcaagtcccccatacctctccgattggattacaataaataaattatataggataaggagttaaggggtattcactaaaaactcctccttaactcctttagaactttaaattagtgtcaggcaaaatataataatcttactatgatacacttgctgctattttgtacctacaaaatgcacagatgcagggaaattagctcccaagaatgtaccggaaacgtccagtgtaaattctatttgtttagagccaccattatccgtaatctttgcatctctcaagtcgtccaaatacaatttgacctttattcccaacggaagcgacaaagtgcctgcttcgtccccgttgtaagctgtaatctcgccggtttcctcatctacttccacagccaaagaaatagtaattgtacccggcatactacctatctgcggaaaatcacatttcaaacggccaccctctattttataagttgcagcccgtgattcataaggcttacctttcattatgatattatccatcgtaccgctataagtgccttcatagtcacttatagccaacacgttggttatagagttagcactcatcaacggtgcagcgaaagaagactgcataaatccgaaacttgctgcaaaaagagcaataaacaaaataccttttttcataaaattaaagcattaaattaaacaaaaattataaacatctcctaagacttcttcttaagagcttttctccaattgtacccatcattcttattacaactcatagagatactaaatcctaacttttcaactcccgtacctttagtataatatctatcaagaaacgtctttgtcgattctctattgaatgtactttctgaacaacaaaaagaagttgcagacctcccttccggagaataaaaaacagtcagctctggataaacgagattgaaattttccggtaaatttccaaaaataagattctttaccatcttcagattagatatatcaaatgtttccaatgcatccaaacattcaagatctaagaagcacgttttcagctcatctttctttggcagtttaatttctttcagcgaaggacaatcataaacgatcaaataactgcctttggattcctctgcttctatctccttttcacgctgtccccaaatagtgtgggttaaatctaatgtgctcaaaccggcaacagttccgatattaagtacaaaaagacttccggcattcgacaagtccaagcttctcacattcagattattcaatacaagattggtgacatatttacccaatttgacagaaggcatgttagcaccactttgcgcagcagaataaagagcgactgctgcaccttcccaataaggattctgtataatgtattgtattccctcaaagttagtcactccggcattagcttgaataagcagaatcgtagtcttttgagcatatcccaaatgcttgctaagatctatttggtcaccattgaataaatcagaaaaattggcctgtaaataagtacgcaaattttcatctggcacctccctcaatgtggtatacgtttgtaaggttccgctctcatcttttatcttcatatctattttcccatttgttatagcgtccttatttttaatatagaaacgtaccagatccttaatattgtctttagctgtccagggaaggtaaagtttggtaatatcatgcaaatctgttactgtttcattaccattttcttctactacaacgttaacaagattatcataatcataaatatcattaccagtcagatcaattcctgtaatctgtttgggcagttttgaaaagtcgaatacaggaccataatcgttatttgacaattttacttctgtcagattgggaagaatatcaagttccgacaagtcagaaagttttgttcccgataaatctaaagtagtagtattattagctaaatcatccaacagtaagttaccctgttcattaaattggtatcctttctgttgcaaaattgtcttcaactcactattcttcatagtcgtttggctatatgacggtgtattgtcgtcattgcacgacattaaacacaggcccattgtaagagcactcaaaccgagatagtttctcaaattgttcatttcattacactatttataatatatattttaatagttgcaaatttactgtaggcaattatacctgacaatacctattaatcggtaaattaaatagaaatgaagaggtgattcccctataactgtctattaaaacgatacttaaaagatacaatgaaacaactgccgatctgctgagtatatcgttcggacaatccatgggatgtaacgttacggctatagctctttttctgactgagaatatccgcccaatacacagaaagttcagctttcttatatttaagaaaactccatgacaagtggaggttccaaactacttcgttatcctcacttctattgatattggtaccgttgcgaaacgtatgggttgtctcacttttcaaacgtatattacccggaaaaacggcgtaagcggtcaatccgaaagaataatcacgaatataattgtttgtttcccttaaaagattcgtagaatggcggaatcgccagtcaccgctcaaatcaaaacctccccatttaggttggtagcctacacgtagaccggcattatacagtcgattatgggtaacgctacgttcgggctgttctcgttgtccatcgtttacaagactcacgctttggataaatgaagtaccggtacgtgcatacaaattgaagtaatgattaatacgcttttgataacgcatggcagcttttatattccaattcccgttgacattcacaggacggctctcaatacctcctgtctgactgtcatatatcacagccctcgtcacattgttcaacatgctcgtccaattcacgtcaccgcttagcccggttttcgtatcccgaacttcaagccttaccttttgggtgtatgaagattttagatcgggattcccacgaatgatattcaaagggtcactgttgtctgttagcgtaagcaattctgccagtcctggttgttgagtattcccttcataacttagttgcacccatgtctttcttttgcgccataagatggtaagagtgggatgatagtttacagaatatctcaatgtatcagcctgtgtccaccctgtcttttggccaagagtttgtcgtttgggtgtaacggacaaaccggtagtaatctcccacgttttatcagtataattaagattaagggaaactccatgtgccatcgtatgactacgacttttgttactcaaactatcggtatattccacttcgtaacctttcggaaaattaccggtaggtgtatgttcttcaccgtctatcacaggagaaagaacgtaagtgttacggtcacgactttggttatccaatttaaatatgtatgacaactgcgccctcaagttcttgcgaagtatttgcgtcagtattagtcccaacttaatagtacggtttctgttcggactttcttgatattggttacggtagagtatggagtcattgccctttacattctgtaactgataataggtagtggatgataaagagaaagctttattgttgcctcgttcctccgaatattgaacggtcagtcccaaacttgtaccttttgcattcagtcgtcgggtaatgtcagcaccgatagaatatagtcggttaatgcttgatgacctcgaagtcatacagatgtcattcacccgtatactatcctcaatttgctcactcgcatctctattaaagggacttgttacatctaactttggatctgcattataagtagcttgcctgttactatcatcattaataccttttagagcattaaaacttcccgaaatattaagcaaggtctttttgtcaatgttccatctcgcacttaacatggcacttatcatacgattcgtatgataaccattatcggtcgcataccgataacggtttcctgtcatcaggtattgctcataataggaagtcccgttaataccattaatcgcattgttgtacatgatattcccattgatatgtactgtttctccaaacttcttcaagaaattgaccgctatgttgtcttgacgattctttttattctcagtggttatatcacgattaccacttttggcaataacggacaggttttctccatcagctttgaaaaagttgcttattaactctgcctctttctttttcttatttccctttcccacagcaaccgaagttatcagcgtaccattaagctcttttttggtttgcaaatcgagcacatagttttcatcaacaatcctgactccggtaaacttttccatctcactacgcttatcatagacctttatcctacttattaaatcggccggcaagttttctaatgccaatacatgattccctgaaaaaaaagcctcaccattcacattgatttcgctaatgacaagaccgttgtatgataaggatttacttcggtcatcgtattccagtcccggaatctttctcactaactcctccagatttgagccttctggggtccggtaggcatcagcattaattacggtcgtatcccctaccatatctatctctttgacgggagcagtcaccagcacttcggccagtttgataccacttttcatcagaatatgtccacaatcagtatccatcatatgcagatctaacttccgaaagatagttgacataccgatataagatatccgcaacaagtattccattcgcttttgtggtataaactccaacttgaagctcccatttgcatcactcgccatcccctttacaaaagcggaatcctttccttccaaaacgaccacgcttgcataaggcaaacttctctctatcgaatcttcggaaagaacgcaaacatgtcctttgactattttcacctgctgagcggacagggtagctgaaaatagccataaaaagcataaaagtatgttcattcgtatattcattccgaagaaaactaaacagacgcaaaattagacagttttcattggctgctcaataccttaaaataggtaatatgccgataatgctttactatccttttcaaaaaggactaataattcacgctaggaatggaaattcttatcatggcactaaatctgtagcttatttcatttaaaaaattcaaatcaaaaagaatcggtctgcatgcggcacgtgataaaggaaaacagaaacgatatctgggtataaacatcatgggtataaatacacattctatcgaaatgaagaataggaaatccacttaaaagcatcaacatatgaggcaatattatcaatatcatctaacatatttatggtatttttcatataaatcctaaaaaaaagcaatgaaatgtgtttgttatgtgtcttagaataatagttttgcgaaatgtagaagttcttattttaatcaaaacctatattattatgaagaaatttaaaatttatagagataatcagcatatggacgaattctttctaaaaaagggatttgtcaagtgatattgccagcataagatatttactattgctgagcatgctatggatatgaatagcatacaactccatagatgattaaattgttgtgcatttctcgtgacaaccattcatatacactcaatacctgttcctactatacctaatattttatccattataaattatttattccgaaccataacaaacaattggttctatgtttaatttaaacattaattttatgaaaaaacaattagtaattttcattctgctaggaattattgcaattccttcgtcagtaaaagcacagaaactaaaagttagtttaagtgccggtctatccaaaagcattttgaatagcgatgtttctaatttggtcaatacacgttatgataccaaaacaggtgttgcaacaagggtaaatcttgaatataatttttttaaagattttatagtaggaacagggctgggattcatacaaaagaattatgaatacaaaaagacggataatattacaggaacacatacactgtataaaaacaactttatggatataccgttaaatgtaggcttgtatctttttaataaccctcataaagaaaatggtatatggctaaaagttcaaggtggcgtcttctatgagtacttcacaagaatgcatcggaaaggcgaatatccaatctttgcacaattacaagaagatggttcctacatcaaagctcaggtaaatgaaacatacgattttaagagaaatgaaaacaacttgaaaagaaacctattcgggatagaggggacaggagaagttggctattctttcaataggatcgacgtttttgcttcatatacctatcagtatggtcttaccgatatatacaaagcaaaaacttcttctaatcgtaaatcaaaaagaatctcaaacatcatatcgttaggcgttgcctataaattttaaaattatagattatgaaagctaaaaaatataattggacattacgtcattcctttcttttatttcttgtgatctttatctccagcagctgcgttgaagatgttacagaatcaaccaaagaaccaacacggtatacagcaaacgatataaaatcatattctgacctgtttgatgtgttttggaatacaatgaatcaaagatataattatttttacgagcagagcagttttaattgggaaacggtatataatgaatatgctccgaaattcaaaaaattgaaaacgttcaacagagataagcagtatagcaaagcggaaatttcagaagattgtaataaagcgatagaatattttacagaaatcatagatcccatcatagacaggcacttctatgtaaagatttcacttcctgtatcgcatagttttatcagaaatgtctactttcatggtggtatgaagagtaaagaaaagatatatacttacccttttgaactcaagtatgaatacatgagatctaaaatacaatctgaaacaggagtattcggacaggtcaatgatatgttaggtggtttcttatcagacaatcctgacatatattacttcagctttaaatcgtttacaataagtaatcattatatattgtcatttggcagcgaatacttggttatagacgataaaagtccgtactatttaacagaaaaagagatcagagatactgtcgaagcgaataaaattaaagaccctgcagtaaaaagtgctctaattgagaaatcgatagaatacatgaataagtttaactccttcatgaggtctgaaatcgcacaagatgcaataaaaaaaatagcggattttaatcaatcagaaaatccagacaatagttttattgaagcattatccaaagcaaaagaaaatgcgcctgatataaatattgaattatcacagttaagtggtttgaaagaatttagattaaatcctaattatactacatggcttaaacagcgctcaaccgaacatttacaattagcatgtgaatataccgtctttctatcaaacatagataatgtcatcaacaatcaatataaaatagatttctatagaaactttttggtacccctcaaagttggaaaaataaaaaagataatactggatcttagaggaaatggtggcggtatggtacttgatgcaagaacatttacagatcgttttatcactaaagatgctatatttggttaccaaagatttaaggaagataataatccattcagttataccccatggacaccttgcatgacaaaaacaacaggcattgggataaaaaaggaaataccgatagttattcttttagataacaatagtgctagtatgtccgaaatcagcactttaatgttaaaaagccaaggaaaacatgtcacagtcgtaggaggctatagcgctggtgcaactgctggattgggagattcggatcaattcaacggaggaataagaggaaaggttagtgactatttagagttttatatgcctttacttgcaatgcaggatgcaacccatactgtaatagaaggaataggtatcaaaccggatctactagtagacccactaacagaagatgaagttcgtgaaatggctctttcaccttttactcatattgatcgtacattaaaacaggcaatagaagtcttgagcaataattaacacttctttttacaactaaaaccgatgaggttcgaaaacctactagatattggttaccgcattgatattccaatcacgatgtactctattcagtacacatctattgatagaatatcaagcggtaatttatcaaaaagtgtgattttttgtagtcctgcagaaacttatcgttcatgcaggacttcctaaaccatatcacatatcagacgtcataccccatataataacatataaaaacgctcctattacgccaccaataaacatttccggcaatggatcataatttaaaaaacactcctcatttccacagcgagaaataaaaatccaaaaacaagtccctgctataatccctaaaacagtagacaaaataaacagccatttggcagacagacctctccaattttgagaatatggcttttttagttttctcataggtcgtttttttagagttcaacagcagacaaatctgccaaagccttttcaaaatcacgctcggcagccaacgtctgattaactgtgtcataatacaggcctatctcaacgatatagtttaacaaggatatctcacccacatccagtgctttcatcagtaacgcggtattattgagtgccttgagggactcacgataggcaatggctgtctgctggagaccactggcacgcatatataaattccggagcctgtcatagaactgctgtttgctatcctgctctctggcctgtgccgccacaacaccggctttagcctgcttcacccgattcttattctcccataaagggatggaaatccccacacttattccctgatatttttgtccaagggtcctttccagcgaataaccggctgaaaatttcggaagtatcatggccttaccgagctttacctgctccttactgacctctatctgttgctttacatattgcagtagcggattcttttgttgagccgacagataccagtcttcaaaattagcaggcagcgaagccggagaatagttgctcgcctcaaaaatcacatccataccaccattcaatcgtttgagttcggaaagaagagcgttcctctccacttctattcttgacatctccccttgcacggtggaaagattcaactgaaccttattgtactccagaatactggcgtctccacgatccagtcgttgtcgataagcatcggctatggcttgtgcatgtcgtaatcggactttaagttcttttttcaaaccattataataaaccagatcgatgcaatattgcttcgcctccaaaagcaggttaattctttcagaagcatactgaagttctaccagcttattctggttgccggccaagcgacttcgcatcccggtaagggtcggaatgtcaaaagtctgtttgatactgaaatcctggcgattaccgatctttccgggatttccccaaagataaccaaactctacatcagggtcggacaagtatatacctgtcttattccccaatttctgagcgtttgtttcttctctcaatgctttcagggttgaattattctcctcaatggagaaaagtatgctgtctatgttttcttgggcgacaagtgacacacttgccagcaacaccattattaatataattgttctcattttagtcttcagttagttcaattgtttcaattttcttttcttgtttacgactgatatacaggtatataataggaataataaatccattgaggatagttgaactcaaaagtcctcccaagataactttggccataggactttgaatttcattaccgggcagttcacctcccaatgccagcggtatcaatgccaatccggaagacaaagctgtcatcagaatcggattcagacggtccagagaaccgtgcaggatactgtcattcacagacattccggaagctctcaggctgttatacctgtctatcaacagcataccgttacgggttgcaataccaaaaagagaaataaacccgataatggccgggatactcaatataccggatgtgaaatagatactgaacacacctccaatcagtgcaagtggcagattcagcaggattaccaatgactgagtcgcactcttgaactctttgaacaagagcaggaaaataaccaggatagagaaaatggaagtgatagtgataatacgcgaagcagcctgctcactttcaaactgtccgccatattcaatatgatatccttcgggtaattgtatctcactgtcaactttcgactgaatatcatttactactccccgtaaatcacgaccggcaacattggctgaaataacaatcttacgagccacattctcacggctaatcgtattaggccccatcgatgatgtcacattggcaatattttccaacggcactttacgaccattggcgtccacgatcagcttgcgtattctctcggcactagcacgactggcatcattcaccttcagcgtcaaatcaaaagacctattttcctcgtatacctgagacactgcctcacctcccagcatgacatttacaatatcaccaaactgaggaagtgtaacgccatatttagccaacatctcccgtttgggctcgatctttaactgtggacgttctacctgctgctccacattcaggtcggctacaccttcaatatcctgaatcgaattttttatctggtttccgatttcatacatcctgttcaagtccgtaccaaacaactttatggcgatattagctctcgatccggataacatagcattgatacggtgtgtaataggtgcaccaatttcaatattcacacccggaataacctttattttctcccggatttctgtcagaacttcatcctttgaacgcttgtcgagtataaacggcgcctctatttcggaagtgttcacacccaaggcatgctcatccagttcagcacgtccggtctttcgtcctacagtctgtacctccggtaccgagagaagtatatcttcggccatccggcctatcttatcagactcttccagagaaataccgggcaaagtactgatgctcacggtgaacgagccttcattgaaaggtggaagaaaactacgtccaaaggaagccatcatcaccaacgaaacaatcaaaatggctccgatagctcccaaaaccactttcttatggcataacgtccaccgcaaagccatcccataaccggatttcaacttacgaaccaaataagggtcatgttcctcaccattgttctttggtttattcagcaggtaactgcataaaaccggtgtaagggtcagagcaaccacagtggaagcaaaaagtgaaataacgaaagtaatgcccaatggtgccaacatcctgccttccattccggaaaggaagaaaagaggaacaaaactggctacaataatcagagtggagtttaagataggcatacgtacttccttggaggcctcaaagacaactgtcagaacatttttttgttcctctttaggtttttgcctgttctcccgcaagcgtttgaatacattctccacatccacaattgcatcatccactaaagaaccgatagctatggcaatacctcccaaactcatcgtattgatggtaagccccaaagtcttcaaagtaagaatagctacaataaccgaaagcggtatggtaatcaatgaaataacggtagtacgtatattcatcaggaataagagcagtacaataattacaaagataccgccttcatataaagacttctgaacattatcaatcgaattattaataaaacgggattgacggaaaatatcggtagtaaccttcacatctttaggtaataccttttgcaaatcctccaaagacttatccaacttaccggtcagatcaagggtacttgtgttgggttgcttggtgacagtcaacaatataccggctttaccgcgttcggaagccagtcccatcttgggagccttagcaccgattttaacctcagcaatattctccagtgtaatgggtacttcatcaacattcttaattacagccttacgaagggcctccaccttattagtggataatacgccacgaacaataaattcatttccaaattcatacaaaacaccaccggcggcattctgattcatatctttcactacgtctatgacctcgttcaagccgattccataatgtttcatcttacccggatcaagtaatatctggtactctttaatatcaccccctaaaactgttacctgggctacaccgccagtagacaacaaacggggacggatagtccagtctgccatcgttcgcaaatcctgtagggatacactatcggaggtcaaaccgataataagcaactctcccagaatggaggactgtggacctaaggttggcttacccacattggaaggcaaggcgtcacccaacacagccaacttctcggagactatctgacgggcacgataaatatccgtaccccaattaaattcgacccatacaatagaaaaacctgtagtagaagaagaacgcacacgacgtacgtcagtggcaccatttacagcggtttctaccggaaaagtcaccagacgctccacctcttcaggagccatccctttagcctccgtcatcacaacaacagtaggggcattcagatccgggaaaacatccacttccatattcacagcagtataagttcccgcaataatcaataatagagcccctatcagaacaacaatacggttgttcagagagaattttataattttattcaacatgatttcttccttttataattaatgactatgcccttcgggcaacaccgatgaactagaagccagctttacctgataagcacctttaacgaccactctctcaccccctttcaagccagaaagtattctcacgtttttaccgtcactctctccgataccgacttcacgcttcacgaactcctcctctgctatttgcaggtagacaaaatagataccctgttcttccgtcaatgcagtaacaggaatagaaaatacgttattttggggagtggtgagcaggtatacctctacataagaaccgggaatgaaatcaccgatattatcgaactcaaaagtaatcgggatatagaaagaagattcagcagcggctttgccaaaggataataaacgcccgtgaagatcttccaacctataaaccttgttattgtaggataccatgaagttggctcccctgattttcttaagttcattgaaatagttttctgaaacatcggctcgcagttgcaatctccggttcttggaaattgtagcaacaggctgtccgacagtcacgtattccccctgactcaccagcctgtttttgacatatccactgatgggagaagtaacttttaccccggaaacagttacattggcagcttgggcttcataagcagttctggcattttcatatttcatacgagtctgttcgaactctttagcggaaataatcttatcctttaccagaccttctgcacgctgatactctttcaaggcagtttcataggcaatcttggcttttgccaccggatctccttcataaagatttttagctgaaatggttacaatagtacttcccacaccaacagttgctccttcgatgatgttttgtccgggaaaagatacgacaccattggtcgtggcgacaatagtttcttcatctccttgggctgcctgtatctgtccgctggttctgattacctgtgtaaaagatccgggtaccacattatatatctccaacccgatagcttccgcctgttgccgagtgaaaatgatttcgtcctcatgtcccttgccggagttctctatttcactatggttgtctccatcactttcccgatgatcatgaccgtcgtcattccggtgaacctctgaggaagaggccgagcgggtgtcactctgtttcgaatcgcaagatatcagggagattgaagtggccgcagccagtataataaatatatatattttcatttttgttatattttaaagttgaattgaaaaggaaggacaaccttgccaaccattgtaaaacaacgcaaagacaaggctactcccccatttttttgtttgagagtttcctctgtaatacagaatagtgccaataaacaacacgaatactgagaatacccattccggcatctgcaagcatatcaccgaactaataatcgttgcccccaagaagccctgttcaggcagcaatggtctatctgaaagggaaaatatcgtctatccaaaatttcgatttcacattgattaacaacctcatattttgttccataattgattagccaagaaagttttaaccgtgtcataaacagtcagagcacatatccctgtcattaccgattctggttcgtttgggctttctcccaaagtggtgaaatttaattatcaaaagataaatattggaggtaactgattacagttaccggaaagaatagcagatattacagtattataaaccctgcaataaatacttaagagaaaaaatagggaggagcacgcaatccgctgctctcacccagcactacggacgtataagagacaacatacctatcgtatgtgttttcagggattggtatatcgaaatgaatagtcagaatgtcagcaaacagatatagaaccggcaagtggatattcatcaggcttccatcatgcagattacttttatcaacgctggaaggaaaaatataaccagcttgtgatacacaggtgttttcattatgtgcatcttgccccgcctcatgatccgtatgcccatcattgtagatatcgtcttgttcacataattccatcaccgtacacatcatctctttatgatggtgatgcggaatagcggaaagcactattaagaatagtgtcgctatggcaagtggatatacgaaaaagatacgcttcatctgtttggtttttactttcgggacaaaaatagagtatatttcttgcaaccaagttgcaaacatgttacaatgttatttttctcaattttttgttctaacccccatttgttatagaacctattattttaacttcacaaacagattcatattaatatatcaagttactcaaaggccatttggtggtaagttttcttttactcatggaatctaattcagttttcagaagtgtaaaccctcgtttatagttgacaaaaaagcaagtatcccagctttctcctgaagaatccatccgtgaagtgaagaagcgtattttatactaaaccagctgaaaatcaatatctttaaaaagtaagatttctgtcttcaaaagctttgttttaacacagagttaaagcttgttctttggatgtgaataagaagttctttaaatgcaaaagacttgttatttgcgcacaagaacctgacaacctgcaaaaggcgttaacaatgttaattgaaaaaaggtacaaggatgaagataccggttcagacggcgtaaactcacttccgaaacttaagttatcttattcagcctgtgtctattttttcttataaaagcaaacaaaaagaacaattatcaacttgaaaataaagaaataaagaatttaccaccaaatttaaagaagaaccgaaaaatagacaatcaacactttttcatccccgaaaggttcgacaggttcttccggtttttcaaccggagatgtacttggcaaatccgtttagggttcacctgcggaacagcccgtaacggacaacacaagccatacaaagaaaaataagagtttcgttttcatatctgctatttttaagttattcctttgatacaaaggtaaaagcaaagccccgcaacgtctttgctgcgaggctcaattgttttgtcaggaagttcactaccttttttcttgattattcagtaccggactgaatgtgacttgattcacttatctgtttcttcactccattgtttaccgaaactcgtctgttccgtttccacacacccacgatgtccgtgtaccttacattcatccaacgctgattgtagctgccggaattcatcatcggaaagcgtgacattccaagctcccagattctccagaatcctttcctgattcttggaaccgggaataggtacgacattgggatatttatggagcatccacgcaagcgatatctgggcgttggtagcatgtttctccacagcgaaccgatgcagcaaatcgagtatgggctggttggcctcgatattctctttcgataattgggggacgaatttccgcacgtcatcgaagccgaactgatcctgtggcgttaccttgcccgaaaggaatccgcttgcaatcggcgagaacggtacgactccgattcctttttcaaggcataccggaaaaatctccgtttcgcaatcgcgttccaccatcgaatagatgttctggacggcggataatggagtaatcttatgtgccgcccgtatctggtcggccgatacttgcgacaatccccaaccacgtatcagtccttcctgaataagccgtcccatgacggttgccacatcctcaagccggactgcctcactgatacggtgcaggtaatacaggtcgatataatccgtacgaagtctgctcatggaatcttcaagatgccggcgtacctcccggtagagattcgtctcgtccggtttcgagagttcaccaatatgaaatttggtggcgagcaccaccttcttacggaacggttcaatcgccttacccaccaattcctcgttatgtccggcgtagaattgttctttgccataggcttccgccgtatcgaaatgcgtgcagccgtagtcgtatgccccgcggatggcttctatggcatacgcttcgggtggcacttgcccgtaaccgtggctgaatcccatacatcccattcctatcggagatacttccagctgtcctaatttccttttatccatactattatttttttagagtgagattattattgaattactttatttccttatttttaaccacttcccataagtcagcatccgccagccccattctagaggcccaaagcggaaataggagagccataaggcactgaatgccacctggacaagaaagacgtagaaagctatggattctgttcctgtcaatccaatgccggcccccagtccgaagccgataccgtagaagagaaccatgccccataccgactgtcccacgtaattagtcagtgccattctccccggagcggcaagacagcgccacaagcgccactctctaccatgcaggtacaggagacagatagcggaaacgtatgcaaaacctaaaggatagacacttgccgtatagatggcggtgtgtgcagtcgttccgaaaggatgcccgtttaccgcactccaggcatagagaacggataggggaagtcccagcagaaaaccgtatgtcaccgtttttttcagtagtacccgattggcctcaagatcggcgtatatttgctttcgtccgatgtagaagcccaataagaacaatcccaataccttaaaatagcgattgccgtcgataaattcctgcaagcgcacccatgcaccttgtaccaggaattgaaagacccctccgtagttttccgcgtcgcgtagccagattccgaagttatattccgttataccatataaattgcaatagtgctgttgcattcgcactgcgggagccgaccggtacactccgaatgtaccggccaaccaatcaatcagaataggaagtagcaataagacagcggaagtccccagcaacactctgtccgaaacatgccggaaaagagggagcaacatgcccaataaggcatacaacaacaagatgtccccactccagataaacatcagatgcagaaaaccaatggcggccagaacaatcatccgccggtaaaagatacggaatccgtccgttccctttttggccgcgttgctgataatgattgaaaatccgataccgaacagcagcgagaatatggtgtagaacttaccatccacgaaaaggtattgaagaaagcgaattaccttatctatttccgccgtaggcatagcctccgtagtttccggtttttgaaaagtgtaaagcgagaattccggaaagttggcaaagcagattcccagcaatgcaaatcctcttagagcatcgaggatgacatggcgttccgaggccttcacgggtgccatgtcttttatgtctatttccttattcattgattctttcttttaccggattctcacaagcatgagtggagaaaattcctaccaaattttactaaaattttaaagcctatttctcctttaaggcattcttaaagaaagcatctatcttgtcgaacggaatcacgttgagattatcgtataaatcgacatggttggctccgggtataatcaacagttccttgttactacccgtcagccgtttgtaggcatcctcgctgaaatagcgggaatgagctttttctccatgaatcatcaacacggcactgcggatttcgctgatataggtgagcagtggcatattgatgaatgacaatacgctggttttcgtgattccctcgttggagttcggtgaacggcgatggtagcctcgttccgtcttgtagtagtcgtgatactccttgacgaattgcggagtatcgtccgttacggggtcaagtacgccaccgtcgcgtacatagctgtcatcacgataatcctcagtacgctgtgcgttgagttgttcgcgcaatttgtaacggtcatcggagctcatggcgtcgaaatacccgttggcatttacccggctcatatcatacatagtggatgttaccgtcgctttgatacgagggtcattggccgcagcattaagtgcaaacccgccccaaccgcagatacctaagattccgatacgttccggatcgacgtccgcacgggatgtcagataatcgactgccgcgctgaaatcctccgtactgatttcgggtgacgtaagatagcgaggtgtaccaccactttcgccgtaataggagggatcgaaagcaatggtcagaaagcctcgttcggcaagtgtctgggcataacggcctgacacttgttctttcaccgcaccgtaagggccactgacggcaatggctgccagacgtccttgcgtatttttcggcttgtaaaggtctgcggcaagcgtgatgccgtaacggttgtgaaacgtgattttcgtatgttccaccttatcgctctgcggaaaggtcttatcccattcctgcgtcaatttcaatgcttccatatcggttgaatttatatattttgctgttgtcgtttcttgtgccatgacattctcaaagatcaggaacgtcaatatggcgattgcttgtaacttcatagccgtattattttattttatagcggagccagacaatatctgtttcccattgttccacactctctaatttcagcttgtacgggttacattccatacgggaaattccatcgaaaaccgccgtctgtcccttgcgaccatcaatacccggagctaccataatacttacttcgtcaatcagtccggcctccaggaaaccgccacagatatgccctcccccgacaatcgccaagcgttcgacgccgaaatgttcgtgaagcagctccatcgctcccggcaagtcaatgcgttccgcaccggcggcaatccacgaaatacccaatgtgcgcagcgtttccagatattcctcggacacccgttcactgacaatacaaagtagaggatacccgtcagcttccccctcctgccagcgcagtttcccataggtatcgacaatgatcgtatattcgtccgatttactggcgacatatacggatttatgacctattgaagttccctccatgggggtactttcccctttgacggcggaacattcgagtgcggtagttattcgtcctgacagtttcgagcaaggccccagtttttccaaggctatgtaatattcatccgtactcagttgcccgaccatcgggcagtcgatgcggccatcgaccgaagtcatcatgtgactgattatatatggtctcatattcttggtttttatttataatgcaaaagtaaggcagcttctccactctgccggtagacaaattacggattatactaccttatttactgattctttatcggcctacctgacgttgctgttccgcattgtaccggtctcccacaacgggaatagcagccacggcatcctctaactctttccactccccggagctgatgttgaagtcgagtgtgcgcaggttttcctccagatgagacagttttgtcgttcccggaatcggtacgatccacggtgctttctgaagcaaccagccaagagccacctgtgccgaggtcatgctccgtgtacgaccaaaagcttgcagcgcatttacaatgcgggtattcgcacgcatcgcttccggctggaaacgcggcaaggtctgacggttgtcgttgtttacatcgaagaccgtatattcgttgatgcaacctcccaaaaaaccacggttaatcggactatacggtacaaagccgatacccaactcccggcatacattgagaacgccgttttcttccaccaggcggtgcatcagatggtactcgctttggatagctgtcagcggacaaatggcgtgggccttacggattgtttcggcactgacctcgcacataccccagcgttgcactttaccttccttgatcaagtcggcaatggtagccgccacctcctcggccggggtgttcgggtctgcacgatgctggtagaacatcggcagtgattcgagtctcaatcggcgaagcgactcctcgcaatagcggcggatggttgccggacggctgtcctgacgaccggttcctttgccgtcgatgacttcatgcccgaatttagtcgttacgttaatccgtcccttgaattcggacagcgcttctcctgccaggttctcattggtcaatggtccataaatgatagccgtatcgaagagcgttacaccgcgatccaccgcttcatgcaacaatcggatacactctttcttatccgggtgttggctgcggttgtaagtcatgcccatcacgccgaagccgagtgctgacacctcgaaggcagccttacccgtacccaatacacgatgtcccttgatatgggctgcatcggtatccacatcggatgtttccgtttgtttcgcttctgaagcgaatactttgcccaatcccgaaggcatggccattgcagctcctgccaatgcagccgtcttaagaaatccacgacggctgatatccattttattgttttcttccatgattttatgttttatgcattataacttaatggatggaaaatgccccgtccactaaaagggcgtacccgtctacgaaacttgcctgcggtgagcaaagccacaatacggcattggctatctcttccggcttaccgagacgtccggcaggaatatcacgaaccagttccttttccagatcagggttacgccgtatcagttcttcggccataggtgttcggatcacacccggacagacggcattgatacggattccttttgccgagtagtcgatggcagccgtacgggtcagaccgattaccgcatgcttgcaggcgatataggccgcttgtccggggaatcccgtaacgccgccttgcgatgaggtattgacaatagcaccaccgccttgttgcagcatctggataatctcgtaacgcatgcagttccagacacctttcagatcgacagctaccgtacggtcgaactcctcgtcggtaatctcggccatcggtcgttgcggggtctgtatcccggcattgttcaatgcagcgtccagtctgccgtaagtcgcaacggtccagtcgatcatctcctttacagcccgcgtgtcggacacatcgcagcgatatgccacagctttatacccttctgaaaccaacttcccggcttgttctttcggttcattgatgtccaccaatactacggttgcacctacttttgcaaatgcttctgccgaggccagcccgatacctgccgctgcacccgttaccattgctaccttttcattcattgtttccatgattcttttgttttaatgttctgatgcaaagttacgaagagagtcccgcaacaattttgctgcaaagctcattctgctttgttataaagttcaatttgttaaaataataccattggatattttacaatataaatttccttccagatccatatattattccctctgtttgaatacgattctgtttttgcaccacagtagaagtcttttgtattcccacgcaaacaatatgtttagaaatgtataccccaaaatagatagacaagggaagtcttggtttattccgagcatacatgatccggtaacagaagcagccaaagtttgtcggcatgcctcttcataaactcccgaaattttaaggagacctcttttttctcatatttcatgaccagaccccatatccactttgaaaaatgaataccggtactccataatgcccatagtgggaaatcaaatccaggaataaaccggaatcaaattcaaggaaactatctataagctccttatttctttcaggataatatacatgctgattttcaagtacgacatttgaaaaccagtgaatataattatgcaaaataataatcaatatggatatacctcttagcacgagggtatcatccaaggtcatttggtattttctcattaatcataaattcccttttttcatgtttgagataaataagcatcacgccacgtcagggctgtaacataataatggcagtattgtaaccagggatataccggatagtaaagagtcgatggctggtaaaaagaccgcaatcgaaaatctgactttccggtcatgaccacacgctacaatcagtgtaaagagatgaaatggcagccaggtcttccgttttcaggtgagatgaaaacactggagtaaaagtaaattgcctgaaacggataacgagactgccatataaattcggtggctactatggctatttaaacctgggaacgatataaattcgtccggtataatctcatcgatactgccggtcagaatagccctcctcaccggaattcttgatactcgctatatgtccaatttagacctgcaaaattggaatattcaaatgcaagaactgcatttccaattggaggttgcgaaatccggaccaacggctattctcctccatagtccgtgttgctgattgttcccatattttttgaatccataacgatttgctttaatgttccggtgcaaaattacgaattgagccccgcaacaacttagctgcgaggctcaacgttctttgtcaggaagttcattttgttaaaaaaggaacaggatgtattttatggactatttcaataggttatgggactaccgatgataccatgtattacatgcaggctgctgtcctttgttactgcttgttcgatgcggtggatcggttcgtcccatgcgtgacgggacagtgaaaatttgctgttgtgcaccggaaggactttagccgcatccagttcgtgaacctctaccggaagctgttcgggcatcgtatgtatataccgccagtcttcgttgtattgcccgttttcgaggatggcaaggtcgatatgcggaaaccgtttgccgatttccgagaaatgagcgccgtagccgctatcaccgccaatatagaccgtagagtgcccttcgagcatgaatgaagcccacaacgagggattctgccgaaggaaccggcctgaaaaatggcgggcaggcaaacacgtaatccgaaagccgggttcggaggtatatacttcattccagtccatttcgacaatcttctctgcagaatatccccagtattcaagatgttcccccacaccgagcggacagatgactttgtccactttgtcgcgtatcgctttcacagtcccgtaatcgaggtggtcgtaatggtcgtgcgtgatgataaggtaatccacctccgggatgtcttccggcgagtaaatgtccgtccccttgaaaggcttcatcataagagaggccgggaaccccgtcgtcagcaccggatcgaccaatattttcttaccgccgttaatcagcaggtaagacgagtggccgaaccatacgacggcatctttcgacaggtccaattgtttcaggtcggtcttgaccgcatggatgctttcggacggaacaagattgtccggtttcttttccgtcaggttgtcccacatgatccgccaccggcttttatcggtggtcataaacggagtcggttcctgatttacgaattgcccctttttgtagttcggagaacgttcgatccgtaccagtcgttctccacgaggagtacggccgaaagccggatggttcaaaacgataataacggtaagaaccaatactataaaaatggatatacatataatcattttctgtttcatccaatcatggttttatcttacgaataaatttggcgggattgcccgcgacaagggtatttggctctacatcatgcatgacaacactgccggctccgaccacagcattctcaccgatggtaatgcctcccgccgatatcatcagacagcccggcatgacaatcacattacgtccgaacttcacgttagcggtacggacacccgaaaacggtgtttcgatacggcaattctctccgagatgcggaaaaaccttgtgcaataattcacgatattcctccgtatccggcatcgtatgattcaaccggaagatattttgccgtaactcttttgttactaccagttcttcttccgtctggtacaggcagcctattctgaattcttccatatcatttataataaataataaacagacagactccttgtccgaaaatccgtccgcgattatattcctcgtatattctacaatgatgcttcaagtatttcgtaaatgtccttttccgtaagcggagcaaaccgtaaatatccacactgaacttcacaaaacgttccagcgtgtggtcgttgaggatatgtcgcatccatctcggtgtgatgatggcgagccctttcccgaaaatcaaacgggtcggagtataatatgcgaaattttccatatctgtcgtttttagagtttttcaataatctgcttcgaccatccggcgacgtttgccgtaccactgttgaacagtcggccttcttcccattcgattttgggatagagtttcttgagttgtttcacgctacccgtgattgaactgccacccgaagtggcaaaaggaataacggttttacccgcgaaatcatatttctcaagaaaggtattgaccggacgcggacacaagtcccaccatagcggataaccgaggaacaccacatcgtaatctttcagatcaatcgtttctccacccaatgcaggacgtgatttttcgtctgtcatctccaccgaactgcggctcgctttgtcgttccagtcaagatccgacgaagtgtaggccgtagccggagtaatccggtaaagtttaccgccagtctcttttgcgatagcggttgccactttctctgtcgtccccgtgcaggagaaataggctacaaggattttcttgtcggacggcctgtcggtatccgcagtctgtttttgtgctttcgacgggcaactgaaagtaagcaggctcataaatatcaatactaactgtttcatgtcattttaatttagaatattcttcatcaccgacaggttccagccattcggtactgttgttctcaccgggcacttcgatggctaaatgcgaaaaccagctgtcgggagccgccccgtgccaatgtttcacgcctgccggaatattgatagcatccccgggacgcagttccaccggctctttgccccattcctgatagtagccgcgaccgcccacgcatacgaatgtctgaccgccgcctttcgttgccttgtgcacgtgccagttgttgcggcagcccggctcgaaggtcacatttaccacggggactccgtccgttaccacgggagccgtgtaactttgaccgatgaaatacttggcataggcatcgttgggtttccccacggggaaaatgatggtttgcgcgtacgcttcgagtgaacctgccgccacgctgtcggcattaccgtcggtccaaacttcttttgccatacggaaagccgcccacgctttcggccagcccgcgtagaatgcggcatgggtgagtatttcggctatctcggttcgggtcactccgttcttcttcgccgattcgagatggtatttgaacgaggaatcggtcagtccctgcgacatcagggccactacggttacgatggaacgatcgcggagcgaaagcagatcgttccggctccacacttccccgaaaagaatatcatcgttcaaacgtgcaaattcgggggcaaattcgccgagcgcgtcgcgtccggcagtctgttgaatttttacttgtgattttgccatgatcggaaaaattaaagtcaataataaagctaatgatgctacttttgttttcatacgatatgatttttagttcgacatttccaagacaaccgacaggtctttcctgtttccgatacaaaagtacgggcattattccacaacaactttgctgcaaggctcaaactgttttgtcctgaagttcatcttaccatgaaggagcgacaccataagcctccttgtatatcttggagaaatgcgacaggttcttgaaacccacatcgaagcaggcttccgtcactttcttcttgcctgattttatcaggccgtgcgcgacttccagacggcgtttgataatccacttttgcggtgtcaggttacttactttggcaaaatcccgcttgaaggtagccaggctgcgtcctgtgtaactggcgatttcctccagagagagatcgcacatgtagttctcgttcaggtagtcgagaatgtcgattttccacggctccacaaagtcgaacagcgaagcataaagattccggtcagtattaagcagtacatatatcccttctaccattttcagcttcagtacgtcttcggacggtttttcgcctgcatcgaaatagggaatgacggattcgaacagcgaacggatatcaagcctgttactgggcaacacacgcaggcttgccttctcacgttcggaatcgttcggaatctgttgccggttaagcgtctggtaaaattctcttagaaacggtcttgagaacttcaatacgacagaacggtagggtttgccatcctctacctttttctgcaaccacatccggttatcgcgccgcatgaaagcacaatcccccggatgcaacacggttttcttgccacgctcctctatctccagctcaccggagcatagataaataagcgtatgctccctgttttcgtgggcgcatccccggtcatcggtgaaataactcgctataagcacgttcgagcaatcgaatacatctaatcgttccatattgtcagtctttaattttcgcaaatataacgcattccaaccataaagtttttgttgtaaggctcaaatttgcaaaacggataaaatatttttgtactcttgacctcgtatggcagctgttaccttacagattacagtacaacacattacggtttcaacgggccataaaaatacgatgccgtagcaccaccatcgatcagaaagtccgcccccgtgataaatgcccctctgtcgctcataagtagttcggcaacattggcaacctcgtccgcggttccggggcgtcctgccggacatttggcgaacatgtttttgtaaaaatcacctcgcggcccattgaactcgtcgatagccaagggggttacgatgatacccggtgaaatggagttgattcttgccccgcgctcgccccatttcacagcttcggccattacacgtttcacgttacaacgcttggccatctgataggcatgtaacgtatcctcgatactatccggttgcagcatgtcgagcgagagcaattcttcggtaggagtcgtagccagtagcatatcctcctcgatggtcagtgcgggcatccgatgccctgactggctggaaatcgttaccccgacaccgtcctctttaataaccttcccaacttcttcgagcaggacagccgttccgtacagatcgactttcagaatcgtttcgatggaagcctgactcggtgatacgcccgccgcattgacgagcattgaaatttcaccatgttttcgtgcaaccgcaatcaagtccaaaatggactctcttgaggagagattcatttcgacgggtactgcatcaaatcccgcctcattcaatatacggcaaacagcctcggtactctccgggttcagatctccgacaacgatctttttcccatatccgatacggcgggctatcgccattcctatctgaccggctccggtcaatatcattacatctttcttcatattactcatttttatttgctaaacagtttaagggcgttgtcatgcaggattttttccgcaaaaggtgtgagctcggcatcatcggttatccacgttcgcaattgtttcaaatttcctgtcagaactgttgccggctggtatggataatccgagccataaagcaaccggtcgggggtggttatggtcagcagagccttaacaacttcaggtgttgcacctcctgcaaagtcataatagaacgccttcagattggcatcccagtcaatcggttccataagccctttcgccgccatgaccggatataccgccttcatgcgcggaagggccggcggcagaaatgaaccgcaatgcggtacgacgaacttcagattcggataccgggccggaacatttctcgcaatcagattgacgacggtacgggtcgtctcggccggatattcgtaaacggctagcggtgctgttgcaatgattccatcgtttacgggcgaaggtttgtgcggatgcagcatcacgacggcatggtgctcgttcagaacttgcatcagcgtatcgagtgccgcatcgcccacatactgtccccggctgttggtagccagcttgatgccgtccgcgccgagcgtgtcgagtacatagaccgcttccttgatagccgcgtccacatcgggcaggggcaatgaagcacagaagaggaatttgccgggataatccgctttcagccgggagcacgtctcgttgtattgcctgaccgcacgacgactctcttccacatcgccgaaccacagttggggagcaggcatcgaaaggacggatgtttcgatacccgcctctttcatgaatttcagatgagaagccacatcccaatccggaagcgggaaagtctcttccaaagttgccccatgcctgtccaacagttccttgaatgtgggaagtatattatgacaatgcacgtctatcgcctgttgccccatagcggcatgtacggacagcatactcaataaaccgatcaaataacacttcatacccattcctcctttcttaaaccatcggcatttcccacgaacctctcgtatcgacaccggtactttcggcagcttcttccaatgccttcatttcgtcggcagtcaagaaaacttttgtcgcttgcaaggcatcctgcacttgcgagggtttcgtcacgccgataatcggtgtcgtgcctttcgctatcgcccacgccagagcgacttgtgccggtgtgataccatatttattgccgactgtgcgcatcacggcaacaagtttctcaatttgcggcaacaacggattgtagttttccccacgctggctaccggcgggtaacggctgcgcggtatcgtatttcccgctcaacgctccttgctccaataccatgtaagcccagaagtcgataccgttctccttgcaatagtccagaataccggctttctccgaagaacgatacagcaggctgtaatggttctgtacagcaaagatatgtaccccttctttcgagagaatctcctccgcacgcttgatttgcgcaaggttgtgattagatacaccaatccgttttaccttgccgctttttaccaacgggataagataaggcgtccatttctccatgtcggccggattgtgtatccagtagatgtcgatgtaatcggtggcgaaacgatcgaggcttcctgccagcatatccgctaccgggttctccgaatcgccagcaatctgcggtgtgaacttggtcgagataaacacatcctcccgcttacagttcttcgtaaatgcagaaagtagcgtttccgaagctcccatgccatacaccacggcggaatcccagaggttcagcccgttggccatcgcctcgtcgaatacgggtttcagttcttccactccgagattgttcccgaatacccggtcgcctccggcgaatcccgtaccccacgaccatgttcctaatgctattgatggtaatttttccatatccaatttcttttttcgttattcaatttctaattcacattgcaaaattacacggttcaaaatgatccgcttgtagacgatttacggatatttatacccaaatactcgattccaatcttttaactgtattccaatacacgcgccatcctttccagtccgtcggcaagtaacgcacgggggcaggcgatattcaggcggatgaacccttcgccgccggggccgtacatcgtgccggaattgaccatcagtttctgctgctcttgcaggcgcagggtcgtggcgtccgaaccgataccgagtgcccggcagtctatccagaccaaataagttccttcgagcggcaatacgggatattgcagcagcctttcggcgaaaaaatggcatagatattcataattccctcgcaggtattttcgcaaagcatcgagccactcgccaccctcgttgtaagcggctatcgtagcgatcacgccgaacgggttgacgtcgcacacctcattgatattgatggcacggtcgatacgacgacgtacatcatcatcggccgcaatgatgttggcgatttgcagtccggcaaggttgaacgccttgctcggtgaaacgcaagtgatggagttttgctggaagcgttcggagagggaggcaaaaggcgtatagtcgtgtccctcgtaggtcagttcgcaatgaatttcatctgccacaacaaacactccgttgcgcaaacagatgtcgccgatatgccgcagttcttccggtgtccagacccgcccgaccggattatgaggattacatagtaacaggattttcgccttcggatcagccgctttcgctgcgaggtcgtcgaagtctatcatatagcgaccgtcccgataaattagattattggccgatagctcgcatccgtcgttgcgaatcgacgaatagaagcagttgtatgccggagtttggacaattactttatcgcccggtgcggtcagggctttgataatggccgacagagccggtacgacaccgcttgtatagataatccaccggggatctatctgccagcgatgacggctctcgaaccaccggacgaccgcatcgtaataggtttcgggtactttggtataaccgaaaataccgtgtgcaacccgcctttgtaaggcttctacaatggcgggtgccgtacggaaatccatatccgctacccacataggtagcacatttttctctttgggagtatcccatttgtaggagttcgtcccgcgacgcaggacaatcgtatcgaaatcgtatttcataacttatctatttattcgtaatttataaatccagttactgccccaaagtctcgcgaggaagattactccccggaaacaaagctcgatgcacatggcaagccacacgccgcgtagtcccatcgtgggagcgagccatgccgccagtgtcagtcgcacgccccaaatgctgccgaagttcatcagactgggtacgaatgtattacccacacccacgaatataccgtaggctacgatagacgccgcgaacatcggctccgcaaaggcttctatccgcagaatctcgattcccaacgtgcggatttcctccacgggagtcatcactcctatgatttgcggagccgccatatacatcagcgttcccatgacacccataatcagcattcccgaccagacggtaatattggcaaaacgacggagcaaccggatacggtttgctccgaggctctggccgaccaacgtcgtggcagcctccgagataccgtagccgggcatatagcagagactttcggcagtgatggcgaacgagttggcggcaatggcaatgataccaagtggtgcgacaatcaccgtcgttgcgatctgcgctccacaaatggccatgtgctcgaatcccatcggcagggagatgcggaaagccttactcagtgtctctttccgaggcaggaaacttccccgttctccggacagtctcagcatgggcgagcgacggcaaagataccacatcatcccgccggcagtgatgagttcggccagcaccgttcccaatattgcgccttccacgcccaagcctgcgccgggagtggtaaatgtcactccgaaccattccacctgcctcgaagggaaaatcaggaagaagttgaacacgatatccagaagacacatcagcacgttcagcatacagggcacacgcatatttccactgcatcgcaacatgccacccgcaaggaaattcaactgcaaggcaggaaggaaaagtgcgaatatccaaaagtagagggatgaatcgctccgtattacttcatcaccgcccaaccagccgggaagcataccactgatggaaatgccgacagccgccaacaatgagctgaaaaccaatgtggcagcaatcgactggcggagtatctttcgggctcccacaaaatccccggctccgatcttatgcgctacttgaacggagaagcccgttgcggcggctgcacacagctcccaaaacagccatgtcgtggtcgagaccagcccgatagaggcagcgacatttgcgcccaggctgcccaccatcgaggcatcgatatactgcatggcgatggaagatatctgtgccataatggcagggacactgaggtatgcagtcaggcgcaactgttgccccagtgtcatctgcttcccttcgcggataagcgatagcaggtaatctgtctttccctttcctgttcccatcaggttatgtacaagggcattagtctgtgaaacaagttttctcgtcccagagtttcagcttgcaatcggcgggagccttgatattctcgtcgaggataatctccccgtagctctcggcggtgatacagcccgttcgcggattcttcaccccacctattgcgcctttgatggtcgcctgcaccgaactgtactcgaaagcccggtcgcagtcggggccgaacgtacaattttccaatacgaggtcgtgggcgtagcagagcggctgctcgccggtaatgtgacagtttaccaaccgaaggttgtgcgaatgccagcccaagtattcaccgttgagttctgaatcgtagattgtcacattctccacttcccaaaaggcatctttcgtggtgattttggcattgcgcagttccacattcttcacgtactggaatacgtacttactgtcactctccaatccgtctatacggatattgctgctgaacatgaacggataagtgccgccatgcagtttcagatttttgatgtccaaattcttgcaacgccagaacacttcgtcggcatcttttatctctacgttctcaatttcgatgtcgtgcatctcgcggaacatcttgggggcgtcgatgcgtgtgttcgtcattttcagattatcggagtaccacagagccgaacgcccgccgacatcgaagaaacaacggtcgataacgaaaccgtgcacgtgccagaagggataatttccctcgaaccggcaatcaacggcttcgatgttgctgcattccttgatggctgattctccggcacggataattacattctccaaacgtaagtcatgtgattcgaacaaaggtctttcacctccgaattctgcatttgatattactttcatactttccttatttttaattattattcatattcaacttgtaacaacgcaaaagtacgaagcaccctccataacaactttgcttcaaggctcaaactactttgttctgaagttcaccttgtaatggtgaggtaatattttatctctctgatgcaaaaatagatggtatctgccacatgctttgtagacgaattcccggtattcatacccaaattacggattatgcttgttgcctattccttcacaaattgcctaaagcctaatataactttgttttaacgtgtagtagtggattatattattccgataccggctctttggtccaaacgattgaatgaagttaccaattgaccgaagaagaaacaaaatctggattttggggattcccgataaggggctgtcctttgtcaagggcccgcagtatctccatttcgttatcgaacatttcgagattttccttcatacgttcgatgtgtgtcgtttttgggataataaccatacccgactggatctgaaagcgcaataccacttggcgtaccgtcttgtgatagcggtcgatgatatactgcaatacttcgtcatcgtagatttcattgatcttaccctgtcccaacggggccatcactgaacttgaatacctttggcaaaagtgttgcccacgacctcctgatgttccatgtagggatgaatcttgatctggttgacgacaggcttgatacgagcgtatgccagcaattcgtccacgtgatgcggattgaagttgctcaccccgatggcacggatcttccccatatcgacatacttttccatgattctccatctctccttgacctttctggctaccggccaatgaatcagcatcaggtcaacatacgttcccccgaatgcttcaatagtccggtcgagcgactcgcgtacctttccgctacgtacggcatcgggagagactttcgaaataatgaacacttcactccggccgataccgctttccttgattccgtaccacacttcggcctcgttgtcgtagccttgcgccgcatcgaccaaacggtatcccagtccgatggcgcgtttcacacactctgcggcagtctccttgagagtagacgtgccgacacccaactgcggcatctctatcccgttgttcagcacgacacggagaatggcaggcagtgtatcggccgtttgagctgtttgtccgttgttggaagttctgccccacaacctgtcagtatggttcctgtcaggaaacacttttgtaggacatgccaaccagtatcctttagtcagcgtgatagattacgataccgtcacgcccatcttgcatacgcacagccaattttcagtctatgcactttataaagggatgggcgttactcttctctccggacttgttgcatggaactctgttgggtaatcacatcaaagacttctctttcttttcttatcagtccaatgaagccggagagcacatccgttgtcatatcatcaatatggccaaaagtaaacttatcaacggagaacaaatcacgtagaccgcttatgacttggggttcgaatacccgcaacatttaagtcgtatattcaaaaaacagaccggacagactctctcggaatacagtagagatataagggaacgaaagttccgataaccttatcgattaccggaacttcagaaaaatcgagaaaatgtctgtcatgcaggacactcaataccatagagtcgctgtacttcttccggagcgcgtaggtcgagaatcgtattgtatcccgtattcatggaagcaattgcggccatatcctccggtgtcagcatgaaatccccgatgttgaaattttcttgcatccgctgccgatgtaccgatttgggaatggcgacaactccgcgctgtaagtgccagcgcagtacgacctgtgctgccgatttatcatatttgcgagcgataccggtcagaatatcgtccgtgaacaatccgttccgtccttcggccaaaggcccccatgcctctgcttgtatgccgagttcctgcatggtccgtatcgcatcggtttgcggagtataaggatgcacctctatctgattgaccgccggaataacattagcattatggcataaatccagcaatctgtccggctcgaaattgcataccccgatagcccgcacacgtcctttcgcataaagtttttccatagcccgccatgctccgtaatagtcgccgaaaggcatgtggatcagatagaggtcgaggtaatccaatcccaaacgggcgagcgaagcgtctaatgcccgcaatgtccgttcataacccatttctgaaatccatgctttggtcgtgatgaacagctcctcacgcggaataccacttttccgaatagccgtaccgaccgcccgttcatttccatagaccgaagcggtgtcgatgagccgatagccgacggcaagcgcatcggtaacaactctttcacactcggtggcatcgggtatctgaaagacaccaaagccttgtatcggcatctttactccgttattcaattctttgaaatccataccataatatcgttataattagtttttcaagatattcaatcatgattgtagatacactccgaatccattccaataacctgaataaaaaacattatctattgcatgaagttattgagtttgttggccggattgagcggtgtctggtcggacaataccaacgatttgaccatatgcaacgttccctgcttgtacttctgaaagtgttccgaagcgatatgctgctcgtatgcttcacggctcgcataggtttcgagaatcgttactttacagggattctccttttcgccgacagcatacatcgtcagtacgcccggttcggtacgcagggagatttcacctacctcggtcgcatagttcatatactcgtcaagatactgcggataaacctctattttcgacagccgtacgataccatcggtcgtcatcggctctttaacgcacatacccggcttatccggattcagacatttgccgatgatctctcctgtcgcaaggtaggagtaggtcggaaactcaaataatacgggttttagtttcgtatagtcgagtttgccatcgctgtcaagcacatcggaagcagcgtatgtattgactatcgcgcaaatgaaattgtcgaaaccgtcggtttcataaatgtccaccacttcacactccatcgtaagtggtgatgcgtctataacgggcgtatcgttctctccgatatggtaagcaaacacctccgacttatcgaccgtcgcaccacttacacttcctacatagtcagctttcggtaacatctcacgactcacaagattgacggaaagtcgttttgattttttaataccttgattggtataatgacttttactcatgctgaccagtatccggtcatggccgatgactcccgtgtgtcctaccacaagccagtttactttcccttcgacctccgccccgacaaccgtcattggtttgggatagagtgccaacagatttccgagatttttcttgtttgtctccattatatcgggttgtgtagtgttctctttcacggcagtgctgcacgacaacatgacaagcagtgacagaacacctaagattatttttaccatgattgatttatttatctatttgactttcggtgaacggatcagcacgatgccccatcaaatcgattttggcatactccttatcaaactcctccatctcccaagctgagagacggaccgttcccgcaccgagcaggtcatccaagtgtgccggattggtcgttccgggtatcggagcaatccacgatttgcgagataacatccatagcaaagcgaattgcgcgagtgtcactcccttgcgctcggcccatttgcgaaccaaggcgataagcggcatattgtgcttcaaagcttcgggcgtgaattgcggcaagttccaacgccggtctccctcgtagaaacggctgttttcattgattatcccggtgagaaacgcacgccccagcggacaataaggcacgaagccgataccgagtttttccaatgtcgggaagattttggtttcaggctcccgccaccaaatggcatactcgctctgcacggcggaaagcgggcagacggcatgcgcccgacggatggaacgggcactcgcttccgacagcccccaatgcagcactttgccctcctgcatcaaatccttgacagttccggccacctcttccatcggcactttcggatcgacacggtgttgatacaagaggtcgatatggtcagtatgcaggcgtttcaaagagccctccaccgcccgacgaatatgatcgggacagctattgatagcagtcggttgtttctcctcgacaccgaagccgaacttcgttccgattttcactttgtcgcgaaacggagcgagtgcttcgccgacccactcttcgctggtgtaagggccataaacctccgccgtatcgaaaaaagtgacacctttgtcgtatgcccggcgaatcagagcgatcatatcctttttgtcgtacttcccaccgtaatatcccaccattggcagacaacccagaccaatagctgatacgtccagctctccgagcttgcgatactccatcgtatcgtccgcatttggcgtatttttatcagataaatttcctgataaagaagagataggggattcggtaaacacacgggaaacacccgttgtagctccggccgcgagtagtgcaaaacttgatgccgtccttaagaaatttctgcgatccataatcttctattttttcattgttcattttctgattgcaaatttaccgcgattgaataagtcggcttgtatacgatttacggatatttatacccgaatcctcgaaatagtgcatgagctcagatttccttcgatacaatatttcagttttctttttaagaagataatggggtttgctcctaatgaatatcggttaataaattaacaaaaagggagggacagtacatgatgacatatcccctaggtatgggtagcagtccggacgctctttagcagggattcaagaaaataccgttctttccttgtatcctgtcatacaaaacaacaaacaaccgatattcttattgttcggatacagaattttcatcagatgctatcagaaatacagactttcccagctacgcaatctgaacacgatatttattaccatttcaatggaacgagcagccttacggacaactaatatataacattcatcaaatcaaatagttataacacatgaatgttacgcatggattggtcgcatgggttactaatagttggtcgcacattatgcacactatttttaaaagtgtagcaaaggtaagaacataaaaaaagcactaatatattgaatatcagtgctaaatatttgttcttaattctcctttgcggtgcgtacgggactcgaacccgtgaccccatgcgtgacaggcatgtattctaaccaactgaactaacgcaccaaaatttcatttctttattactgtctctctcgattgcggttgcaaaggtagctgttttttttatatctgcaatagctgagaaagatttttttcatctttctcattcatttgttgattataagtagattatatctatctttgtgacacaatttataaagcaacaaaaagaaacatgaaagatacacctatcaaacggcatctaattgatgaaactatcgaagaatttcaaattacagatttctcaaaagcaaccattcgtgaagtaaaagccatagcagctaaagcagaaacagcatccggagtcgaatttataaaaatggaaatgggcgtaccgggtctccccccttctactgtaggagtaaaagccgagatagaagcattgcaaaatggaatagccagtttgtatcccgatattaatggactaccagaactaaaatcggaagcctccaaatttataaaagcatttatcgatatagatctcaaaccggaaggttgcgtacctgtcacgggatccatgcaaggtactttcgcatctttccttacctgcagtcaatgcgatgaaaaaaaagatactattctgttcatagatcctggctttccggtccaaaagcagcaattggtggtcatgggacagaagtacgagacatttgatgtatacgattatcgaggagacaaattaaaagaaaaactcgagagctacctgaaaaaaggaaatatttcagctgttatatactcaaatccgaataaccccagctggatctgtttaaaagatgaagaactgaagatcatcggtgaactagccacccaatatgatgtaatcgtccttgaagatttagcttattttgccatggacttccgccaagatctgagtactccgtatcatgcaccttatcagccttcggtggcacactatacagataattatattttgcttatatccggttctaaagccttcagttatgcaggccaacgtattggtgtcagctgtatttctgataaattataccatcgccattatcccggattcgataaacgctacggaggcggtacttttggcactgtatttatccatcgtgtgctttatgccctctcttcggggacgagccattcggcacaattcgccatggcagctatgctgaaagcagcgaacgaaggtaaatacaatttcctgaacgaagtgaggatatatggtgaacgcgcccgtaaattgaaagaaatattcttgcgttacggattccatctggtatacgacaaagatcttgaagatcctgttgccgacggtttctatttcaccataggctatccgggaatgacaagtggagagctggcaaaagagttgatgtattatggggtcagtgcaatttccttggttactacaggtagccaacaacagggactacgtgcatgcacttcctttatcaaagagcaccaatatgctcaactggatgaaagaatgaagttatttgccgaaaatcatcctatatcttaaaaagagcacactaaatcgaaaaaaagaggaatattgtttgttcgtgtaaaataaatctttaaattaggggcatgaacatcaatactgacatatttaagatacaatcgaataatgtaatgccgtcgagaggaaagattctgatatcagagcctttcctccacgatgtaactttcggaaggtcagtagtattgcttgttgatcatactgaagaaggaagtatgggattgattataaataaaccactcccattgatgctcaatgatatcattaaagaatttaaatatatagaagatattccgttacacaaaggaggtcctatcggaactgacactttgttttatctgcatactttacacgaaatacccggaacccttccgatcaacaatggattatatctcaacggagatttcgatgctatcaagaaatacattttacaaggaaaccctataaaaggaaagatacgctttttcctcggatattccggctgggaatgcgaacaactgattcaggaaataaaggagaatacctggattatttcaaaagaagaaaatacctatttaatgaatgaagatataaaaggtatgtggaaggaagccttagggaaattgggcagcaagtatgaaacctggtcccgcttcccgcaagttccttctttaaattaagatcatcgtttgggattcatacattgcacaagcacggcatctttataaccttcgtgtgttaacagccattctttcaatactccacattgggtaaatccacaagaattgaacaatcgcaaactgggttcattatccacagctatatgggcatacaattgttttataaataaaaagttgaaagcatattcacaaagcagtttcaatgcatcggaagcatacccctcctgtctataattgctgtgaacggcaattccgactgcccctcttgaatgtaaaggtacaaaatcagttatatcgaccgtacccaaagtacaattatctttccgacgcataatcatcagccgcaactgtttatcggcaaacatgtcactttgcgatccttcaatatactgtttgagtacaaaacgcgaatagggaactgtaaaactactgatatcccacatagaaggatcattttccatttcgtacataagatccaaatcctccggttccactgcacggagatatattcgctcgttggctaagaaagattgcttcatcatttattctttatcgatatgcagttcggcacgcaatcttttttctcccggaagacagaaaaaagaggctgtcagtcctataagtgcacataacgcacctgtactactaagtgtaaagtagtaaccggccagattaaacaccactacaaattccagtaacgccagccgaacagccccccaaagcatataacggctcagggccaccggaaacgtcagctgatctattttctttgtcagaacaaaactaaatagtttaagagaaagaggtatacagacggcagtcatcaaaatacctactgtttcgaaaacataaacagcccgtacattgtctgcttttattcctacaggcaacacgccggcttctcccaatagcaccaacaataacggaataatccaaaaagaaatatactgtaccttctggcttttcacaatgcgttttatttgctcttccatttatatataatgattatcagttaatggtaagtttccttttaaacggttccggtaaaagtcgtacggttcacaatacttctacccaacgttatctcgtctgtgtattccagctcgtcaccaatggatactccacgggcaagtacgctcaatttgacacccattttctcaagtttacggtaaatataaaaattcgtggtatccccttccatggttgtgcttagagcaagaatcacttcatttattcccccttcggctacccggcgcaccagactttctatctgcagatcgcccggtcctaccccatccatcggtgaaatcaccccccccaaaacatggtacaacccacgatattgttgagtggcctctacggccatcacatcccgtatattctccactacgcagaccatagacgcgtcccgctgcggatttgcacaaatctgacaagtttccgtatcagatatattatgacacaccttgcaatatttcacctcatgctttaaagttataatagaacttccgaaagcttccaccacagaggtatcctgacgcaacaggtgaagcaccagtctcatagctgttttccgtccgatacccggcaatttagaaaactctccgacggccttttcaagtaacgtcgatggatattgttgattcatgtacaaacaagtatatctatttaattatcaataaagtatataccagtaaaaaagttgcaaacctattatagaaaggactccaaccccataaagccactgtatactttatggagtacaaagatacgcatattttataaatggcaaatcagctgttaataaaataggctatttatcggtcatcttgttcattgctcctgctacaacaatacagtcgtctcctgattgttgaacaatcaagtctacatttttgttattatagctaaaaaactaaatttatggacttaaaaaagacaactttctacttatttacgctctttagtttgatgttaatttcctgtagcaacgatgatgaaaacaaaaatgatgcgcaggtaacagttactgtagtcagtgctgatggcaaacctctgcccaacgaaattgtgcaaatgttcgatgaaaagacttatgaagagttcaaaaaagacaatcgaacaactcctacggcatatgcattaactaactccaccggagttgccactttcatttttacttatgataagtggttcgaatcaaacaaagaccgatttttcactttcgctgtccaatatggcagtggtacagaaaattatgaaatatggtctgcaggacgtaccgtacgcccaggttcagttacacaaatcgagttgaaacttaagcctttataaacgaaaaacggttttataagcaaatcgcgggtcatgcccccacagagtgacttataaaaccgcctttttgattttatcttcagtagattcccttttctacaggtatcgcacaactcaggatagaaaccatatttcttaaccagttcttgaaacttattatgctcctccgatttataactattccgaaatgaactgaattccggttcaatcgccctcttgggtattccttcataagttctaagaaagaaaataaaatatatcttatccctaaaaaaataaaacgatgcaaaatatcattattacatttattgccttttttgtactcagattactttccttatcctactccattcgtaacgagaaacgtcttctgaaaagtggagcggtacaatatggtaaagttaattcgctattactgacattagcacatatcgtctactatttttcggccctctatgaagcatacacttcgggaactaccttcaactacttctctgtttgtggtgtttttataatgggctttgcttatgctatgctattctatgtgatctataaactccatgatgtatggacagtaaaactttatatcattcccgatcatcgcattgaaaaaagcttccttttcagaacagtaagacaccccaattactatctgaatatcatacctgaactaattggagttgctttactctgcaatgcctggtatacattactcattggactccctatctacgcttgtttgctcgctatacgtatccgacaagaggaaagggccatgaaagaactattggagaattaagtttctacatttgtatttggaggaaacattttcatcatatatagaactggataggtctcaccacagattacacgtaacacagacaaataatttatttcattgagaattagattaaagaatccgtgtcaatccatgtaatccgtggtgaattcaaaaccactccggaaaaaacattctgtcccaagccggtatttgagctatcctttatccactattattgtttaattttgccgtactaattatcaagcgcttaactatcatgaaaacaatatcaaaaatttgtcacaattcttgtactattaaccggcattgtccctgtctatgccatcatgaacatcgtattcgatcctaatggcgatggaaatctgttaataacactcggcactctgacacctatactgggtggtcttttgatgggatatgctttcaaagacaaatatcaaattttaattagcaatcatcgtttgcaaaataagtgttacctttgcgctcgttatgatgatacttgccactattgtatgctactttgccattctcttgctgatagcccgtatcaccggacggaaaggaggttcgaatgcagcgttttttaaaggagaaaaccagtctccatggtacgtcgttgctttcggaatgattggcgcatctatttcgggagtaacctttgtatccgtaccgggcatggtaaaggcgatggatatgacgtatatgcaaaccgtattcggctttttcttcggttatctggctgtcgcccatatactcctcccactctactataaactcaacctgaccagtatatacacttatttggatacccgtatcggaaagcgtgcctaccgtacaggagcctcttttttccttctttcgcgtatgctgggcacagctgcaaaactataccttgtctgtctgattctatatacctacgtatttcgtgatatgggtatcccattctggagtattgctgccggatcggtagctttagtatggatatacactcacaaaagtggcattaaaacaattgtctggacggatactttacagactttctgcctgatcgccgcactgatcagcatccttgtttttgtcactgcaaagttaaatcttgacttcagcggagttatacaaacaatcagcagcaatgaacacagtcgcatctttgtatttgatgactggatgtcgcgccagaatttcttcaaacagtttctaagtgggatttttattgttattgtcatgaccggactcgatcaggatatgatgcagaaaaacctttcctgccgtagtctgcgtgacgcgcagaagaacatgtattgttatggctttgcattcgctccgctcaacctgctgtttctggggcttggcattttattactggtccttgctcaagagatgcagttggaacttccggctgccggtgacgacatcctgccgctgtttgctacccagggttatctgggcgaaggagtacttatcctatttacaatcggtatcattgccgccgctttcagcaattcggattcagccttaaccgccatgacaacgagcttttgcatcgacttgctcgacacaggcaaagacacagaggaagaagcccgtagaaaacgaaaccgggtacatataggactatccgtcctacttattttctttatctgccttgtcgatgcattgaataaccaaagcgtcatcgatgctatttacatcatagcctcctatacatacggacctcttctgggaatgtttgctttcggattattcacccaacgaaaaacaaacgaccgatgggtgccgtttattgcgatagcttcaccactgatttgttacgcagccgatagatttgcccggcaggaaaccgactatcagttcggatacgaattattgatgttgaacggcatccttacttttgcaggaatatggatcgtatcaaagaaacaactaaaaaatgaattttaaaaccaacaagaaatatggaaataaccaatgctgaatttgtaattagtaatacggacgtgaaaaaatgtccggcaggcactttccccgaatatgcctttatcggccgatccaatgtaggaaaatccagcctcatcaatatgctgaccggacgaaaggggctggccatgacttccgctactcccggtaagaccatgcttatcaatcattttctgatcaacaacagctggtacctggttgacttacccggatacggatatgccagacgaggtcagaaaggacaggaacagatacgcaccatcatcgaagattacatcctcgaacgcgaacagatgaccaatctattcgtattgatagacagccgtctggaaccccagaaaatagatcttgaattcatggaatggctgggtgagaacggcattccttttgccattatcttcaccaaagcagacaaactgaaagggggacgactcaaaataaatatcagcgcttacttgagagaattacggaaacaatgggaagaactccctccctatttcatcacttcatcagaagagcgccttggcaggacagaggtattaaactacatcgagtcaatcaataaagaacttaattcaaaataaaaacaaggatatcaaatgaaaagaaaactattatcatttgcagttcttatcacactactgcttgtaccgaccgtaaaccgtgcacaatctatcaaggacttattcaataaagacaatatctccaaagttgtcaacgctgtcacaggacataccgaaacagtggatatgaccgggacctggcgttataccggctcagccattgagttcgagtctgaaaacctgctgaagaaagccggaggaaccgtcgctgcttccgctgccgaacaaaagctggacgaacagctggccaaagtcggcattaaagaggggcaactgagttttacattcaatgcggacagtactttcgtaagcactttaggcaaacgcaagctgaacggaacatactcttacgatgccggcacccagatgctccacctgaggtatatgaaattaatccccatgaatgcaaaagtcaattataccactcagcagatggatcttctgttcgaagcagacaaattgctgaagctaatcactttcttatccagcaagagcagcagtgccaccctcaaagccatcagttcattggcagatagctatgacggcatgatgctgggatatgaattgaaacgatgaaaggttctgaacgatgaatgatcggcggtgatcattcatcgttcaaaacttttcatcgtctgttctccgtcaggatacaaccatccatcatccgcacaatacggcctgcctcctgggcattttcttcagagtgagttaccatcacgactgtagctccatctttatttaactccttcaataaaagcatcacctcgttgccattggtagaatcgaggttacccgtcggttcgtcagccaatataattttcgggttcgtcacaatagcccgggcaatagccacacgctgttgttgacctccggaaagttgttgaggataatgctccgtacgatggcttatctgcatcctttccaacgctttattcactcgatctacacgctcacgaaccggcacaccggcatatagcaacggtaattctacattctcaaatacagtcagttcatctatcaggttaaagctctgaaatacaaagccgatattgccgttctgcatgtctgtacgatcattttccgagtagcgggaaactacacgacatgaaacaaaaatgggcgaggcaaccccttatattgacagcaacccttttgatctgctgttacaccaccgtgtggttaggcatgcacggtttctatatcagcctgccggtatccgtatgcctcttgctataccagcatgaaaaacatccattcggtattagacagccaggaaaccgaagcctggcagaaactgatccgtgtactgacacacgaaatcatgaattccatcactccggtcacgtctttgtccgaattgctggaacatcagatcgaagactttgacggcaatgaagaagagcgggccgaaatacgccggatgttacaaaccatccgccggcggggcgacgggttaattcggtttgtcaacagttaccgggaagtgtctcacctgccacaacccctgctgaagatatatacatcacaagaattactgacaggtgtggtacggttgatgtacagagaaccgaatgacctgcacctgatacttccgcccaagggccaacgcctgatggcggacaaagatctgattgaacaagtgctgatcaacctgattaaaaacgcccgtgagaacgatgcgaccgacatccggatctcagccggattaagctccggagaacgcccctatataaggatagaagacaacgggacaggaatcgagcaagaggtgctcgaccgcatctttatcccgttcttcacgactaaacccaccggatcgggcatcggcctgaccatctcacgacagatcatgcatctgcaccgcggcaccatcaccgtttcatccgaaccggggaaaggcagtatcttcaccctcttgtttccgggcgtattctaaagaggtgtagccatacggtgcacagggtgtagccctaagcctcgcatggctacaccctatataccggacagctacaccctctctgtcagatgcctttttaatacaatttcaccgtcatacgacatcatttatcaaaaaaaaccttacctttgccactcacaaaaccataaaaagaaatagaaaatgaagaaaatactattttttatcactatgatggtgctgagcatcggacttgcccaagctcaaggaaaagcagaaataaagtttgataagacaacccacgacttcggaacgttctcggaaaacaatcctgttgtgagttgcactttcaagttcacaaatatcggcgatgccccgttagtcattcatcaggctgtagcatcctgcggatgtaccgtacccgaatatacccaggaacctatcatgccgggaaaaacaggtacaatcaaggtgacttacaacggaacggataaatatccgggacacttcaaaaagtccataaccctgcgtacaaacgccaagacggagatgatacgtcttttcgtggaaggcgacatgacagccaaagacgcgaaataagcaaaaattaataacaacaatgaggagaatctttcgggattctcctttttttttgcttactttgaagctgttttgagaaaccgaccgtttggaaatctgataaactatacataaactacaaaaaacaattatgaaacaagaagaagacaagtttacgggcttacccgagaacgcattccgggaactgaaaccgggagaagtgtacaacccgctgatgagtccaaagaaaacgtatccggaggtaaacctctggtctgtagcatggggtatcgccatggccatccttttctcggctgccgcagcctatctgggactaaaagtaggacaagtattcgaagctgccatccccatcgccatcatagcagtcggagtatccggcgcagccaaacgcaaaaacgcactcggcgaaaacgtcattatccaatccatcggcgcctgctcaggcgtcatcgtggcaggagccatcttcacactgcctgccctctatatcctgcaagccaaatatccggatatgtcggtcacctttatgcaagtgttcatcagttcactgctgggcggtgtactgggcatcttgttcctgattcctttccgcaaatactttgtaagcgacatgcatggcaagtatccttttcccgaagcgacagccaccacacaggtgctggtgtcgggtgaaaaaggaggcagccaggccaagccattgctgatggcaggattgatcggcggtctgtacgatttcatcgtggctaccttcggctggtggaacgaaaacttcaccacccgcgtatgcggagtaggcgaaatgctggccgacaaagccaaactggttttcaaggtaaacaccggcgcagccgtactcggcctgggatatatcgtcggactgaaatatgcttccattatctgcttcggctccctggccgtatggtggatcatcgtaccgggcatgtcactcttcttcggtgattcggtactgaatcagtggaatccggacataaccgccacggtaggctctatgagtcccgaacagatattcagccactatgccaaaagcatcggtatcggcggcattgccatggcaggtgtcatcggcatcatcaaatcatggagcatcatccgcagtgcggtgggactggcggctaaggaaatgggcggaaagagtgatgccgaaaagaacattatccgcacccaacgcgacctctcaatgaaaatcattgccatcggttccattatcacgctgattctggtagtgcttttcttctatttcgatgtgatgcaaggcaacctggtgcatacactggtagctatcctgctggtggccggaatttcattcctgttcacaacggtagccgccaatgcaatcgctatcgtgggcactaatcccgtatcgggcatgactctgatgacattgattctggcatcggtcgttatggtggctgtcgggttgaaaggcccttcaggcatggtggcttcattggtaatgggtggtgtggtctgtaccgcactttccatggcaggaggttttatcacagacttgaaaatcggatactggctcggcagcacaccggccaagcaggaagcatggaagttcctcggaaccatcgtttcggctgctaccgtaggcggtgtaatgattatcctgaacaaaacttacggattcacaagcggtcagctggctgccccgcaggctaacgcaatggctgccgtcatcgagccgttaatgagtggtgtgggcgctccgtggatgctctatggcatcggtgccgtactggccatcgtattgacactcctgaaagttcccgcactggcatttgcactcggtatgtttattcctctcgaactgaatataccgctggtggtgggcggtgcgatcaactggtatgtgactacccgcagtaaagacgcttcactcaacacggaacggggagagaaaggtacattactggcatccggattcatcgccggaggtgccctgatgggtgtagtcagtgcggcaatgcgcttcggaggcatcaatctggtaaatgacgcgtggctgaacaacactctgtctcaacttgcggccctgatagcttatgccctgttgattctctatttcatcaaagcatccatgaaagtaaaatgaaaacattaatcacatccattcttctgttcatggctaccggcttgtcagcacaaaagcccgttgagctgcctttatggcccaacggcgctcccaatgataacgggctgaaaggcgaagaagtgatgtcggctccataccggctcactaacgtcacacagcccaccatcaccgtctatcgtccggcgacacctaacggcatgaccatcatcatgtgtcccggcggtgcttacgctctcttggccatggatcatgaaggacacgacatggcaccatggttcaattcattgggcatcacctatgtggtactaaaataccggatgcctaacggacactgcgaggtgcctttgtcggatgctgaacaagcgatacgaatagtgcggaaacatgccaaagactggaatattcgtacagaccgggtgggcattatgggagcttcggccggcggtcatctcgcctctacccttgctacgcattacagcagtgaggacacacgacccgactttcagatattactctatccggtaatcacgatggaatccggcgacacccacggaggatcacgccacaatctgctcgggccggacgcaacgccggaattaaccagaaagttctccaacgaacagcaagtgacggatcacactccgcaggctttcatcaccctctcttcggacgacgaaggagtgcctcccgccaatggcgtgaattactatctggcgttgcaaaagcataaggtgcctgccaccctccacatttatcccacgggcggacacggatgggggttctatgacggttttacctataaacgccaatggacggaagaattagagaaatggttgcgggacggagtcaggttccaatagatacaacgaaggtattacaaaaacaatctttataaaaatgaaaacaattcgcacacttttattatgtaccagcctattggccggaacagttgcagcacaggagagcagcctggtgctgagtaacggactcgggtttgtcgacaccccctataaggcaggcaccctggaagtagatgacacagaagaccttattatcaattgtgacgaagtggattgtaccactttcgttgaatatgcactggcaatggccctctgcccgcagcaaggagacgaaatgcaggaaggcgatttcgcccgcaatttgcaacgcatccgctatcgtgacggaaaaatagacggatacacctcccgcctgcactatatatccgactggatcaacaatgcggtccgccaaggcctgctcgaagatgtaacggctgcctacagccccttcaaacaaaaactgtcgctctcgtacatgagtacgcatccggaactctacaaatcgttgaaaaattctccggagaacgtagcccaaatggcaaagtatgaaaaagccttgagcggcaaagaggtacactatctgcccaaagacaaactggaaccggacggactgccttggatcaagaacggagacatcatcgccctgaccaccaatactccgggactggacgtaagccacatgggcattgccatttacatcaaggggcagttgcacctgctgcatgcttcatccaaagagggtaaagtagtagtgggcaaaaccgcactgagccaaatgttgaaagacagaaaatcactgaccggcatcagagtgctgagaatgaaaaaataatctgcataacctacctgtggtgaacacgagttttgatatattctctttttcttgtcaatatgaaaggaaattagcggatttcatgacagcaccttctgcttttagacagcaaccggaagtgcggaaggcggaaagcaggacttttcttcccggaaaaccggacttttgtagccggagagccggggtctgacccgaaaagtaaccggatttcagcaaaaagaagtaagcattcggtccgaaagacgtaagcatttacagaatatgcttacgtcttttcaaattatctctatatgttttcctactttacatctattgttagggtttcggaggttaaaagagaaagattattctctggttgtactcccgaagcagacaagtccgaactaacagaaagagagccacatgctcttattacgcaccttttcattccgatagcttcacgacatcgccattatgacagcctgcaaagacatctgatatcaaaaacaaaattgctaacccgcaaggaaggcgattttatccgttcagtgcatcattggacggaaatagagcaatccagagaggtttgattatcattttgacaaaagggcagcaagcaactcccggcccaactgttctttcacctccgccatatcgatgctacggccaagttcttgctgaagcgaggtcacacccttatcaatgaaaccacaaggatggatgtagctgaaataacgtaaatcggtattgacattcaatgccaatccgtgcattgtcacataatggctgctcctgacccctatcgcacatatcttgcgggcacgggacgtatctccctccagccagacaccggtcgccttctccaaccgccccgccacaacaccgtaagacgcacagacacggatgacggcttcttccaataaatgcacatactccttcaatcccaatccgaactcttcaagattgagaatcggatagcacaccaactgcccgggaccgtgataagtgatgtctcccccacgatcgatatgatagagagtggcaccgatagtcttcagttgctcctctcccagcaacatattattttctttcccgctacgccccagcgtgtaaacgtgcggatgttcacaaaaaattatacggttctcgtaattctccccgttctgcttcgcatggacaagggcatcgaaccattcagtctggcggctccatgcctcagaatatggaataagttcccaatcggttgtaattgttttcataaggacaaagataaaaaaataaaagaaaatgtgtatatttgcgtgattcaaaaaaagaaagtaatatgaagtttgactttccacaagtagatcttccgtgcgagattttggcatggaatgatgtaaccgaggatatattaaatatctacaaacaatcatgcaggctgaaagccggcatctttgctatttgtacggaaggcaagatgaccgcaaccattaatctgattgactacgagataaaaccgaacgacttgatcacactgttaccgggtaccattatccaattccgcgaacgcacggaaaaagtacgtttatgctttgcgggattctcatcggaatgcgtagaacgcatcaatctgataaaatcaatggtcagttccttctccaaaataaccgaatgtccgattgtagagttgcaggaggatatagccagctatctgatagattatttttctttgctggcacgcgtgacgtgtgacgaaaaattatctctcccctccgaaatgacagaggtgtctttaagatcgatcctgactgccgtcggactaatctatcagagatactcctcgaaaaatcacaatacgaaccgtaaggaagaaatctgccgcgaactggtaggactggtcacggaacattacaccgaggagcgtcgtgcccagttctatgcggacaagttgggaatatcgctgcaacacctcagtactacggtcaagcaggtgaccggacgtaacgtactggacgtcatagcctacgtggttatcatcgacgcgaaagccaaactcaaatcgagcaacatgactatccaggaaatcgcttattcactgaacttccccagtgcttcgttctttggaaaatatttcaggagatatgtaggcatgagtccgctggagttcagaaacagctgacgactttctccgggaaagacattcaaaacccttttttaccacagagggcagagagtaacacagagcgttcatgttggtcatccataatttgaagtttgctctgtgttactctgtgccctctgtggtgagttcgttttgaaaggaattgttattttctggccaggctcagtgaattcagcacgacacttacacttgaaaatgccatcgctgcactggcaagcatcggattgagcagcaacccgttgacagggaacaagattccggctgcaatgggaatgcctatcagattatagataaacgcccaaaacagattctggtgaatcagttttactgtttgcttggagagttcgaatgcacggggcagcaacagcagatccgatgtcatcaacgtaaccatcgccacatccatggctatatcggtgcctttccccatcgctatgctgacatcagccaaagccaacgcctgtgagtcattgattccgtcacccaccatagcaaccgttttgccctgcatctggagctcacgcacaaactcttctttatcatccggcaaggcatctgccacaaagcggtcgatgcccaatttgcccgatacggcaagtgccgtccgttgtccgtcaccggtcagcatgcaaatgtcgatgccctgacgtttcagttccttcaccgcctcggcagaagtcggctttatctggtcggcaatggcgacaacggcaagtacctctgttccacggccaaagtaaacgatactgttcccgtccgattcgtattgcaccatcatctcggcaagtacgtcagaaagagaagcactgaaatctttcagcaatttgtggctgcccacccaataagtgtcaccctgatataccaccttgataccttttccggtgatactctcaaaactctccaactgggcaggaactatcttctccacctcttgcagagaagagacaatggctccggcaagcggatgttcggatttaagctcggctgccagcagaacattcttgaaatgctcttcctgtacttgggcccaaagccatccggagacagtgggatgtccctcggtcaatgtcccggttttgtcgagcaccactacatcgactttacgcatctgctcgagggcaacagcatcctttatcagaatatggttgctggctgctttgccgatacccaccatcagagcggtaggagtagcaagtcccaaagcacacggacaggcaatgaccagtacggatacagccgaaagcaaggcatgtgagaaataatcggttcctcccaccaacagccagatgacaaatgtcagcacggcaatgcacagcaccaccggaacgaagatacccgtcacccggtctacgatacgctgtacgggagctttacttccctgcgcttcctgaaccatgcggatgatgcgcgccagcaccgtctcacttcccacaccggacgccttgattacaaaagctcccttctggttgatggttcccgccagtacccggtcaccgaccttcttctctacaggaataggctctccgctaatcatgctttcgtctacataagactctccttcagacagacgtccgtccacgggaatctgttcgcccggacgtacgaccaccagatcgccggtttgcaactggtctatcaggatgtcttcttcgatcccttcgcgaagcactcgggccacacggggctgaagtcccatcaatttacgaatggcggtagaggtgtttcccttagcacgctcttccattaactttccggtcagtacaaaggcaatgatgactactgcggcttcgtaatagacgtgcggctcaagtccgcggctataccagaactcagggaaaaatgtattgaagacactgaacaggaatgcgatggaggtactcagtgccaccagcgtatccatgttactcctccccagacgtgcctgccgccaggcgttgacgtagaaagatccaccaaaaaagatcattacagggagggccagtatcaactggatctcgttagagaaaggtacatgcatcagaaccatagaaaacagcaacatgggaacaacgaagatccatgcaccgataacctgccgcttcagcagccggtagtgtttctcctgtgcctcctcctgacgttcctctttcagggcctcttccactatcaggtcataacctgcggcaagtacagccgcacggatctctccgggggtcagcttgtcggcctcgtacgaaacggacagtgtgtttgtggcgaagttgaccgatgcgtctaccataccggccagtttcttcactgttttttccacattattagcgcaccctgcacagtgcatattcagtacaggaaacgctttctttgttatattactcataatctattattatatatactatctaataaacaatgaggtaaagaacaatgttcacttcttgtccgtttcctttgcctcctttatgactacagcttcgtatttaaatttccgaaagccttctttcagtttttcaacatttgtcttctcggcatcataggtaatggtaacagttcgttccttaagatcggttgtaaagtttttaagccctttctcgaacttgatattgttcttcacctttcgttcgcagttggcacattccatctgtgccactttgaaaacgacagtacggaagtcttttgccataacggccgtcaccgagagcaaagccaccaccagggtagcaatcatttttttagtcttcataaatgtaagtattagtattgataaattctgtgatctgtcactttttattcttaatctctcgccagattgaacctgactccgatatatcctttcgctccatgaaccggcccccatatcatggtcgagtcaaaacggtcgccccaaggatcggcagcgtcgataatcggattcttctgtttaaaattagtcaggttttcgcccccgatgtatatcgaccagcggcggaagtagcgtgtcacttgggcgctgagttggctgaagcctttgtagcgtgcatcccacgaagaggttccgtcggcaagtgtgtacggattgggcatacgtcctcccccgttcatctgccatgtggcatcaaactgccacaaacccagcggagtctgataagaggcagtgacgaggcctttatattttcccgtcaggggcttctccatcaattgatgattataggtagtcttggcgtctgtccagcgatatgcggcagtcagcgagaatccctgaaagaagggataagtggcctccacctgaaatacctgtgagtacgagcgtccgtcgagattgtaaaaggccacctcgtgcggattcgtatccatatcgacaacgacctgtttcaggaagtcggtgtaatagtattccaggttcaggttcaacgtcttcccgaaaagcgggatatatcccgatatgcttgctccataattccaagcctcttcctgatcgagatgatcggcgatgctcaccttgcggctgcttgccatcagataattattctcggcaagcacatggttggtgcgatatccctttccggcggaaagacggaaatgaacaaagtcattggggttgtacttaatgtgcgcacgcggagtcacaaagaatccgtactcactgctatggtcgccacgaagtccggccatcaacacgaacttattatccaggttgaaggtatactgtgcgtaggccccgcccaccgattcacgtgcaaaagctttcgtcaacggtgtttcagcgttattggtcagtcggtaatgctggtcgtatccgtcataattatagctgaagcctgcagatagattgtgctctttcgtaaattcggtttcgaacataagtgaagcataggcgttggattggtcgacgttatagatcttccgtccataaagtgcatcctgattgtgcaacgtaccggacagaatcagtgcaagattggtattcttctccttattaaatatataggcattcttggtaaaggcctcgtagcgccgggtgtcgatgtctatttcataccgatcggctgccggcacgccgctatgactcacctgaccgccttttctgctttcgtccaatgccttgatgcctgcctgaaacacataatgatcccccatatatgcccaacgattccagaagttatactgctctatccggggaatatcggcaaagccgtcatcattgccgtcgtgtgcctttgtttcattctcgtaatgcgccagcaatgaagtactccaccgcttggacagtttcacggtggcgtctgcattcgcttcataacgattggtagtactggcaaaaaggttggccgaaacccaatcggcctcaggcaactgtggcttcttaaactcaacattgatctgccccgtaagggcctcgtaaccgttttttactgacgagattccctttgaaacctgtatgctatgcatccagggaccgggcacataacccaacccataaggagaagcagcaccacgatagttcgggatattctcggtcagcatctgcacataggttccggaaagcccgagcaacttgatctgtttcgctcccgttgcagcatccgaatagctgacgtctaccgacggattggtaacaaaactttcaccgagattgcaacatgccgcacggcagagctcgtcgctggtaatgatctcttcgttcatcacactgctgcgcaacttcagcgtactcaacttacggctgacaatctgcacttcactcagttccattccttcgcgcagcaccacgtccagaacggctttcttatcgttcacttgtatggtgtcgttttcgtaacctataaaacttacgatcagatgattggatttgtcgggtttagatatggaaaaagtaccgtcctcacgagtggctaccccaccgggaatgtttttccagaaaacgttggcgcctataatcggttcgcctgcctgatctttcaccgtaccgctcacttgcgcctgtacggtcagactgccgagaagcagtccggtcaataacatgtatttcattaaatttcttcgtttgtcttttttattcggtttatattcaataagaaacagataggattcaccgcagactgcacagggtgacacaagttacccggctccaacaatctacggaatcaatccttaaacggtgaaagccagtgcaatctgcgatgcaatccaaacaataaaaatcgaagaaactaaataagcaaagtagaataaagagccagataatgccgggaacttgtcttgggtggcggtatcacataaggaggatccaacacctcatcgcggaaaagagcgcatagcaagtccgatacctggtcacaaagcaacaagctgacaggagcaggaacagaggattcgaatgcctgctttaccagatcaagcttatagatggtcgccgtacatccctcgccccggcatgatttatggaactcaaagtcaaacttaccacagaagccgcatttgtcggcacagcaacaattggccgtttcacaaccactgcaacaatattgggcaacagagactcccgctcctacatatactataaggagagaaagaataacggcaagtatatagcggaatctcttcataacggttgcaaagataagcagatttaaccagcctgccacattcttttttctttttttatgctgtcgattcactaatatgaactatatttgtcgatagtgaacgattatataaatgttgaatttaaagaagaaccccttatgaaaaaacaatatgtcagcctgcttgcgataatacttgctacaagtggctttttattttcttgcggtgacaagatgaacaagaataccggtgcactggaattcgacagtatacaggtaaacgaaacagcacatctcttcggagataccgcaaaaccggcatgtaatctgaccatcaatttcgcctatccggtgaagtcgacggacaataaactgaaagacagcctgaacagctactttatcgccgcctgcttcggtgaaggatatatcggagagaaaccggcgcaggtggtaaaggagtacaccgaacattacgtaaaagaatatcgcacagacctcgaaccgatgtatgccgaagacgaaaagaacaaagagagtgaaggctccatcggtgcatggtactcatactataaagggatagaaagccacgtgcaactttattataagaatctgttggtctatcgcattaactacaatgaatataccggaggcgcacacggcatttacatgacaactttcctgaatatggacctgataaacctgcgtccgctgaagctggatgatattttcactggtgattataaggaagcactgaccgacttgctgtggaatcagttgatggcggacaagaaagtgacaacgcacgaagcactcgaagatatgggttacggctctaccggagatattgccccgacggaaaacttctatctggacaaagacggcatcaccttttattataatgtatatgatatcaccccgtatgccatgggaccggtagaaattaagattccatacgaaatgatggaacacatgctgggcagcaacccgatcatcggagagatgaaatcaaaataatctaactttattattaaaatacagatatattacaaccttatgaatacaacagaacaaacttcctccctcccctctgccggaggggaaaacggagtgaagcttcttcttaaatactttcccgacttgacggaagagcaacgcaaacaattcgctgcgctttacgaactttacattgactggaattctaaaatcaacgtaatctcacgcaaggatatcgagaatctgtacgaacaccatgtgcttcattcgctgggtatcgcccgcgtcatccgtttccgggccggcagcagtgtcatggatctcggcaccggaggaggattccccggaataccgttggccattctttttccggacacgaaattccatctggtggacagcatcggcaagaaagtacgtgtggcaaccgaggtagccaatgccatcggacttaaaaatgtcactttccgccatgcacgggccgaagaagagaaacaaacattcgacttcgttgtcagccgtgccgtgatgcccctggccgacctgataaagattatccggaaaaacatctcgcccaaacagcaaaatgctctccccaacggacttatctgcctgaaaggaggcgaactggaacacgaggcgatgccgtttaagcataagacaagtatgcataacctgaatgaagatttcgatgaggagttctttcaaaccaagaaagtggtatatgtaacgatttaaacgatcaaacaacatagtcatgaaaattaagagatttgagttcaatatgtttcccgtaaactgctacgttttatgggacgaaacgaacgaggcagtcgtgatagatccgggctgcttttatgacgaagagaaacaagctttaaagaacttcatcgtcaccaacaatctgaacataaaacatctgctgaacactcacctgcatctggatcacattttcggaaatccattcatgcttcgcgagttcgggctgtctgccgaagccaatcaggccgacgagtactggatagacgaagcccccaaacagagtcgcatgttcggtttccaactgaatgaagcacccgtcccactgggaaaatatctccatgacggagacatcatcaccttcggaaacacaacactggaagcaatccatgtaccgggacactctcccggaagccttgtctattactgccgggctgacaactgtatgttttcgggcgatgtgctgtttcagggaagcatcggacgggccgacctggccggaggcaactttgatgaactgaaagagcatatctgcagccgcctgttcgtcctccccaacgaaacaatcgtatatccggggcacggagcaccgactaccatcggaatagagaaggcggaaaatccgttcttcaggtaagagattatcaacaaaccttattataaataaatcattaataacatgaaaaccgatttattagcctgccgccacatcggcgtcaacaaagcggatgccgaagtaatgctccggaaaattggagttgcttcgctcgacgaactgatcgataaaaccattccggccaacatccggctcaaagcacctctggcactacccgcaccgatgaccgaatacgagtttgcccgccacatcgctgaactggcaggcaaaaacaaactgttcaccacttatatcggtatgggatggtacaacacgatcaccccggcagtcatccaacgaaatgtattcgagaatccggtctggtatacttcttatactccttaccagacagaagtttcgcaaggaagactggaagccctgatgaacttccaaactgccgtatgtgacctgaccgccatgcccttggccaactgttcactgctggacgaagccaccgctgccgccgaagctgtgacgatgatgtatggcttgcgttcacgcaaccagcagaaggcgggagccaacgtggtgtttatcgacgaaaatatcttcccgcagaccttggcggtcatcaccactcgcgccatcccgcaaggcattgaaatccgtaccggaaagttccgggatcttgaatttacagatgacctctttgcctgcgtcctgcaatatcctaatgcaaacggtaatgcggaagactaccgagaatttaccgaaaaagcacatacagccaactgcaaggtagctgtggctgccgatatcctgagtcttgcactacttacccctccgggcgaatggggagcggacattgtattcggtaccacacaacgtttgggtactcccatgttctacggtggtccttcggccggttatttcgctacccgcaacgaatacaaacgcaacatgccgggacgtatcatcggatggtcgaaagataaatatggcaaactctgttaccgcatggcactccagacacgcgaacagcatatcaaacgggaaaaagcgacttccaatatctgtaccgctcaggcactgctcgcaaccatggcaggattctataccgtctatcacggacaggaaggtatccgtaacatcgcttcacgcatccatagcattaccgttttcttggaaaagagtatcggtaaactgggattcaagcaagtgaacaaacagtatttcgataccctccggttcattttgcccgacagcgtatcggcacagcagattcgcaccatcgctctgagcaaagaggtcaacctgcgctattttgataatggagacgtgggactgagtattgacgaaacaaccgacgtagcagctgccaacattctgctgtctatctttgccatcgctgccggaaaagacttccagaaagtggatgacatccccgaagcaactatcatcagcgaggagttgaaacgccagaccccttacctcacacacgaagtattctctaaatatcataccgaaacggaaatgatgcgctacatcaagcgtctcgaccggaaggatatttcattggcacaatcgatgatttcactcggttcctgcaccatgaaactgaatgcggcagccgaaatgttacctctgagctgtgctgagtttatgtgcatgcacccgcttgttccggaggatcaggcggccggataccgcgaactgattcacaacctgagtgaagagctgaaagtcatcaccggatttgccggagtaagcctgcaacccaattctggtgctgccggtgagtatgccggtctgcgcaccatccgtgcctatcttgaaagcatcggacaaggacaccgcaacaaagtattgatccccgcatctgcacacggcaccaatcccgcatcagccatccaggccggattcaccactgtaacttgtgcatgtgacgaacatggaaacgtagatatggatgacctccgtgccaaagctgaagaaaataaggatgacctggccgcactgatgatcacctatccctcgacacacggtatctttgaaacggaaatcgtagagatctgccaaatcattcacgcctgtggagctcaggtatatatggatggagccaacatgaatgcacaggtaggactgacgaatccgggatttatcggagcggacgtctgtcacctgaatctgcataaaacctttgcatctccccacggaggaggcggccccggcgtaggtccgatctgtgtagcggaacatctggtaccgttccttccgggacacggactgtttggcaactcacagaacgaagtatccgccgcaccgtttggcagtgccggtattctgcctatcacctacggctatatccgtatgatgggtgccgaaggactgacaatggcaaccaagacagccattctcaatgcaaactatctggctgcttgcctgaaagatacgtatggcattgtataccggggagccaacggctttgtgggacacgagatgattctggaatgtcgcaaggtatacgaagaaaccggtatcagcgaaaatgatattgccaaacgcctgatggactacggctatcatgctcctaccctctccttccccgtgcacggcacactgatgatcgagcccactgaaagcgaaagcctctccgaactggataacttcgtccttacgatgttgaccatctggaacgaaattcaggaagtgaaaaacggtgaagccgataaggaagacaatgtactgataaatgctccgcaccctgaatatgaagtagtaagcgatcagtgggaacactgctatacgcgtgaaaaagccgcatatccgatggagagtgtgcgtgagaataagttctgggtaaatgtagcccgcgtagataatacgctcggcgaccgcaaactgctgcccacatgctacggctgcttcgactgaagtaagctaagcaacaactgattcacgattcaccacagagtagcacgaagtctcacagagtagaaatcataaaagataaactctgtgagactctgtggtcaatttaaactctgtggtgaatcttaatatcctattccacgatggttatcgtaccggctttaactgtcttttctttcaacaatgtgccttccgctttatatcccaaagctacacaaccataaactttatgattttcgggcactccgagagaagtcagataggcccgtacctccggatcatcacaagtcgtaccgagctgattgatccaacaggaagcgatgcccagtgaagtggctgccagaaacatattctcgatagcacaggcacaatccatcccggcccaccattgcttgggttcattggacacgatgaccaaggttggggcatgatagtaacagcaatacgtctcactatgcccccgttcccgaagatgcttgtcatcacttttggcaaatgcccctttgatccgttcattcagttcctccagtttcaccgtattacggacggcagtaaagtgccacgtttcataatgcatgccgctcggcgcgtaagcacccgcttccaggatggcgttcaagtcatccgccggaatctgctttcgatcatacgcacgtacactacgccgtgccttaatggtctctaaaacttcatttgtcttcattatctattcttctgccaatcggatttatcttttaatcaacccaatctttacattcagtttgaaataatacactccgttctctctctcgaggaagccatacttgtctttatcaaccgatcccttttcgagacgcgaattcagataaagaaagtcctcaaatgttttcttttccgatttatgatagcacagtacctcacctttaccatcgaccagcaatataccttcaactgccgaatcggtcccattgtatattttggccggacgcatacccaaggcaagtgccagcagaaactgcttcattttaaactcgtaaaagccatgcttgctgatcagctcctcttttatcttgagaggatttatgatcttcatctgttcggtcagttcactgacgcgtgtgatgccgtccaggtgcatcatacgcaccatctctgccagcacacgggggaagtgcagatcgatcatcagcagattgcaacggaacacacggtccgctacgtccgaatacttcagcacacctcccagacgctcgatcatcatcatacgctcggccacctccgtgggtgattcagggagggcattaatcttattgacggtcggagtggcaaacttgataccggactgctccaacttcaggttcgccgcacgtccaccatccaacagcggattcatcgcactgagacgcgaacggacattgaaacccgccaacggagcctcaggatgccagaaagcaatcgagaagtcggtacggtcctccgtccgggcttccagatcaaagatacctgcctcgtccaggaactcctccaccccgtcgggtgacgtaacttcatccgccgaagaatttttaatcgcgtctagaatcaggtccgccactgttgcaaagtcctcacggggaatacttttctccaccttctcaccttccatccggatgacctcttcttcaatatagtaacgccgggtgccatcatgctcttcacgctggatcattgcaatgggccggtacttttcatcttctttctttgcctgcggagttccaagcgatacttttccatccgccagcagacggaaaaaggcgtacaactcgctccactctctttttgttgcttcaaatgccattctatctatcttttttttattatttcggagaggtgtgtcatcattcatcacagagttccgacgcccccctatctctactatccatttccttcctgttcatctgcaatgcgggcagtctccactttctccagccgggaccttaaacggggcattgccgactgccggatacgaagcgtcatgctgcaatccatatcatacgactgagacagaatctccggttcctcctcctttacaatccgcatgacatcgttcataaaaggatactcgaaaagtacggttacttcctcgtccacagttttctctacaatggtgcaggcagcgatagcctcggcggcggcggccttataggccacaatcagtccactagtgcccaacttgatccctccgaaataacgaaccacaataatcagtatatccgtcagttcgttcgagttgatctgtcccagaatcggtttgccggcagtacccgacggctctccgttatcgttggcacgaaaattcttccgctcgtgtcccagcatataggcatagcagacgtggcgggcatcatagtatttcttctggtacgcctccagatgcactttaatctcttccaaggtacgaaccgggagagcgatggcaataaatttgcttcgtttctcggtatatgttccctccgagacttcagtgatggtcttataggtgtcttctgtcatgatatccggaatctttttttgatggttcaagctatacccagtaattgtacctcgaaaattaaagttgaaaaagccggaatcgggccactggtacgtgtgccatagcccatattataagggatgtagacgatccagtgatctcccacccgcatcttttgcagagcaatctgccatccttcgataacctcgttcagacgaaaagcttcgggacagttccgcttccaggaattatcaaattcacgtccattgataagagtgcccttgtaatgaaccgacaccacactgttggaacggggcgtggctgcgccggtaccttcctccaaaaccttatataatatgccgcatggcaattcgtgtacatccgcttcagtgcgtaatgtctgcatgaattgttcgttctgcaatttgtattcttcttttcgtcccatatctgtttcctgataataattacttcggcggcaaagatacggaaaaacgtacatatttgaatagtccgaaacacaaaacgaattcaccacaaattacacggattaacacagaacggcatcaatttactgacaaccaataatttacctgtataattccatgcaatttgtggtgaataacgagtttgggtacatcccctcctctgttttccatacccaaacactcctcaatccggtatcggatctctttttattcgagctcgtgtatcaccagccccgaacgcagtttcggttcgaaccaggtagtcttcggaggcataatgtttcctgtatcggcaatatccatcaattgcttcattgaaacaggataaagtgccaaagccactttcatttcgccactgtcaacccgtctgctcaattcgcccaagccgcggattccccctacaaagtcaatccggcgatccgaacgcagatccttgattcccagaatttcgtccagaatcaggttggaagagatggtcacatccaatacatctataggatcattgtcgtcataagtacccggtttggctgtcaggctataccatttgccatccagatagagcgcaaagttatgcaacgcattgggtttataaatctctttacctttctcttcgatctcaaaattcttttcaagggcggtcagaaattcggcaggcgtcaagccattgagatctttcaccacccggttgtagtcgataatagtcaactggttggcggggaaacatacggccatgaaatagttgtattcttcgtctccgcgatgattaggattctgctttgccttttcggcccctaccagggcagcggcagccgaacgatgatgcccgtcggcgatataaagcgccggcatggcagcaaactccttggtgatgacagcaatgtcttcgctgttgtcgatcacccagaaagtgtgtccgaatccgtcaccgggagcaataaaatcgtataccggcttttgagccgtatacttgcggataatggcatcgagcaccgcattgtcgggataagcaaagaacaccggttcgatgttggcattgttcacacggacatgcttcatgcggtcttcttccttgtcacgccgggtgagttcgtgctttttgatgacaccgttcatataatcgggcacgtaagcacccaccaccagcccatactgtgtcttgccattcatggtctgggcatagatataataattctctttgtcatcctgcaccagccatcctttatcacggaacagacggaaattctctgccgctttcgcatacaccttctcatcatgttcgtctgtcccgacgggaaagtctatttccggtttaatgatgtggtacaatgatttatcgttcccggcagcttctgcacgagcctcttctgaattcagcacgtcatacggacgtgaagcgacctgttctaccaaatcctgcggaggacggatgcctttaaatggttttattgttgccataagaactgcagattacttattcactctaaacttttcacaaccctctttcaggaaacccacaatctgccgtgcagctgcaataccggcattgatattcgcctcggccgtctgtgctcccatcttcttcggagtcgagaaataacgtccggcaaagagttcggcgaacttcgtattggccgcaggcatgatgtctgtgatgtatttaaagtccggccgttcctccatcaactggatcaattcgtcttcattgatcacttctttgcgggccgtattaaccaggatagcccctttcggcatattggccaacagattatgattgatggaatttttcgtttcggctgtagcgggaatgtgcagtgagacgatgttacaggtcttataaagctcttcggcagagtcaacggctttcaccccatctttctctatcacatctttcgggcagaaagcgtcataagcatagagttccataccaaaccccttggcaatacgcgccacattgcgtcctacattaccgtatgcgtggatacccagtttctttcccatcaactccgtacccgatgttccgttatagaagttacggacagcataaacaagcaggccaaacaccaactcggctacagcattcgagttctgtcccggagtattcatcacacatacaccgtgtgcagtagctgcattcaggtctacattatcgtatccggcaccggcacgaactactattttcaattctttcgctgcatcgagcacctcggcgtcgatgatgtcactacggataataatggcattcgcatctttcactgcgtcaagcagttgagctttatctgtatatttctcaagcagagccaattcaaatccggctccttctatttctttcttgatgccatccaccgcaatcttggcaaatggcttttcggttgcaacaagtattttcatttctcttattctattttgggagaattcaccacagaggataccgcaaacaccaaatgccgtcattcaagagagccctgtatcctttccgtatgctctgtggtaaaatcacattattaatgaagtttctcaaattcctgcatgcagtcaatcaatgcctgtacgctctctttcggcattgcattgtagcaagatgcacggaagccacccaccgagcggtgccctttgatgccggacattcctttatccgtagcgaacttcaggaaatcggcttccagatccttatattccggtgccatcacaaagcagatattcatgcgcgaacgatcctccttagcagctgtccctacaaacatcttgttgcggtctatctcggcatacagcatgtctgccttctcggtagcccggcgatccatctctttgacgccaccctgagccttgatccagcgcaaagtctgcatggcggaatagataggcaatacgggaggtgtgttgaacatggaaccgccgtcgatatgggtcttataattcagcatgctcgggatgtaacgtgacaccttgcctaccgcatcgtcttttactatgacgaatgtaacgccggagggagccagattcttctgagcaccgccgtagatacaaatatacttcgaaacgtccaccggacgggagaagatatcagaagacatgtcggctaccatcggaaccggtgaatcaagatctcccttcaattccgtaccataaatcgtattgttggtggtcacatggaaataatcagcatcagcaggtatggtaaagtctttagggataaacgtatagttcgcatcagccgaagaagctacctcaaccacttcgccaaagcctttcgcctctttcatcgcttttttagcccaaacaccggtgttcaggtaagctgccttcttctcaaggaagttgtaaggcaccatgcagaactgcatactggcaccaccgcccaggaaaagtaccgaatacccttcggggatgttaagtatttccttaaacaaagcaacggcttcatccataactgcctgaaaatccttgccacgatggctgacttccaacacagaaagacctgaaccgttgaaatcgagaatggctttcgctgtttcttctattacttcgcgagggagaatggaagggcctgcactgaaattatgctttttcatttgatgagtgtttttggttatacaatttcgttattttatgtctactgacatggcgaatttacgaatttatttcctctcaacaaacgtttccctgtaaaattacaatcttagagggcatttatcttactttttaatggtttatgcaggatttatacaccattttgttatctatacatgccaagatggtagaaaaagttcaaactgatattattacacgatgttctattctgaaatgaaagagagaatgactaaaaagtgaatatttataagaaagaaggactaaagccgggaagagccggaaaccggaaagctgtttcaccacagatttcacagattaacacagattgatgattgatcttatcagcaataaagttgaaagtgccgtgccaatcggtgtaatctgtggtgaatccgttccatgtcaatctgtgcaacccatggtgaattcgtcatgtgccaatcggtataatctgtggtgtcagtgccctgccgcctctatccgataaatccggtttaatccgcctcctcgatcaccgttttcatccctttgatcttctcgccacggatcagagtcagcaattgcttcatcttggggcgccgcacggcaacaaaggcataatgatctttcacgtcgattgctccgacatcctcacgtgccagatttccttttttataaaggaaaccggctatgtcgatcttgctcaatttgtccttcttccctttacctatataaatagtcacccactggggtttagccggacggggtgcattctccggcaagtcgaagatctcaagttccgaaggtatataatccggcacgcgttcctccggattcagtatcagataagaagtacccgtcgcatcccaacgggcagtacggccattgcggtgggtaaaggcttcttcgttcaccggcaaatgataatggatgatatgctccacctccgggatatcaagtccacgggcagccaggtccgtagacaccagcactggacagctgccattacggaacttatacagtgcccgttcccgatccggttgctccatacctccatgaaagcgttcattggaaactcctttttccgttagtaaggcactcacacggtccaccgcatccctgtggttacagaaaacaatactcgaactgcttcccaacgtacaaagcaacttatagagagtttctatcttatctttagcaggcgaaaccaccttcatcaaccgcaaacgtgattcctccacatcgtttgtcaggaaatcaagctttatcgtacggttcagtcctgtaaattgcggaatctcttccgcatctgttgccgaagtcagaaaacgccgtttcaagtcgggcaactgtccgataaccgttgccatctcttcctgaaaaccaaactccaggcatttatcaaattcatcgatcaccaacagactcactgtgcttgcatcgaagttctgcttggagagatggtcgttcatacggccgggcgtaccgatgataaccgccggctgcattcctttcatcgtacggtgctcttccatcgccggacgtccgccatagcaactcatcgccttgaattccgtccccatcgccttgaacacctgctctatctgcaatgccaactcacgcgaaggcaccagcaccacggcctgcactcctttcacgtcggccttcagactgccgaccagcggcaacagaaaggccagggtcttgcccgaacctgtgggcgaaagtaatatcaaatcttcgccacctttatcaaatgcctcaacagacgcttcctgcatcggattgagttgttctattttcaacctttcgagtatatccttcaaaccattcattgttttttccacatttttgaataatgacacaaagataaaaaaaaactgcttccggacaacccgaaagcagtttcttttatgatgatctccgaaggattatccaccgaagttatcgaacatcaagttcttagacggaacaccgagatcgtcgagcatcttctcgacagctttactcatcgggccaggaccacacatgtagtattcgatgtcttccggagcttcatggttcttcagataagtttcataaatcacgttgtgtacgaaacctgccgtatacttcacaccggctgcgtctgcagcagggtccggacggtcgagtgccaggtggaacttgaagttcgggaagtctttctcaatctgcaggaagtcttccagatagaacacctcgttcagtgcacgggcaccgtagaagtagttcatcgtacggtcagtgatatgcagcgtcttggtcaagtgcataatctgggcacgcaacggagccatacctgcaccaccaccgatccacatcatttcgtttttcgaatccagaatcgggtggaagtcaccgtaaggtccactcatggtcaccttgtcacctggcttcagcgtaaagatgtaagaagaagcgatacccggcatcacatccataaagcccggtccctgatccttcggtttgaaaggaggagtagcgatacgtacagtcagcatgatgcggtcaccctcagccggatagttggccatagaataagcacggatggtcggttcgtcgttgcggcacttcaggccgagcagaccgaatttctcccatgccggaagatattcgtcaccgatcaggctcttgtcgatgtccttatcataatccatcgagaaggtaggaatcttgatctgggcatacgaacccggcacaaagtccatgtgttcgcccggaggcagagccacgataaactctttgataaacgtagccacgttcttgttcgagatcacctcgcactcccactctttcacacccaggatagactcgtcgatcttgatagacatatcctgtttcaccttcacctggcatccgaggcgccagtgatcggcctgttctttacgagagaagaaaccggtttcggtaggcaaaatctcgccaccgccttcgagcacctggcaacggcactgtccgcatgaacccttaccaccacaagccgatgaaaggaacacattgttggcagacaacgtacccagcagagtaccaccctgagatgttttcagttgttgctctccattcatcgtaatcgtaacctcgcccgaaggagaaagatagctcttcgcaacgagcagtataatgacaagcaggatgatcaccacaaggaagactccgatacttgctaatattaaagacgtcattgttttattctttttactttagttataatttcaatccagagaaacacataaaggccatagccatcagtcctactgtgataaacgtaatgcccagacctttcagcggagcgggaacatcagagtaagccatcttttcgcggatagcggccagaccgacgatagccagcaaccagccaataccggaaccgagtgcgtatactacagcactgcccacgccggtaatagcctgcgggttcgacggatccatcgtgattctctgctgcatgaacagtgaagcacccatgatggcacagttaacggcgatcagcggaaggaagatacccagtgaagcgtagagcgaagggctgaagcgttccaccaccatttctaccaactgcacgataccggcaataacggcaataaagagaataaaactcaggaagctgaggtcaacaccttcaatgatcgcattggcagccagcaccttagtttgaagcaagtagttgaccggcaacgtaaccaccaatacgaaagttacggcgatacccagtcctacagcagttttcacattcttcgacacagccagatatgaacacatacccaggaagaaggcgaatatcatgttgtccacaaagatggagcggacgaataaacttaataattgttccataatttttcttttactttcttaggttgtattacttttcctggagttctttgcagcggctgcgctgataccagatgatacatgcacagatgatcagtgccatcggcggcatcaacatcaaaccattgttgatgtaacccatcttatagaatgactcagggataatacggaagttgagcaatgtgcccgatccgagcaactcgcggaagaaagccacgatgatcaggatcttggcatatcccagaccattacctacaccgtcgaggaatgactcccacggaccgtttgccatggcaaacgcttcgaggcgtcccatcaggatacagtttgtaatgatcagacctacgtataccgaaagctgtacgcttacatcgtatgcaaacgctttcagcacctcacttactatagttaccaatgcggctactaccaccaactgtacgatgatacggatacggttaggaatcgtcttacgcagcaaagagataacgacgtttgagaaagccgtaatcacagttaccgaaagacccatcacgatagccggttccagtttggccgttacagccagtgccgaacagataccgagcacctgcacggttaccgggttattcaatcccagcggagtagcgaatacttctttattctttttagaaaataattggctcatattctatcgttcctccttaattattagttaaaaatttatcgtactggctcagacatgctttgatcatggcgtccacacctttcgaagtgattgtaccacccgaaataccgtcaacctgataagcagggtctgtcaccttaccgtttttctctacagccagtgcaacctgtccgtctttcaataccttcttgccagagaattcattctggaaagcagcacccgcgatctcggcacccaagcccggagtttcgctggcatgcgagaagtaaacaccgtaaacagtgtctttatcggcattcaaagccacatatccccagatagcgccccaaagaccggcaccgtaaaccggtaccacgtatttggtttctccgtctacctcacatacgaaaacgtgcaaacgattgttttccttcgcttctttttcgtagctgatagagaaaccatccgtattttctgtcagagtgccatccacattcatcagcatgtcaccctttacatatttattatattcagcatcggcatctttcacatctctgatgttcagtgcagacaaaatttgcttcttggtgtccaactcctggtttttattctgaatgtctttcagagaagagctgacaaatgcaagcaagaatgccacgataacaaccattaccgaagcataaatgatagtataagagttactatttgtattcatctttcttgttcggtttaattgttagacttaatggcgcgtttttcacgcagtttgatgttgctctgaaccacacaatagtcgatcagcggagcgaagatgttcatcagcaggatagcgagcatcataccttcgggataacccgggttcaacacgcggatgatgatggccatcgcaccgatcaggaatccgaagatgtacttaccggtttccgtacgtgcggatgtcacagggtcggtagccataaacacagcaccgaagcagaaaccacccagcaccaggtgttcgtaccaaggcatgtgagccatggcagtgtcgggacccacagtattgaagatccatcccatgaatgcaccgccgacgaataccgaaagcattgttctccagcttgcgatacctgtccacagcagaataacggcaccaatcagaatagcaatcacactggtttcaccgatagagcccggaatcagaccggtcaccatatcccacgagaaagccgggaagccattgggatcggtagcagtagacgccacacccagcgaagtggccgctgtcagtccgtctaccgtgttacccaatccgaagatgctgtcttgtgccacccaaacggcgtcacccgacatcttggtaggataagcgaagaacaggaatgcacgggtcacaagggcaacgttgaacacgttcatacctgtacctccgaacacttctttcgcaaaaataacagcgaatgcagtggctatggccagaatccacaacgggcagtctaccggtacaatcatcgggatcaggatacccgaaacgaggaatccttcctgaatctcttccttcttccattgtgccaccacgaactcaatgcccagacccactacataagatacgataatcttaggcagaatggccaggaaaccgtaaatgaacatttcgatgaagccaccctgagctccggtgtgagtgaaatgctggtaacctacgttgtacataccgaacagcaaagccggtatcaacgaaataaccacaatcgacatgatacgtttgctatcaatcgagtcgtggatgtgcgctcccgatttcgaagtggtgttgggcacgaacaggaaagtttcgaagccatcgaacaccgaacgaaacgcgtggagtttgccgccctcttcaaagttcggctttatcttatcgagataatttcttaacgctttcattaattatgaattataaattatgtgttatgaattacatcatttcagcacgaagcatatcgagtccggcacgaacgatgcgttgcaattccagtttcgaagagtcgacaaattcgcacaaagcaaagtcttcgggcgccacttcgtagatacccagagcttccatgcggtcgatgtccccggcaatgattgctttgatcaggaattcaggcagaatgtccatcgggaatactttgtcgtattcgccggacataatcatgtggcgttcgcctcccttgatacgggcatcgagcacatactccttcttattccccatcaaccagctgaaatacgagcggttgacgctgaactgattgaaacggggcatgatccatcccagcatttcgtggatgtcgtcaccttcgggaatcactgtgagctggctgtcgaaagcgcccaggaatccgttcggcttcacttgtttgcctgtcagcacattgccgctgatgtaacgcaactctttgtccttcgtcacgtttccggcaaacacatgggtcagcagtgcgccgactttcagtttgcaataagctggtttcaccacttcagatcctgtaacggctacggtacgagtcagatccacccgtccggtattgaacagacgtccgatgaagattacggcttccgcgccgatagtccacaccgtctcacctttcactacgggagctacgtgattgatttgtacccctacatttccggcagggttcggtccgtcaaatacggttactgtgacatttttagcctgtgtcagggctgtcgatttttgtttgatgctgatacccagatacgttttggctattttagccagggcatccagtcctgtctggaaattagcttcttcccctttcagaacgtattcgaaatcgggtgccagcgggttgctgtcgaaagcagagatgaagatagcccgcggagcgactgtcggatcggcaatcacgtcatacggacgctgtttcataaatgcaaacataccagcttccaagagtgcagctttcacagcctcgccatcgagtttggatacgtccttcttgccgaattcttcgtaatcctgctctgcggcagcctccaccacgatgttcagcaccttacggcgtgcaccgcgctccacgcttgttacaacgccgctaacgggcgaaacaaatttcacttcaggatgattcttgtcgataaacaagggtcccccggccatcacatattcctgctctttcaccaccaccttcggagtcactcctgggaaatcatcgggtacgagtgcgtagaatcccggttctttcaccgttgagagctcttcagcagcttttcctttcaggttgatgtcaaggcctttacgtaactttattacatttgccatgtgattatataaaataatggtttcataatttgcccgcaaaagtaataaataataatgtgaataaagaggaaaaatgaaaggaattacggaaatttctccgtaattcaccctttgaacaaacatcaatagataaaaaaggctaaaaaaacgaggaagggttttgaacgatcgacgatgaacggttgttgaacgatggaccgttaacggtgattaactgtgaactattaacggtggttaattctaaacgatcagtgtttgtgaacgaggaacggttaacaatggataacgaagggatgtagagagatgtagcagaagaagatgacggaaggaagcaatctccggcagcactgagggataattttaagaaaaaagggtgtagccatacggggctgaaggtgtagccttaacacaaaaagggtgtagccctccttcccgtatggctacaccctttcatttctatgttaccgattaccggcccatccatcgacggtcaatccgtatttatttccgaccgttgatcgttcgccgttcaacaaccgttcatcgccgatcgttcaaaagcgttcactgttccggtgcaaacatcgggtcccaagcaggcaaacggattggtttctgcttcaggatttccaacaccttgggagttgcgaatttcttctccactaccaggcggaacatgtattcatcaaaccattcatccgtcataatcagatgtccctgatagccgttggttgccccccaactgttttctaccatccatttcaccggtttattatctttgacatccaccgccatcagagtcatggcatggctcgatccactggcaaacgtctgcacgcgttgttttttgtccatcccgaaggtagttcccatcagcgatgcataatcataattgttcacgtcgagcaatcctcgctccgagttcaggaatttgcccacatcgcacgagaaatacatcattgtgctgtccttcagtgatgcgatggccatctccttgatttcgtcagcaggcagattgacgtaggtccagttacgtccgtcgtagcggtggcggtcaaaatcaatttcgtaacatttataatattcgcggctcggatcattcatcagcatcacgtagttatccagcaggttcttgtcaccatatttttccaggaaagacatcggcgtatattgtgcagtctctaccggatttcccttctcgtccttgcgtgtccaggtaaactcggtgggaggaatgcccaggttgagcaccagcatacggtatacggtgcccagcatctccgtcttgtccttctcgagcgcaggctgtttggccccctttgcggcgcggtcgcgcagttgcagaccatactcacgcagtttttcggcaatcagccctgccatgcgcgatgtattctcactgctgttcgtctcgggcatcacctctttgggtaccaggccatatttagagacaatgtcagccaccccggtaaacgtgccgccatcactcaacggattgcggaagagccattccaccattttgtcatccatcggcttttcgcgggtatcgataacgccctgcaggaaaagattggccttctccagctgatcccagaagaagttgtagttctgcgaaaattcaaaagaccccagtccataccgggctattgctttggcacgcatcacgttcagcccggtgaacagccagcaacggcccgacgacttctgatctgtaattccttttgagtcaactttgatggaaaagtgagtatccatccccttcaggttgtcctgattcagcgccagcttgcggatgtcattgttaccgattgcattgcggatggctttgtcggttgtcgtgccttggtagctttgtttgatttggttcagcatttccggactgatacctcccttgtcttgctgcgcgcatacggttaggaatgcggcacttagagcaaaaacagataatattcgtttattcatgtggtaaagtaatttggttaataaaggagtcttctcctttttcttttgcaaaaatagtatccttttccggaacttttgtcacagtatttagatttattatctatttggatgaaaacttatccaaataaaatagtttcctttgcaccaatattcatacaaagcaatgaaaagatatataataggtatattgatggcgatcatgcctgccgcattcgttgcggcccaagacaaaggcatttcaacagtaaaagacggacagacagccgtcggcaacacattcaacacggacacagccaagcaagacagcacccctgccctttcgaaacgtgaactgcggcgtcagcgggtagcccagcgcaaccttcattacaatattctcggagggcccagctacacccccgacttcggcctgctgattggcggaagtgctttgatgacttttcgtatgaacccgagcgacaccacccagcaacgctccgtggtacctgtagccatcgcactgatgttcaacggcggactcaatttgttctccaagccgcaactattctttaaaggcgaccgcttccgcatcttcggacagttcagttacaaaaacacacaagaaaacttttacggcatcggttacagcaccaataaagattatgtgcgcagcgacaccaccagccagtaccgatacagtggattacagatcaacccctggttcctgttccgcctgggtgaaagcaatttctttgccggcccgcaggtcgacctcaactatgatcacatgtacgatccggccaaataccttgtcgaccagccctcttacaaagctgccggcggcacggacaaaggctataagaacttcagttccggtgtcggcttcctgctgacttacgacacacgcgacgtgcccgccaacgcctatcggggcatgtacctcgacttccgtggcatgatgtaccaaaagttcctgggaagcgacaataatttctaccgcctggagatagactaccgccaatacaagactctgcgcaaacgcggcgtgcttgcctggacggcacaaacgaaaaacgtgtttggcgacgtccctctcaacaaatacgctctcagcggtactccgttcgatctccgaggttactacatgggccaatatcgtgataagtcgtcacatgtcgtcatggcggaatatcgtcagatgatcaatacggacaaaggcaattgggtgaagcgcatgctcaaccatgtgggctatgtggcttgggcgggatgcggattcatgggccctaacccgggaaaaatagaaggtgtcctacctaacatgggtgtgggtctccgcattgaagtgcagccccgcatgaacgtccgcctcgacttgggacgcaacatggtgaacaagcaaaatctgttctacttcaacatgacagaagcattctaaataaaatattaccgcattcgatgctttatttctaaaaaaaaggggtatatttagggcattagttgcaaatttgccttatctttgcacagatttcacaagcaaatagacaatatatacaataaatatacccgtttatgaaaagaatactattcatattcattagtatacccctactcttatttggtgcagcttctcttgtatatgcgcaggaaaccagcgattactctaaactgactacggaagattacaccaacatctcactccctcccctcgatctgttgttcgaaaacgccaaaggagggccagtttatgaactagcaaccatagaagagcagatcgaacgcaaattattgaccaaagagaagaaagctgttcttggcttcatcaatgtaagaggtagctaccagtggggaaagtttggcagcgattatactttcaccgatgtttcaacccccatactttacaattactcaacatccaaacagaaaacatacacagtaggtgcagcagtaaatatacctcttgacgacctgtttgatttagctccacgtgtaaggcgtcaaaaactaaatgtaacaaaagcaactttagaacgggaagtaaaattcgaagaattaaaacgggagattatagagttgtacgcgacagcaacttcacaactcaatgtactaaaacttcgtgccgaatccctcgtacttgccaatgtacaatacaacattgcagagaaagactttaccaataacgctatcgaatccggtacactttcacttgagaaagagagacagtcagatgcattagaggcttttgaaaaaagcaaatttgagttgactaaaagtttaatgatcctcgaactgattacgcgtaccccaattttaaaaaaataaactcaatcattattatggattatattttatatctactccgtcctttatggcgtgttcgttggtggattattataggtaccttgataatcaccaccttcgtctactatcgagccggtaatgcccataaaacctacaatgtagacacaaccctttacacaggagttatatccggttatggagttgaagataacgccatcgcggccaattgggcgatggctcaaaacgcaatagacaatctaattaacattatacgttcggagagtaccttgaaacgagtatccatgcgtcttttttcacgtatattagtgcagggagatccggaaaaagaccaaaacggaataacctcttccagctacaattatgtatataaccacatgaaaggtagtccggacggtaaaactttaatttcacttatcgataaaaccagtgaagaaaacacactgaaaaattttcagaaatatgaaaagcctgaccgaaataattacatatacgggctcttttattatcagcatccttacttcagttacacagcccttcaaaatatacatgtagataaaatcgggaatagcgatttattaagaattcattattcagcaggagatccaggtgtagcctacaatacaatcactcttttgatggaagagtttgttgtagaataccgactcttacgttatggggaaaccaataaggtaatatcttattttaaatctcagttagacagtatcggtagcgaactgtctaaacatgaagatgacttgacacaatataatgtagacaaccgaatcattaattattatgatgaaaccaaagaggtagccgccattaataaagaattcgaattaagggaccagaacgtccggtttgcctataacagttctaaagccatgctagcagagttggaacggcagatggacagcaatgccaaactggctatccaaaatacagacttgatagataagctgagacaagcctccacacttacaggtcgaatcacagagatggaaaccatctcttcttcagactcaaataccgatcaacaactgcagaattataaaaagcaactggctcagacccgtcaggaacttcaaaaaatatcgaatcgatatgtaggaggaaaatacagtaaagaaggtatttccaaaactaatattgtagagcaatggcttgaccaaacacttcgctttgagcaagcgaaagcagagttggaaatagtagaaaagaacagaaaggaaatggacgccaaataccgtttcttcgctccggtgggtaccaccattaaacgtaaagaacggttaatcaacttttctgagcaaaattatctggctaacctgaaaagctataacgatgcactgttaagaaagaaaaacttagagatgacctcttccacctttaaggtactcagtcccgctacttacccgatcagccatgaatcgaccaaccgaaagaaaacagtcatgatggcatgtgtagcaagctttatattcttagtggctcttttcttgttgatagaactcacagaccggacacttcgtgacactattcgtactcgcaagttgaccggttgtccaatcttgggatcgtttccctatttgaccaaatcaaatcctatctatatccaacaagataagattgcaacccaatacctgaccaactctattctcaacttcttatctgacaggaaagaagggcagcctttcatcctcaatatactgagtatcgaagcaggtatgggtaaaacctatcttattgaacgtttacaaaaacttctagaaagcaaaggaattaaagtttgtacactgaccgacaagatcaattttgattctgcttcgtctacctacacactagctcagaatatctcggatttgcatattcttcaggacgaagatgttgtcatcgtagagtatcaaagccttgaccgaattagtgtaccaactcttttgttacaaagtgcctcaatgaatttattagttgtctcagcccttaaaggatggaaaaatagcgacagagccatacttcggaagctaaagttacagttgggcaagtccccttacctatacttaaacaaagctcccagatacgaagtggaaaattatactggaatgctacctccttacacctttatccgtcgactcttgtatcgtttgtcccagtttgcattaaccgaaagtttcataaactcccgtgattcattaaaaaacaaacgtcagaatcaagatgatgatgaatgatgaagaattaaataaagaagcggattcgggtaagtccgaatccgccttctatattttatttgcgatccaattaatcctaatcgcaattggaatgtttatgcccattcagatgggacttaccactttacccctgttcacactcttggcaattatcacactaatacgttgcaattcacgacaactgaacaaggggcagggaaacaacattatggtccacctgtttatctgcttggggatattctgtacattagaaatgtttaacaacaaccatgtacaatcagcatggaacatcgccatcacccattactttttctatccgacagtctgtgcttttctggttcccatagctatccgaaactataaaggtgtagaaattttgctcatcatctggtcactttttgtcctgatggcatcttttaaaggatattggcaaaaaaatcatggtttcaactcccaggaactctatttcttatataatttgggtggataccgtacccatattatctggtctggtatccgttacttctcctgtttttcagatgcagccaattatggagtacatgctgccatggccgccactacattcggtatcgccgctgcttttatccgaaagagactgatgaaaatttatttcattttagttgctttatgtgccatttacagtgtagcaatctcaggtacacgtgctgccgttgccgtaccgcttggaggaatattgttgtatatcatcatttcgaaaagccgaaaaggcttcgctatcagcagcatcctgctgatagccgccttctcttttttctacttcacacatattggtaatggaaatgcctacatccgaaagatgcgttcagctttccaccctaacaaggatgcttcctacataacgcgagtcgagaatcgtgaaagaatgaaagaattaatgttaacgaaacctttcggttatggactgggcttggcaaagggggagagattttcccctaaagaggtaatgccctatccaccggactcgtggctggtggccgtatgggtggaaacgggcatcgtgggatcagtgctttatttacttatccacggagtgcttttcgcctggtgctcgtggttgctgatgttcaggatcatgaaccaacgtctgagaggattgctggccgcatggctttgcatgaatgccggattctttgtcgcggcttatgccaacgacgtcatgcaataccccaactccatcattgtctatacgggctttgctctctgcatagcgggaccttacatcgatccggtgatgcagaaagaagacgaagagctggaaagggagagaaaagagaagaaaaaagagattgattattaacgaaataaaaaagaataaagggttcatcacagacatccatgaaacaaatacctcctttaatatcttttatcaccatctgttacaatgggctggacgacacttgcgtgttgatagaatcgctacgcgacacaatcagttccgtcagttatgaaatcattgtggtggacaacgcgtcccgccaggatgaagcctccctgatacaggagcggtatccctttgtacggactctccgcagcgagaaaaacctcggattttcgggaggaaacaatctcggaatacagatagcacaaggaaaatacctgttcctgatcaataacgacacctacctgaccgaagacggactgcccgccctgatagaacgattggagagcgatccccgcatcggggccgtatcacctaaaatccgttttgcctttccgccgcaaagcattcaatttgccgcatataccaagctcagccggtatacgatgcgcaataaagcattgggcatgggatgtccggacgacgggactttcgacactccacgccccagtgcctaccttcatggagctgcgctgatgctgaaacgggaggtcatctggaaagccggactgatgccggagatctattttctctattacgaggagctggactggtgtaccagcatgacgcgtgccggctatcagctgtggtacgagccgcgctgcaccatcttccacaaagagagccaaagtaccgggcggcaaagccccctccgcaccttttatatgatgcgaaatcgaatgctttacgcctggcgcaacctctcgggaatggaacgttgcttggctatcgcttaccaaatgttgatcgtagctcccaaagacagcctgtgcttcgtcctgaaaggagagcccaagctggcaaaagccgtctggcacggagtgaaggctttctggaagctgtgttgagtgacagtccaccacagattacacaaattaacacagagaggagtcattttcttgggggatatccataaacgagaaagtgaaatctggtggaactctctgagattctgtaagattcagtaagcctctgccgaaatatatcctctgcgttaatctgtgtaatttgtggtgaatcacaaccgaaccaatttacataaatatatcgacccataacccatataagacttatgatactaatactaaccttgatcgactggctcctgtttataccactggcactctgcgtagcctatctattggtgtatgccattgcgtccaagttctaccgtgctcctctctatccagaagcaaataagcagcaccgcatcgctgtttttttcccagcttacaaagaagacaaagttatcatcgactccgtccgctctttcctcgggcaggactaccccaaggaattgtatgacgtgtatgttatctcggaccacatgcaggactccaccaacgaaaccttgagtcaacttcccatccgcctgctgacagctacctatgaggacagttccaaggccaaagcgctcctgctggccatcaatgccatcgaggaggaaggaaaggccggaggcttgcgcgaccgccaactggcccttatgtatgacattgccgtggtgatggatgctgataatgtgaccgtacccggtttcctgtccgaagtgaaccgcgcctactgtaccggggtctggtcgatgcaagcccaccgcactggtaaaaacctgaatacggacatcgccctgctcgacggggtgagcgaggagatcaacaacggattcttcagaagcgggcacaacgccctcggactatctgccgggctggccggttcgggaatggcttttcactacttctggtattacaacgccgtgcaagaactggagactgcaggagaagacaaagagctggagcttgcgctcctcgagtgcgggatacacactgtctatctggaacacctgcccgtctacgacgagaaaacgcagaaaaaagagaacatcaagaagcaacgccgacgctggatggcagcgcaattcggcattttgtgcgagggactgtccttcattaaatacgtcaagcagatggaaggatggtggcgatggtggcctactttcgatcttgtcgacaagattatccaatggatgctccctccacgcctggtgcaactggccgctgttttcggattcacgctgctcaccacactggtctaccgtccggcagcgcctaaatggtggatgttgtcggcagcacagattgccgccatgtttatccctgttccagcccgcctgctcaacggtaggctactgaaagcactaatgcaggtgccttcgctggcattgggcaccatagccagcctgttccatctcaaaggggccaacaagaaatttatacataccgaacacggtgagtgacacgagttcactacggaagtccgcagagttccactgattttttaatctttcgttaataaatatcccccaaaggactcctctttgcgagaatctgtgtaattctatggtgaaactatactcatttttattccgattccccctcttgaactgccgaatcactcactatatctctgttgccgctgcagtctggttggatacttaccagcgccagctaccaagagatattcaatgaaatcatccctcaaaatttatccttatctctgaaagctgagaacctgaacaaattttcatatggattttaccgatctgttttgaatttcttttcggtctatttttcattttttatctatcacatagttcgctatgtttcccacaaaagcgagaaaatgtcctcaaacacaaatctcaaaacaatatcgaccaaaatttaaataggaacttaaagattcattatcattttttattattacttttgccattcgagatcataaaaagaatagctgcacagatctgtacattgccatcataaaggcaaattgattgtgatgaatagtcaaaaagcatcttgtggggcaaacaaaacagactcattatgaaaatagttttcttatgtgactccatcttttcgtatggaggtgtacaaaaagttttagctgttattgccacagaattgtcgaagtacaatgatgtgatcatactgactcatgataaagcagaagagagtgacgccacgatgtacggccttgaccgctctgcagtaaaaataatatttatgcaccgcgacagacctgcagcctgggaatatctaccatgcaagacctatagttttctatacaaaaaggtgttgccacacaaaaaaatcttttcaataatctacaatcatagttctttttcatatacacagcagaagagacttgaggaacacctgaaccggactcaagctgatatcataataggtgtacatgctttcatctcaataaaattagccattatccggaaaagactagaagccaagaaggtgataggctggatacacacctcctatgaagctttattcgaccctcaaggagcttatctacctagacaaaaagagcagttccgatacatcattcccaacctcaactcagtgatcgtcttgaccagacacgaccgcatactatataaaagccagttgaacatcgaaacgatcacgatacacaaccccgtaacccttgaagaaacacacatactaccgaaggaacggatacaaaaaagatttctagccataggaagattatctcatcagacaaaaggcttcgacttgcttatagaagcgtttgcccagttccgcctcaaacatgacggatggatactcgacatcataggtgaaggacccgaagaaccactccttagaaatctgattcgtaagcaccggatggagaattccataaaaatacatccgttcacgcagaacatagcatcttattattctgcctctgatgtcttcattttgagttcacggtgggaaggctttccacttgtgttgtgtgaagcgatgtcaatgggactacccgtcattgcctcagatcttccagtggtaaaagagatactgtccgatgaacaagactgcctaatatttcaaaacggttgtgtggcaagtctggcagaaaaaatggacagaatggtgaccttaaaagacattcacaccatgggaaaggccgcattcgcaaaatcgcggcatttcttggtatcggatattatcgaacaatggaaaaagttaattaatgactaaaacaaacccaatgtcatctatcaaacaacaactcttgtctggagtgttctataccgctctagccaaatacagcggcatcatcgtatctttggtcgtggctggcgtattagcacgacttatttcaccggacgacttcggtatcatggctgttgccactgtcatcatcgctttctttaacctatttacagatgtgggactctcacccgccatcatccaacacaaagatttgactaccgaaaatctatcagaccttttctcgtttaccatttggaccggaatcgggctatctctgctctttgcagccgcctcgtggcccatagcggcgtattatgaccgcgacattctgcgcatcttatgccagctgctggccatcaatctatttttcgcttccgccaccatcgtccccaatgcactgttctaccgcaataaagaatttaagtttatagccctacggagcttcgtcattcaattgattgccggagcagcggcggtgactgccgccctttgcggagcagaactttacgcacttgtcataggccctatcctgtcaggtatactgatctttatcatttcgatccgccattatccacaacatctcagactcacattgggacgaaacgtgctgcgacagattttctcttattccgcctaccagttcctcttcaacatcatctgctacttcagccgtaacctcgacaagctactgataggtaaatacatgggcatgtcttctttgggttattacgagaagtcatatcgcctaatgatgctgcccttgcagaacatcacccaagtgatcaccccagttatgcaccccattttcagcgactaccagaacgatcttgaacgtttggcatcgggttacgagcgcatcgtccgctttctcgccttcatcgggctaccgttgagtgtactgctttactttaccgcaagcgaagtaacgctgattattttcggcgaccagtggatgccctccataccgatattccaaatactcaccttgtcggtaggtatacagatcattctctcctcatctggctctatcttccaggctgcgggcgatacgaaaagtttgtttatatgtggtctgttttcgtcggcactcaacgtgacaggtatcctgctgggtattttctggttcggcacgcttgaggctgtggctatctgtctcacaatcaccttcaccgtcaatttcatacaatgttactggatgatgtaccggataacgctacaccgtagcctgcggcatttaacaatccaacttgtttcaccgttcattgtgagtatactgctaatagccgttctctatccgctcaatctactaactcgagagggtaatatttttatgaccctaattgtaaaaagcattatatttttctgtatatttgggtgctatatacagttgactggtgaatacaacatcatcggcaaggtaaatagcatcataaacaaacataaaagcaggacgtaaaaaccccatcctgaaaacaaaacaaaccatgaaagcactgtttcttatatttcacggatttgaggaagcaaacggtatcagtaagaaaattcgataccaaatagaagcactcaaagaatgtggcctgcaagtagacacctgttggctggacgatgaccgtaatcacaagcggcggatgataaacgacagcactctaaacgactacggcacaggaataaaaggtaaaatcttaaaacgaacagaatatggcagcattctaaaatacgtaacagaaaacgacatatcaatgatatacgtacgctatgtccacaatgcgagtccctttaccatccacctaatgaaacagctcaaaaagacaggcgcacgcatcgtgatggagattcccacttatccctatgatcaggaatataaaggactcccgctaccctatcaacgcatattgttcttcgataagtgtttccgtaaacaattggcacgctatgtggataagattgtcaccttctccgatcatgagcagatatggggacgccccaccatcaaaatctctaacggaatcgacttcagccaaatcagagtcaagcaaccgaccccgccacacactgacctacggctaattgcggtagcaacgattcacccttggcacggattcgaccgggccatcgaaggactggcactatattatcaaaaagatccgaccagaaaggtctgtctacacatcatcggttcagcagttccagaagtactgttgcaataccggcaatctgtacggaaaaacagattggaaccctacgtgttcttccacgggccgctctttggagaggcattggacaagatgttcgatgagtgtgacttcgggatcggaagtttggcacgccacaggagtcggatcgacaaaataaaaacactgaaaaatcgggaatatgctgcacgtggcatcccgtttgtctactctgaaaccgacgacgactttgaaaacatgccttacatcctgaaagtcccggcagacgaaacaccgctagatatagaagcaatcatccgcttttccaactcggtccacctctctcccacctggatcagagagtccattaaggaaactttatcatggcagaaacaaatgcaatgcgttatagaagaaactctgaaataaaaccaacagaaaaaacctgaaatgaatattcgacaactgacagacaacatccggtacaaaatgaaatacggctccacagtagagtggtacaacttttggtacatcgtcttgagacgacgccagaaagtaatcccacaagtggcttctatcgacgagacaatccgccagatcgcaagtgaaagatgctccgtcagccgctttggcgacggagagatattactgacccaggcgtcgaaaaacattggtttccagaaaggagaccccgcacttgccgagaggctcaaggaagtgctaaaaagccacgaacaagggcatctggtttgtgtgtcggacgtatttcaacatttagaacgatacaaccggaaagcacgccgcttctggcggacacattttttcatttacggcccgtggtgggactgtttactggtttcaggacgaaaatattacaacacatttgtcactcgtccctacatggacttcgcttcgaaacaagattgcggacgatggttccgagacatgaaagccatttgggaagacagggacatcgtttttatcgaaggagaaaaaagccgtctgggaatcggtaatgacctctttgacaatgtgcgaagcattcatcgtattttgtgcccgccctgtaatgcgttcagccgcattgacgacattatcgctgaagcgctgaagcagagcaaggatgtattgttcctaatcgcgttggggcctacggccacagtattggcttatgacctcttcaaatccggatatcaagccatagatatcggacacgtagacatcgaatacgaatggtggcgaatgcgcgcacggcgaaaagtgaaacttgaacgaaaatatgtgaacgaagtccccgatggaaaccgggtggctgacgcaggagaagaatataagaggcaaataatcgcaaaaataagttgagtattatgaaaatagtctattatctcccagccctttatgccccaggaggattggaacgcattatcacgtttaaagccaattactttgccgatcatttggaaggctatgaaatctatatccttacctcagagcagataggacgccccatttattataatttgtcacccaaagtaaagcacattgacctgaatgtgcctttcgactggccctttaaccaatcacgcatcaacaaactcttaaaatatccatatcattattggctgtttaaaaatcgtttctcaaagacactgaaaaagttacatcccgactttacaatttcaaccctgagaagggagctaaacttcatttcttccatccacgacggaagtatcaaaatcggagagtttcacgtcacccgccattcatatggagtgggtagcaaagaatacggaaagtcgatagtgggaaagcttagaagatattgggagaaatcattcctgaatcacttgcagcagctctctaagataatcatattaacccatgaagagaaagaattatggccggaacttacgaatctttgcgttattccgaacccaattattatcccctccgaccgacaatcggattgcaccttgaagcaggtaatagccgccggaagatacgctccgcaaaaaggattcgacctattgatagagagttggtccatagtcactagacagcacccggactggaagttgcatatttatggagatggcgtcttgcgtacttcactacagcaacagattgatcaggcaggcatcggacaaacttgttttctggaacccaccaccgagcatatcgccgacaaatactgtgaaagttccatctttgtactctcctcccggttcgaaggatttggaatggttataacggaagcaatggcgtgcggagttcctcccgtagcgtttgcatgtccatgcggcccccgcgatatcattgagcacggaaagaacggagtattagtacaaccggaagatataaatgacttagccgcacaaataaatgatctgatagaaaacgaagacaaacgaaagaagatgggacgagaggcccaaatacgatcacgccgttttttgatgaagaacattgcgaaagaatggaaaacgttatttgaaaccttaaagaacgatgaaaaagtggtataataaatatctgaatttgtttggcaaaccgttatcagaactgccagaagagacgattgaaaaggtcaaactgtccatacagcaacggcaatccgaacaacctttggtttcggtggtactaatcgcccataacgaagaactccatttgctgagctgtctttggtcattggcgaacaatcagacgaactaccctattgaaatattagtcgtcaataatctttcaacagatcgtacagaagaattgctccaaaaattgggaatacgctatttgaacgagatacaaaagggtcccggacacgcacgccaatgcggtcttagtcatgcgagaggagtgtatcatctttgtatcgatgccgacacaatgtatcccccccattatatacacacacatatcagggagcttcaaaaaacaggtgtagcatgtacgtacagtttgtggagcttcatccccgacgacgatcactcacgatgggcgctatggatatatgaaacattgagggacatccatctgcgaatacaagccatcaaacgtccagaactatgcgtacgcggaatggcttttggtttcagaaccgattgggcgcgtcgcttcggatttcgcaccgacatccggcgcggagaggacggctcactggcattggcactgaaatcttgtggaaaagtggtattcataaccagtcgaaaagctcgagtgttaaccagcaacgccaccattaacacggacggttcattattcaacagcttccggatacggttcttaaaagcaataaacggctttaccggactctttacaaaaaagaaaaagtatgaggataaagactccaacctgctgaatttttaaatcagagaggcacactccaataatcaaaacataaaaatatcacttcaacaaagaatatacgatgaataaattatttcaaatatacgccactctctttgctatctgcctgtgcacatcctgcattgatgaaaaaagcctgtatataacccctcagaaaatatcatacctgtatccttacgcaaatgaaaagagtcattcggacgcggaaattactattgaactaaaaaatggccatgtatccgcccaggaaatcatcgaaaacggaataagcatcccaccgctcaaatacaacaaatcgatgttagtgatgctgacgcaggacgattgtatacacacggcattctgccgcacatgggcggtcattcatggaaaaccggtttccgattcaaaccccttcaggctggcatcggccggcgctcaccaattactctatgacgctcaccaattattaaacggagatttacctcccaacattataactgctcaaaagacattgggatgtacggacggatgtgggaatgaaacccgtttcagtttcaccacgacaatagcgcccgaagaaaaatggatgaacgtgcagtcgaaagtcatgttcagcgaaacgaccgattatgcacgcttctacaacaaatcagggttatcatggtacgatatagtcgagttattgaactatggaacaggcatcgcttttcatgatgtaaaagctgccgatgtaaatgcagctgaaaacatccgggaacatttcatcatagctcaagacagcatattgaaacatttagcaggaagagggtgcaagatgcttgcagaacccaatggaaataaaacatatctggaagccgcacaagcctacgaacctatccggacccttaccgcacagaccggaacaatcaggctcaaccccttcagcgtgaacggggacctatcgaaaaaagtgctgcacagagcattttataattcaccagccgaagtgaaaaatgcgatagaaacccaaatgaaagtgccggtggaaacgagagaagcagtccacataggtgtacacaacacagacaacggatggactgactttcttctttggctgaacgacacttatggcaaagatggcgaagattgcgtatggatgcctagtcaagaagaatattatgaatacaactattatcgcatgcatggaaagattgaaaagagcgcaaacggatcgacattgaaattgatcgtcaacttgccgagccaggaatatttttattacccttcagtcaccatcaacctgaaaggactgaagaaagaagacatcaagtcgatagaaagtaacagtgctgtcaccggactgtcttacggaaattatcaggacggagtcatgctgaacattgactgccgacggttcctggttgaacacgctacgcactttgtagagcaatatgaaaaagacaaaacaaaccaatcgaacaaagcagacgcactctactttgtaaacatgcttaaagaatcaagtaagaaagcagaattactgaaccgaataaaataacagatactatgatgacaacactgcaaacccttttctggctctccctcttcctcgtattctatacccacctgggatacggaatactgctttacatgctggtcaaactgaaggaactctttgtgaaacctgtccggcgacagctccccccggacaagagactgccggacgtgacactcttcatcacagcctttaacgaagaagaggtggtggacgagaagatgcgcaactgtctcgggctggactacccggcggacaagctgcacatcgtgtggaccaccgatggaagcaacgactctaccaaccagcgactggaagactggccgcaggccaccgtccacttccaacccctgcggcaaggaaaaacggccgccatgacacggggcatgatgctggtggacacgccgctcgtagtgtttaccgatgccaatacgatgctcaaccgcgaagcgatacgcgaaatagtccgggcttttgaagacccgaaggtgggatgcgttgccggtgagaaaaggatagccgtgcaagaaaaagacggtgcggcggccggaggagaaggcatatactggaaatatgaatcgacactgaaagcactggatgcacgcctctactccgccgtgggagccgcaggcgaactatttgccgtacgccgggagctcttcacagtgatggaaccggacacgctgctggacgacttcatcctgtcgttgcgcatcgccatgcagggatacaagatagcatattgcacgcaggcgtatgccatcgaaagcggatcggccgacatgcgcgaggagcagaagcggaaagtgcgtatcgcagccggcggactgcaatctatctggcggctgagagaactactcaatccgttccgttacggagtgctgacgtttcaatacgtatcgcatagagtgctgaggtggtctctggcaccggtgctgctgttcgcgctgcttccactcaacatcgccattctactggcggggggctcccctgtctgttacggcaccatcctggcactccagctcctattctacatcatgggaggatggggctactacctttctacccggcaagtgaaaaacaagctgctcttcatcccgtattatttcctgtttatgaacattaacgtaatgaaaggtgttaactaccttcgtaaaaagaaaggaacaggagcatgggaaaaagccaaaagaacaaaaacggaatccttaaaccaataaatcggacaaagcatggatagaatattgcatgacgtagacaatgcccacaagatacttcaactgacatccgacacactgatcttggtggacaaaaacggcacgtgtctggacatcgacccacacagcgatttgtggttcctgcaagaagacagactcttggggaaaaatctgttcaacttgcttcccgaccataccttccagaaactgctaccggacttcaggcgggtgacccaacaggggataacggtgaaccgtaactaccggctgccactggaagggggcgaaacgtattacttcaaatgtatcatgcagccgtacgacggtgacaaggtgctgtgccaatatcgcgacatcacggcgcgcagcaacgtgaaactgcaactggaacgcaccaactacgagctgaaggagatacaaaaagcggcacaaatagggcaatggaaatattcatcgcgagagaggacattctattaccggggatacaacggaatcgtatgcacggaagaagagcggagcatcaactttcaggattactacgaaaccatcctgagcgaagatctgcccgccgtgaacacatggatggaagccaaccgccgcgaactcctaaaggaatacatcgaataccgcatcctgctggaaggacaggtatattatatgcgccagcaatgctacctgcggaatgaagaagaagatggcaacatcgtcctggaaggatatatacagaacatcaccgacatacagcggaaacgaaacgacatcaacacgctgacgcatgccatcaacaatgccaaagaaagtgtgtacgcggcacgcagagacggcacgctgatatttgccaacaggcagttcaggctgaaccaccggatcgcggaacaggcggacttgtcactgatacgggtgttcgatgtcgtgggcgatatgacctgcatagaggactgggaagaacgttaccgcagcatacgggaaggccagaccctcaacttcctggcctaccaacccctgaagcacgataaaaacacactggcctttgaaggcaccatgtacagtgtgacaacggacgacggagaagaaaccttctggtcgttcacccatgacatatcggaacgtatccggtacgaatcgcagatcaaacgcttcaatcgcatcatggataccacgatggagaacatcccggcaggtatcgtggtaaaagatatcgagaacgatttcaggtacatctaccgtaaccgggagtcgtacaaccgggacatcagctcagaaaacgccatcggaatgaacgacttcgactactacccgccggaaatggcacagcagaagcgaaaagaggatatggaaattgccgctaccggaaaagggatgcactggattatggagggcaaggacaaaaacggaaatctgctgattctcgacaagcaaaaaatcatggtggaaagcgaggacttctctcccatcattgtcagcatcgaatgggacatcacccagctggaactgatgcgccgtgaactgatagaatcgaaagagaaagcggaaacatcggacaaactgaagtcggctttccttgccaacatgagccacgaaatacgcacgcccctcaatgccatcgtaggattctcgcgcatcatctcggagagtgacaatgcggaggaaaggagggagtattacgagattgtagacgccaacaacgaacggctgttgcaactgatcaacgaaatattggatctttccaaaatagagtcgggcatcgtagagttcacttacgggccggtgaggctgcacacactttgcaaagagattcatgatgcacacgtattccgctgtccgcagggagtggaactgaggttcgactcgccggacgaagcgctaagcatccactcggacaagaaccggatcttccaggtattctctaacctgataggcaacgcgttcaaatttaccacagaaggcagcgtaagctatggttacaaacaggaaggcgagcgagttgtattctacgtcaaagataccggactgggtatcgagcccgaaaagttgggaagggtatttcaacggtttgccaaactgaacaattttgcccagggtacgggtctgggattgtcaatctgtaaaacgatcatcgaacggctaggcggagagattgcggtctcctcggaagtgggcacaggaaccacattcaccttctggctgcctcttgagaatgtcatacaagatacggaaacgggaacgaacagccacttgcccggcgaagccgtcggaacacagccgtcggaagtgctcccggccaaagaggaaacgacggaaaaggaagaggaccttcgggcaaccgcagccggaacggagaaagccaccatactgatagccgaagacacagacagcaacttcgacctgctgaacgctattctgggtagaaaataccgcttagtacgcgccagagacggcatggaggccgtgaccatgtatgacgaggtaaatccggatctgatattgatggacatcaagatgcctaacttagacggactggaagctaccagaattatcaggcaactgtccgcggaagtacctatcattgcacaaagcgcatacgcttacgaacacgaccggaatgcagccgaagaagccggatgcaatgactttatctcaaaaccgatcgctcaggaaaagctaaaggaaaagataaagaaatggctgaaataaaccaattcaccacggattacacggattgacacggctctcctcggagtctgtctgaattccgcttgagatcaaccggataaataatcaatctgcgttaatccgtgtaatctgtggtgaactaaaatgcgaaattcaaaacaatgggaaagaaagctgtatccaaactattttattgtacgtctattgcactgacttttgtcctggccggcatcaccattgccggagcattcgccggacacatacctcccgagcactccactctgatgcctttcatcgggctggcgctgtcaggactgttattgatcaatcttgtcgccgccatttactgggggattcgccggaggttctggatcatcattccgttgatagccatagctgccaactggcaatatctgggtcggatcttccaacttcctttcacggtcggaggaaaagaggcaaatacactgaaaatagcgacatacaacgttgacagtttcggtaacgagcagtcgggatattcgtgcaaggagattgcggcttatatgaaagagcaccgggtggacattatctgctttcaggagtttgtcggcaaccggtactttacttcagacagcatacggaacgcatttgcagactggcagtatgccgtcattccgcaagctccggacagcacacctatcttgcaggtagctctgttcagcaaatatccggtgaaggacagcagactgatcacttatcccgattcaaggaattgcagtatgtggtgcgatctggacgtaaacggacaaacggttcgtgttttcaataaccacctgcaaacaacggaggtcagccaaaataagcgcaggctggaaagggaactggctaaaaacgaactgacaggcagagaggaagcagtggccaggcaattgttggagggactcaacgaaaacttcaggaaacgtgcggcacaggcaaagactttggaacaattaatccgcaccaccccctaccctatactggtttgcggtgactttaactctctcccatcgtcctacacatacagtaccgtgaaaggtgacaatcttcaagacggattccagacttgcggacatgggtacatgtatacgttccggtactttaaacgcctgctgagaatcgactatattttccattccaaagaatttaaaggggtagattactattcgcctgacctcgatttgtgcagtgatcataatccggtagtgatggaggtgaagatgtaaacgggaatgtatccaaacgccttttcacccccataactttctcgttataatataaaagaaggccgtcctgattacacagagcggcctttcttaattataaatgaattagttttcttattctactttcttcgtcaaggagtctgcaacatattcaaactgtcctttacctgtcactttatacttaatggtatattgtgtggtagaagagccatcgtaaatggcaaagttaattgtatagaagacatctacaccttccacaacatccgcactaccatagattgctttcaatcccggaaggaatgcttctggcaaacgttcgaacatcaacttagtaagatcggcatccgacatcgaaccataagcggaagcattttgtgccttccatgcggacggacggaagtcgaaattattattgtaagcagaaccaccataataataatcgttgttaccgtatgaagtcacatactctggatgattctctttcacccaatcggtgattgcctgatagaatgcggcagcctctacattacccttttcagccttcagcgtaaccactgtactcggatcaaagttccacttgccgtcagacaatacaaactgctctgtcttatcgacaatacgtgtattcaactcccatctcgctttttcggcagaataagtgtattcatcactgtagatattcaaagctttgccgttatagaatctgtagactactacacgtgcatcgccatcaacaggatatgccaccatcttagacaaataagcaggcaaatagttcacagccggaacatcagaagtaaagtagcgtttactctgtcccatatctccgtaatcggcatatgtcaggacatatacgctattgctcttattcttccagttctttccatcgtatactttcaccgcataagtaggagtagaaagactgttggctggaatggaggtacctaccatgatgttatcgatctgataagtagtggttttcttattggcaccatcaccttcgtacttaaaggctacatacacctttttgcctgcataagctgacaaagacactttacctgcagaagcaaacgtaccgtaaccacttgtcggcttggtaggaatgctgaaatcagaagtcacatcaacccaattggcagtaccgacatttttaccatcgaaattctctgaaatcagtattgacaagcagctagcattatagtatcccacggtcacgtcaaaagcgagataatcaccggcagtaacagaaatagcaggggtaaccatccagccgacgcatgcccctttcgtaccgtttgccgaatactgaacatactggttatcatcataagaagtaaccttccactgagtgtcaccggtagagctgataaaccagcctttgagctccttcaaatctccggtaggaagcgcctcgaagttttgccacatcaacggattctccaactgtccctctcccaacttatagtcaacgaaaacagctgttcccttttcggcatctttgaacttctcgttcaggatcttagacatctgaccttctgtcttttcattcagataaggcgcaaatgcattctcaccataaaccaacttgtattcggcatccgtcggtttcagatatttcaccgaagcatactccgacagcaaagaagacatcgcttctttgtacttatacgtaatctttgcactcgaacccttatcggcagtgtaatacttatcaagcaagaaagcaggtatgtaggtagctcctgtaatcttctctgtcagatacatgttagtcttcacattcgcgaggtccttagacaaatcgtcaggtttatgattcgctgcagaatctttatttacagaatttgtactgatagttgcatagtcagcatcagtcagcgtatactctatcttcatcaaattcgtcggttgggtcatatcgtccaatccttcgaagttgtcatcgttatatttacagccggacagcagaatcaacgacaccgctacaggcattaatagatttctattcataatttaaacttcctgtttttagattagaaattaacttttaatctcaagctataagtacggccgaatccgtagaacacattgtaagcggtcttccaatcgtgattgctaccatctgtcgcatcagaaatataagtctggtcgaataagttgttcacgttacctgacagtactgcattcagtttaccaaagttgaatttataacttgcgttcaaatcgaaagtacttgcagtcggaatacgccaaggagtagaaaagtctttctcactgttcatcaccaggtcgtttgagttcaatgaccagtcagcataattacgtgcgtataagttccagtcgatacccagacgaagggctttgtcgatcttgaaagtagcacccaaagctgcggtagtctgtgcagatccacccactttcacatctttcaggttcagtttcattgtacccggttccagtccgttagctgccgcatttacaagaacggtcacatccttaccatcgcttcccttgatagatgcgctgttcacaaattgaccttctacagtgaagctacccgaagcattgctatcccaacgccagttaccgatagagaacataccgctcaaatccagccattggaaaggttttgctacaaaatcaagttcgacaccctggtgcaaagcattcacaccctgcatattgataacagacttggtagaaaccagcttacttgcatcgtaaggctcgctaaggctgccttcatagtagtttgtgatatcctgtgaacgggtagtggttttgtccatccaacgagtgtggtaggcattgatgttcacagtaaggaagctcgaacgatagccgtatccgatttcgaaagagaacactttctcgttcactgcatcggggtttgtcgcattgctgactgttgaattaaggaaagcacctcccgagaagaatggagcacggctgatataaccgatattggcaaacacattatgattttcggtaaggttgtagttcaaacctccctttgcattccaaccgatgaagttgacagtttttgatttggcgtgtgccttgtcatagtaaaaacggtcgtaacgccagtaaccggtattagaaaccgaaccggaaatgaaggcactcaacttatctctgttgtattcaccttgagcaaatactccctcagacatcacatagccatcaaagtcacgataaacaatatcacctactttcaatttctggttcacaaatgaagaaccggcagcagcggcggcattgtttgaagccaaaacactttttcttgaagaagagtctacataaaagtcaccaccatagaggtcaaccaattcattggtgtgtgtacctttataataacggtagtctataccaccatagaaatcgaagtaatcaccgaacttagtagtataagtagaaagcagaccataccagttatggaagttcttagacttcgacattgccataaccgaaccattctcactcgcttcattcaaagcatatatttcatcatacgcaaatgtaccgtcggctttacggaaagtcatattcaggttaccattgttactgccataccagttactgcgatccgcactggtcaatccctgaccggaatagccatatccacgaccgatagaagcatacagagccgtactcaaacttgacttttcattaatctgccacaaatggttcaatgacaactgaggtttattatacacattatatgccgatgactttctttgtccgttcagcccgaatccgtaggtagggttataacgataaggcttctcaccattcatataattcttcgcaacttcctgccatccttcaatggtaagtccgtctttatttccacgctgattatgccactggggagcagcgaaagcagtaaatgacaactgatgattgtcattgaaacgctttgtaatattcacaaaccagttgtaggcttcgtagttggttccctggatataaccatcggcccaggtcttacctcccaaaagggtcatggcccaacctgatttggtcaatccggtagataccttgaacaggattttgttcaatccgtcgttacccataccataagatacgaaaccgcctttgttggcatcgattgtattagtcacaatgttgatagaaccacccactgaaggagccgctacctttgatgcacccaagccacgctgtacctgcatgctacgagtcacatcactcaaaccggcccagttcgaccaatagatgccaccccattccatatcattcatcggaacaccgttaatcatcatagcagagttctcagtcttaaaaccacgtatgttcactttggagtcaccaaaaccaccaccttgcttagttgcatagatacccggagtagacttcaaaacttcaggaaactcctgtgttccgagcttctcctcgataaagacagggtcaactgtcgatacagctaccggtgttttacgcgaaacagcaacagaagaagtgatgataacgtcattcagcaccattgcatcggctgccatttttattacgcccaaatcttcagtaccacctttctgggtgatcttcttgctgaattccttgtaaccaaggtacttgataagcagcgttgaaccggaggcagctttttgtgtgaacataccatccaagttagtcacactaccctgggtggtaccgacaatcgttacggctgcaccaatcaatggctcacctgtttccgcatccacaacttgacctttcactgttacctgggcaatggccgtagcggcagaacataccgtcagcactgcaaccagcaggaaatgaattagatgtcttctcataattctctttgttagttaatagaacttgttaattaataaattgtaaataaacgttttggaatacaaaggtaattaatattctttatatatacattacaaagatgctacaattttttaagagagataaacatattatagctctatgaaacaaaaaagccccgcaaattgattgcggggcttacatattgttaaagattagtcagctatcagctttctatatctcacacgcttaggttcttcgttgccaagtcgttttaatttattctcttcgtactccgaataagaaccttcaaagtagaacacattcgaatcgccttcgaaagcaagaatatgcgtacagattcgatcgaggaaccaacggtcatgcgaaatgacaacagcacaacctgcaaaatcttccagaccctcttcgagtgcacgtagagtattgacatcgatatcattggtcggctcgtcgagcaacaacacgtttccttcttccttcagtgccatagccagatgcagacgattccgctctccacccgaaagcacaccacaaagtttttcctggtcggctccggagaaattgaagcgcgaaaggtatgcacgcgcattgatatcgcgacctcccatacggagcaagtcattaccaccggagatcacctgataaacactcttgttcggatctatatccttatgctgctggtctacataagccactttcacagtctcccctacttcaaactcacctttatcgactgtttccagtcccatgatcagacggaaaagagttgttttaccggcaccattcggaccaataactcccacaataccatttggaggaagcataaagttcagatcgtcaaacagtagtttatcaccataagccttcgccacatgttttgcctcgatcaccttattacccaagcgaggaccattcggaatgaagatttccaacttctcttctttctccttcacatcttcgttcaacagcttatcgtacgagttcaaacgagctttacccttagcctggcgggccttgggtgccatacgtacccactcgagctcacgttccagagttttgcgacgcttgctggcagtcttttcttccatttccattcgtttggtcttctgctccaaccagctggagtagttgcccttccagggaataccctcaccacggtcaagttcaaggatccatccggcaacatgatcgaggaagtagcggtcgtgcgtcactgcaattaccgtaccttcgtactgttgcaaatgttgctccaaccagtcgatagactcagcatccaagtggttcgtcggttcgtcgagcagcaaaatatcaggcttttgcaataacagtcggcaaagagccacacggcgacgctcaccaccggacaggttagccaccgactgatcttcgggcgggcaacgaagagcgtccattgcacgctccaatttactatccagattccaggcatccgttgcatcgataatgtcctgcaactctccctgacgcgcaaaaagttgatccattttgtcctgatcttcataatattcaggtaaaccgaacttctgattaatttcttcgtattcgttcagggcatcaacaataggttgcacaccctccattacgatttctttcacagtctttgtgttatccagataaggttcctgtgccagatagcccactgaatacccgggagaaaagaccacttccccctgataagatttctccagaccggcaataatcttcagcaaagtagatttacccgaaccattgagaccgataataccaatcttcgctccatagaagaaagaaagataaatgtcttttagtacattcttgttaggttggaaagctttgcttactcccaccatcgagaaaattatttttttatcgtcagccatatataaataatgtgtattgatatttatggcacaaagataacaaaaatgttcggaattaatttgcaattatgaaaaatagctctatctttgcacccgcttaacagcaataaaggattgattcgctagctcagcaggtagagcacaacacttttaatgttggggtcctgggttcgagccccaggcggatcacataggaacaaagccaaacggcgacaaaaaagagacaagccctacaatatcaacgtattgtaggactttttttatgtttccgtcttgcctgaaagacaaaaaaggggcacgaaaagacacactttagtatccaaattatacccccttcccccaaaaacacttagggggtacgattgtcggaaaatggcttacttttaacgtgattcttccatactctatttaactcatttacagtgattaaaattagttttgcatccccaaaaagtgagattatgaaaaataagggttcttcttcaatttttagttctgctttcattatttcctttagtttatttttttgttgttacatcatagattgcaaataataacaggtgaaataaaaaaggaatcatccacaacagccattatgggaatcgcatccttccatatactttgtcggtagtgatgcttgatggccatcgccctgtcttttttgtatctcaacaagcaccacaaattgggcggaagtgttattgcaacaaatattggaaaaagaaaaattacgatctccactattggatgaagattttctattaaattcactttttccaagatatccccctagatatcggtatagtgaagagtacaaaaaggtaggagcggcaagaaaacaaaacctatccaatacaatgttattaactgatttccagaacttcttatatatctcttattatatcgctctccctgataataaaggtagtcgataaagttgtacctgtatttttgtgtttgctggattatccggttacgttcaaaataattatctttttttatgcctttcttcatttatacaaaactcctgatattttgataaggaacaacattcactaccagcaggctacattagttaccattcgatttttgtccacgggcttttctcacttttcagtaaatcctctgccatatacatcatgcctgaattggatgcgcttttacctccccatagggcacgcccgatgacgtagctcatagcaaagtcatgccatgaggaaaaacggctgtgcaccatttcgtaagcgtgatttatgtaatgccacgcttcgtcttcagagatatacttcatgtcatagcaagcacgtgccatgaagttaagacgtccggcatcccaacccgttacaccgtagcgcagtaggtcttcccgacaagtgatagtaccacactccagcaattcatcgtagcaatcttcgagattgtgcaattgttccacggctttgtcataatcctcttgactatccatgtgttgctggaaaatccggtctttcgcctcctcgtcatccaacagaaaagcttgataaacatgggagaagtaataagcgaatcccttttttccgaggtattccaaagtctgcttggcatcttgtgcattacagatgccccaccaatcggcaagaatggtgggaagcttatccttgatgtccagtgtcagggagttaagataggctccctgctgcaaggcataaagtgaacctacggacagtttcttgtactccgcttccgtcaagtgagaacggggattgatgcgtatgccctgaaaaaggcgaataaacttgcgtacggcaggccatacgtgacgataaagatagtaaacgatgatgattggagttactatccaaagcatccaattaaagtcagtcataaatatttttattggtggtttgttattaccgtaagaaatttttgcggatgttatttaatacacatgcctatttacttttagggctgtttttcactcctcctcttctttctttttcgacagccccaaaagattgaatataaaatctttcagataactcaccacaccgataaccactaatgcggcaataccatagaaaaggatgctaccaccccattgatcccaaaatgtaggcttggggataagagtgtccaattcttctacgttcaagtccctacaaatagcttctgcatattcgtccgaaatgtcgtaataagtatcaggcttggactcagagaatagtacaagggtacgtttgccatcttcttcgatatagcctaagtctaaatgactgccctcatctgttttataataggaactgtccggaagagtgattactttcgggatgctgttgtccacagggattgtaaacctcacacgtcgtgcttcaacactgcttgcaaaaaaacaggtaattaccgttaaaataaacaagaactttttcataatcattcaaaatataaaaaattagtagttggcttttaggtattagtctgccaagacattacatcattaatttgatgacgcgccaaagatatgaaacattttttataaagtaaacgaccgttttctttttaactttttttgcactagctgtacggatataaagaggcccgtgcagctacaaacaataatcccccgttagacgttatcccacttcattataaacttatcttattccttttaattcttctttcattcttcctttcagatgaaaataagccagcacgccaagagcgttgaataatgcagtttcatcttgattatgccctaacgcattatagaattttgcaacattccgataagccagaattagaaagattaaataaacaacagccaaaatccctccactaaatacaagcgtacaaatgcctatcaatgaatttctattgtatgctttatactgtttttcagcttcatcataatcatagtttgttaaataaccaaattgttgcaaatcttctctgctccatcctctctctcccaataagttgatcgcataatcacgaagctcatcatcataaccatagcgcttataatttttcactacatctatcaacttgtcattatcaaatttattaagaatatcaatatctcccatacaacttcgttttattgtttataatggttagaaaggagcatcgtcagatgctatctttcgttgttactaacttatttataaatctcaatccagtgaataaacacccaatcccaataagcggatagatcataccgcataagactgcaagcatattcaatcctcgttcatctcctgcgaagccgtccaaactgactgcttgcaataacagattggttatttgccaatccaatagatgttggtctaaacagataaagacaagccacaaaagaatagagcaacattccaaaccaaacaataacattatagctttgggctgacggaaatatagcttatagaccttgtagattaccagcatatctataaccataagcatacctaaaaaactatcttccataataccatatattccgaatagtcgcccgaaacctaagccacccaaaaagaatgttatcactatcagtaaaaggctgacagcagtcaatgatagtatagactggactgttttattcatcgcacgattgttagtaatggttcagcagggaacggcttgccgttatcttgcgttattagtgatattgttacctatattcaatttccatattattatctttgttatgctcgctgttagcaagcattgtccaaaagtaaaaattcccacaaaatagaaagacataatgaaaatgctaaaaagatagcttaatacttcccacagagttataggttctgtacttatcacatgaaccccacaacaagataaaaagataattggaatactgcaaccaatagttaagcctgcatgaaacaaaaatgcagtaagcaagccacacaataaatactttacataagaaaaagggtgtacccaatgccatgcaaaccagcttgcaaacagcgccgaacagctcacacatatataagagcctacaactcccaaaagatgcttataagtatcgattggaaatgctatactcataaacacccatgcagtcagcattgttaaacttacatatataatttttgctatatccatatatcatacaattatcactaatggttagaaaggatcatcgtttaggtggtaactttcgttgttattgatgaattttatttcattcttatttctttcaagtttataaacgtcaatttctccaccgatatatttgatatcgtctttatctctcacggtaacaggctttaatatttcctcttgtgtttcaacatatacaatacgggggaacgttaaattgccactaatgaataatcgtgtgtctatgttatcttttacatagcgataagatatagacaaataatctgtttgctgattaccggaaacaaatattatttctttcttcaactctccgtttgcacaactaacagctttcattaccactaaaggatatgccgccgctatttggcttgttcctgaaagcaggtaatatcttttattcaatgcctgaatggaataaattgtatcataacatattcccatatcattatcctcgtttatatcgaagaaatacaagtgttctttatccttatattgaatataagaagcaaacaatggcatcgaaccaccgaaataagtgtttcgggaaaataccctcatatcctcgtctactgatactgccatagtaaattgccgttcttttttcctcaattctataaaatcgtatttcatttctttatcgactgcacaaagttcttccagcaggatagagaatctatgttgtaaagaatcgcagtaattatcatctgtatagggataattttgccgtagtatagatagtgtatcttgaataaaacaaagctgtttttccaaagcaaacaagttattgtcgctttgtgccattgtcgttttcattgcccaaaaacaaaagacgatacaaaatatatatttaatctccattattttcatttgctattatcagtaatgactaagcggggaaggctgttaagcgttatcacgctttgttagtcacattattattcttactcataaattcataacagtcatctaacgaataccgagataaagcattttctacccatttctcatagctatcgggcagtttttcacattcaggatgtataagccaatacgtttcaccatatagagcaagcattgcccagtgataaatgttttcgtgagaaaagaaaacaatatcatcagtagtgcttattggctgttggagaggatgaaagtttctaaccagttgttgtgcattctctatggtagtatttccatatatagacatgcactctttcaagagttcgcaaaacactttgaaatgaaagatgattttaacatcttcatcctctgctactataatgtctttatccatgctgttatcatttataagttattccaagttgtgactaatgtattcaataaccataccttatggtgtagttcctaatctctaatatccacacctcacgaatcatccagtgtatcaagtggattgggtatgctcgatttatgggcactcgttacatgaagatatatatttgttgtcttaatgtcattgtatcccaacaactcctatatagttcttagatcagtaccttgctccaacaaatgggtagcgaaagagtgacggagcatgtgtacatgtacccgatgtttgatacctgcacgttcggcagcctcttttcagtactttaaccaatgcgctcgccgaatattgctcaccgggactatccccctcaaacagccatttcttcggacggtactctttgtaatatgttcgtagctcattcaatactttttctgataacaacgaataacggcactttttccttttacccattatgcgtactaacatccgttcgctgatgatgtctttcgggataaggttcagtagttcgcttcttcttagtccgacagaatatatcaacgaaatcatgcaatgatgtttcaagttaggcaaacaggagaggatacgacttatctcattacggctaagcacttcgggcagtgtcctgtactctttggcacctgtgattccgccgtaatattgacacttcccacctttcactctctcgtagtagaacttgatagcgttaatgcgcatattctgttgtgacacggagatttttttctcatttaccaaataaagtatatagtgattgatgtccgccactttcaggtagtcgatgttacgccctttgtgatactccatgaaatcactgaaataaatcctgtaagtcttgattgtcgagggactgtaacgcttctgttccagtaattccaaatagcctttcggcagcacgtattcacgttggggtttaggatgacgaacatatacccggctgtaatcaatataagcgtggggagagtaacgggtgtagaactccggaagctggaaagtggatgcttgtatgtatgcacttccgttcccgattgttttaattcctttgtcttgcgaaagtagcaaggcaatagtctgattatcggtatattctatccgtatataatcctgaccgtctatattttgttttgtcagtacgatacttccccgttgtttgcttgcatccatgtagggcttgttttataacattacaactctcattaattaaatgatattgccaaagttataaaactattccaaataaagtaaacgatcgttttcttttttatcttttttttgcacggacaatcaggtcagcaagcaatcagcgttaaatggtggactgtttaacgctttaataaggagtaaacggcatgtagatgtttggcaagcctctgggtgttcaatccgcccataaatgccatttcaaacgaaagtcccatgtaaacctgccggaacatgactaccgcatcctctacatccacatcctctcttagttctccggtagctatggcacgttgtatagcagcacgccagtaagcataatcaacctctacaagattacggagtttttcttttgcatcaggatcgtattggagcagttgaaacagaaaatgaaaatattgggcgtgatatgtgaactttccttgtgccaccttttcccgctctgcacctatcaggtcgcccagcatatccattgtccgttgtacgccacgcacatattcgtctataaattcggcaaatgtaccgtttgtttcagtgaatttgtttcgtggattttgcgtgctgaaccaaaatttatccactacggcaataaatagttcctgtttgttcttgtagtatttgaatattccggctttcgacattccaagcatctttccaagttccgcaaagctggctttttcatagttcacggacataaacagcttgaacgcggctatcagtaattcatcacgggtaattttcattttacagcagtcttttatattttccaatcccgaaaatactattttattcccatacaaaccatattaaaggcaatagattaacaaaaataaatttgcgaactctgttggcaaatcgaagcaaggtcattttgggacaagtcatttttaggtgcaaggtgcaagcatatatatatatgcttgcaccttgcacctaagttgaaatattaataatcaaatacttgcataattcaaaacgaatgcgtacttttgaatccaagataatggagacagacatctaccaaaagcagacagaaacctataaaaaagttagtattcaaatcgtaccccctcaaaagggtaaggatagataaaatattgatatttaggactgtgaaccgagtgggttaaagacccaggcggatcacataagaacaaagccaaaacggcgaaaaaaaggagaaaagtcctacaatacgttaatattgtaggactttttttatgtttcagtcttgcctgaaagacaaaattccgatcctcggatagaagaataggttaataatatggttctctattggcatacattaaaaccagtttgaataatatttcaatagactcttgactccaatcgttagtaacatctaatccaaccaaactctttgctttttcttcggctagatcattatacaaaagcgacttcatcaaatcaagattctcactaagtacttcttttatccaatgaagtaattctgtatagaatgtccttgtaccatcttctgtagaataattacccacagagttttctttggattggacaaccatgtaaatcattggctcatcggaagaattcctcatgcccctcgatggagcaggagagacacatacaaccgaaccctcacgaaccgggaaacaatcatcatcaatttgaaaatcatataaactattagtgagaaaatttgcacattatcaatgcgaaatgatagtatattcaatagcaatatgattccttgattcattgcattcttattaccagccaattcatgctgaatagcaaggtgacaagaaaataggtttaatataacttgtttatgtttgaaccaacagttatttttgccctatcgaaggtatggcaactttataacaagttatatctgagataaatgaaacgctaatataagataatacaatgccatatattactattgaagggggttcactcacccgtgaacaaaaaagtgaattaatccgaaaagtgacagaagtagcttcggaaatcatgcaaatccctatggaattctttttatgtacggtcaaagaattaccagatgaaaatataggaataggaggtcggaccattgacttgattaaataaaactatttgcacgataaaaagaaataagatgaattacatgcagatactctcttgctggcacaaattagaacatttttctccagctattctacccaaagataaaagtcttaaaccactgaaagaacttccttggatgcgtccattagaagctaaagatccgaaaaagacaattcagtatactatctatttaggggtgttttcccagatatctgtttcggattttgtgaaagatttcttcaaagatgaacgtaataatccgaacgtaacggatgccaaagtatgctatgcttctcttaaattggataatctgggagtatatatacaaaacacattcggattttctactatgccgtgggccttaagacagttggaggcgggcaaagtgaacaccaattcttggtcggaagattttgataaattgagaaagaacctgttagagcgattgggcgagaataggaaggaacttgcggaagattactcaagttatttgtcggagacccaaacgttagaaaatcttcaacagatacaagctctaatcatacaagacttaaagtggagcacttcgccggaaactgaaatatatgttcgaatagaagaagtatacaaaaaaaacaatacttcagataaggaagaagcgaatgcagacctattaaacagtttctacatcgacgatttggagcgaataattacttcatccgtaaaaggaagttacaataccgctttccgtaattatttgagtgcctgtttgaataaagactttgttcatttcgatttgtcacttcaaccagagatcttgaaagaatgtttagtcccggagaattatccggatggttgctggccatctccccatacggcgagtttgatgcagcaatttgccgtgaatacggtcagtaaagaattatcaggggaaaagcaggagggcatattctcggtaaatggacctcctggaacaggaaagactactttattaagagatatcatcgcagctattctggtgaaacgtgccaaaaagatggttaactttactgaaccggcaaaagcgttccgtaaaataggtgaagtgcaagtgagtgagaagtacacgccattcatttatgaaccggattcatcaatttgtgacggaggtatagttgtcgcttcctccaataacggtgctgttgaaaatatttcgaaagaacttcctttaaaaaaagaggcaagaggctattcggatcaggttggctattttcggcaagtgagtgaggaatgcgtgggcgaagaaagttggggactaattgccgctgtgatgggcaataaagaaaatcaacgaaaattgatatacagcatttgggatggggactcggaggaggaaagttatactttaaaacagcaactaaaggactataaaccaacagaagaagaatggttgaatattgtcgtatcttttaaaaataaacttgaagaggtggagattgagaaatctcgtctaaccggttttatgaaagatgcggaaagcatagaaaaacttcgtatccagcttgaggatgctgaaagccatttatctcatgtcgacaaggaactagagggactgcttgaggaaaaaaatttattgtctactgagataaaaagaggtaaacaacaaaaagaagatgctatgacggaattgaaactgttacaatctacccgccccggcttctttatctattggtttaataaaacggtacgaactcaatataaaaaggccttaactgctactctcacgaaatataatcaattatccgaagaaataaccaagcagaaaacctcgttgcaagcacttgacttacgtgtagaaaaacaaagaaaaatacaagaacaaagccaaaaggactacgacaggataaatagcgactatgctcgattgtcggaattgaccgaagccgcccgtcaggaattgaaaggagcctatgccgatgcttcattttggaaacagattgaatcaaaggaggtacaggaaatctctccttggtattcgaagagacttaaacaattacaatctgaattgttcattgaagcaatgaaagtgaacgagttgtttatactacgagccaatgccacatcgagccgcataaaaacaacgctggatgttttctttaattttcttaaaacgggaggaaaccttacggaaagagaaatacaggcaatgtggaatacattttggctgatagtccctgtcgtttcttctacatttgcgtctattcaacgcatgtttagccaaatgaaaacaggaacaatcccctggctatttgtagacgaggcagggcaggcagttccacaagcggcggcaggagctatctggcgttccaaacgggctgttatcgtaggagatccttttcaaatagagcccgtagttacgattcctgagcagattgtcaataatatcagtcatcatttcggattggataaaacacagatacagacttctctttccgttcagtctatggccgatcgtgccaatccgtatggttggataacaaatgatacttggaccggatctccgctacgggtgcatcgtcgttgtgttgacccgatgttttccatagcaaatgagatcgcgtataatggcatgatgtataactccactttggctgaaagttctcaactgtttatgcggaatggatttttgcaagtagaggggaaagtgagcggacgacattacgtaccagagcaaggtgtcttaatcaggcaaatgattattgatgagatacaccacttacaggacttgcccgatttgttcgtgatctctccattttcagaaataccatctatcttgaaaaaagaattgcgtcagcctattaagcaagcactggctacctataaatcaatagaagacaacgaactaaaaaagtggttggatgcccatatcggaacagtccatacgtttcaaggtaagcaggcagcaggtgtaattttatgtctggggttggatgagaagtcaaaaggggctgcttcctgggcttcatccaaacctaacttattaaatgtggctttaacacgcgctaaacaacgatttgttgctgtgggagatggagatatttggttgcgacaaccctattttagcaaattgaaagcattaaataggtagttttacggcattaaaactacctatttttctaggattttcaccatactacttttttaccatcgtgaaagtttaccatggtgaactttcacgagatttaagtaatagatctatgtacttactcaaaatattgtcaaggcaattttgtggaattaaagtccaggagggtatccgaaacgtttcggaccccctcctattatttgtatgaaaatatgccgttttatcagataagtccgtatttttttcctatttcatggaaggcgtttatcaacctgtcacagtcttcaaacgtatgtgacgacatcacgccaattctaattcggcacatattaggaggtacaaccggaggaaatatggcattggtaaatatattcctgtcataaagttcctttgttatctgagtcaatatgtattcatctcccacaatcacaggaataataggagtcatcgaatttaatgtattaaaacccaatgctctcaatccgtttcttacatattcagcattccgcttcagtgcattctgaatgtccgtattacgcatctctttgattacttcaagggatgctgcacaaatactctggggtaaagaggtagaatacatgttgctacgggcataaaccctcaggtaatcaataatgttttgtttggcagttataaaacctcctatcgatcctattgctttactgagcgttcctgtaacgattatattttcgcgctcttttatatcataatagcttagcgttccggctccgtcttctccaatcactcccgtcgcatgggcatcgtctattaaaagcaatgcattatatttcttcgtaatctctaagatagccggaatatcggcaatatccccatccatactaaatactccgtcagtcaccaccatcataccatccttgtattgcccggcattttcttttaatattttttcaagtgctttaggatcattatgcttatatcttaccattttggcaccggacattagagccccgtcaattaaactggcgtggttgagcctgtcatataccagcaagttgttagggcgtatcaatcctactatcacacctatattggcagtgaagccagaagagaataatatagtgtcatcaaaaccggtcagcttggctatctctttttccaattcattttggaatattgtcgttccgctcaatagtggaaccccgccacttcctactccatagtcagttattacacgaaccgccttttccactactgatggtatgccggtagcatccaaataactattggaaccgaacatcagcattttctttacttcattagtttttctatcaacaacctcgacttccctaccgcaaccggaaaccattggggatttgacgtagatgtgtagcgagttctcttcgtgtagttggagttctttttggaaattggagactttttccaaaatactgccaccggggctattcttacataccgaatagtcaattttgaacctagatatgttctctttcattttagtatttatacgttataaatttgtttgcaaagataatgactaaaataaactaagcaaattaaatcgtctataattgaattagtaaaacagccacatattatatttgaattacttatttgttgcttgtaaggcgtaaaatacctatatttgcaacatatctcattgtttatacaaacaaacatgcgaagggagaatcaaactgttggataaacaagcataagccttctttgaacaactccaactgattctttaggaatgaaattttattggagggaaaaacgaaaatacctccggacttctggtgattaaattttttattatttaataagtactatataataatgatgggacagggagataaaaaaattcgaataaggagaaccaatgagcagttggataaggaggtaatatctgaatttgaaaagcttgtaggtgagtttggttttggaaatgttaatttgagtgcattaatgaaagctgctgacttagaagctaatgtgttttatagaagatatggttcgatggataatctttatgacagactggccaagcaatacgacttctggatcaataataccattgatatttccacacttaatacattaggacctaaaaagttttttgcagaaacgttcaagacattgttcaggaatctgtcagagaacagtgtgatgcaaaagttgctgctttacgaaatgacaactattaatagtactacaaagagatctgcggaaacacgggatgttatgaacttaaacttaataacattttacgaaaatctctttgcaccggcgaaaatcaatattaaaagtattgcgtcaatcctaatagggggaatttattatttgatattacataaagagtgtgctaaaatctgcacgatagactataagactaaagaaggagaaaatgctttttcagaaggaatcgactttttaactgacattatttttgataggttggagatgtatgacagggataaaaaggcaatccggcaaatgatatcagatggcataagtgaatccaaaatatgcaagtatatgggcatcaataagaatgacctgaaaacattgctttcggaatagtcacaggagactatatggacagatgtttaaggaaatcctgaagttctacagccttcctaatttagcaatatatttaatggcaatatccatacgtaaagacgaaggtattgccattattcttttcatataatgcaatctcaataatcgccttcacgttttcaataagattctaaataggcatatatacgtctttttatcaatcagttacgcttctttaattataaattctctcaataatagatcccattatttgtttatgaatatataattatcaaaaaatatattttattttttaagcaaaccatttttcgtatattatttttgttctatatttgcatgctgaggactatatagaagccatgcacttttataatgaaatgaaatcgtagttttcttgtagtctgtattaaacaaattattaacatttaaactcctaaaacatggcatttagagcaaccttaagctttgcaggaaaagagtttgacgtgctggattgcacgtacagtctcaagcgagatgtggattccaaaggacgtccatcttcaaacatttacggcggacaaattcgtctgcatgtggaatcgactgatgatacttcgattctggagaacatgaccaatcagtttaaacctcattccggcagcatcgtcttcaaaaaaggagatgaagaagccaagatgaaggaacttacctgggaaaacggatacattaccgaatttaccgaaaacatcgacattgtcggctcgcagccgatgactatcacttttgtcgtatcggctcaggtaatcaagattggtggcgcacaatttgaacagaattggccgaagtaatcatttagtattcacgtaggtaacagaagccatctgctgttttttttaatatgtggatggcttctgtagcttaaaaacaaaaaagacaaatggcaatacttgaatatggaattggtggtaatgaagtgaaagttgatacttccgaagccatcgcaaacattccggagaatcgctccctcatagttgaacagttaactgctgacgaacctataactcctgaagcggtcaaaggcttaagcactatcgaagaggtgtttgcgcacttcttacccaacattgatgttgaatttgaaaatgaagaagggcaaccggtaaaagaaaactttagatttagctcagtggcggacttcagtgtgaagaatatgacacagaatagtccattcctccataagttggatacggagaaaacattctacgaggggatggtgacacaattgcgctctaataaagttctacaacgggtgttggagaatccggaatccaaaaaggcgtttatcagcgcactggaggcattgagtaacgaattaaagaccgaataaaagacaataagaactatggaagataataaaaataagtctgaagttcaggcgcaagaaaccgttcaagtttcctataaagagaaaaacggggaatcctctctggcttcggcactggatgtgttgtccagattcggcggtttcaattttctggaatcaacagtagatggtgttcagaacctgaaccccgagcgtaaggcacgcaaaaagatattcttaaccgatgaacagaagcaagaagaacgggaagtgctgaagaataagatagatatgtggatcgacctgctgaactcatcatcggcagtgacggaaatgattgccacttctaaagctaaatcggaagctgccgcatcgcatcttgccaaaagccaattggtggcagtgcagagtgtgagggatatggaacaggcataccgtggagtgatgttgttctataagaatacggaagcggacaaagtgaacaacgtaacgatagtcaatgcttccaaagaacaactgaccgacctcgacaatccccgcttcattgatttcgttgcccgcgaactgaaacagaactatgacaagttggatttacgtcaaaattactcactgttagccattccgggctatcttggttcgaataaggtgcttgaaaaatgggcgaaaatcgcttatgagaataaagtgatgctctatacggactttgccgaccttgataagccggaagatgtggtggaactgttctcttcctccaatatggcaagtggggaggccttcaaaagcaatacctgcatgacctgcaactggctggtgggacgtgccggataccgggaaatcggtgaagaggaagacctccatgtttctccgtctattgctttgatgggtaaagtttacaccactctgatgtctcaggtaactgccggtaagaagtatggcggcattaatgaaatagatgcggtggtattcccgttgaagaaaagcgaaatctcacaactggagaaaatgggtttaattccgatggttaatgaatatggtaaagtgatggcgttctccgcaaagacattgttcaacggtgacaatctgggattgcaaacttattctgtggtacgtgtattcgactatattaccaaggtgttgtttgatttcctgaaccgccgttcgttcgagaactggagctctaaaaccgaacgtgacctgagagggcagattgtacagtatcttgatagtgtacagggagccgaccgccttatcgaaaaattcaagataatccgtttcgagcaagaccaaaagcagaaggaccgtatttatctggatattcacatgactccgttcttccctgccaagagctttgttatcaagttggacggcacgaaaggtgatgatggtacaaactggaatacaaattacgaacaggcgtaataagaataaaatatggattttttgaacatcaatgaaacagttcagagcgtaatccgaatatcaaaaggtgtcgcccgtgagtatggcaatgccagctatgctccggcacaccttttgtttgccttgatgcacaaagaggtaggtctgcgttcgtttgtcgaatcgttgggtaaggacgccgattacttgcgtgaatgggcggaggtaagaatagaggagtaccccaaggctgccggtgcaggtgagataatgcccgatccgaaagttaacgaactgtttgagcaagccgataatgtacgaatcaagtggggactgctggaaatcaatccactttgcctgctggcagccattgctacacccgaagcaggtttcagtacggacgagttgcgctcgttccctattcgggagcgtgagatacatgacctcttcacgagcggaatgggtaatatgaaaaaatccgtaagtacgcagactgaccttccggggagtgaagcccccctatggacagccggggcgggcaatttagataagtactgtacagataagactgctcttgcggcagacaagaaagtatatcctatcgtgtgccgtgaccgtgagacacgcatgatgatggaaattctggggcggatgggtaagcccaacgtgctcatcatcggcgatgccggtgtgggtaagactgctctggtagatggtttggcatgcagcatcattgagggtacagttccccaatatctaaaggacatgactatctatgagcttgacacaggaacactgattgcgggtgctacctacaaaggggagatagaagaacggctgaaaggaatcatcaaagaattgtcggctcacggcaatgcgattctcttcattgatgaaatacatacgctgatcgaccccaagtcgggcaacagcggagcggcaagcatcctgaagccggagcttgccaaaggaaatataacggtaatcggagtcactacggtggacgaataccgtaaactgattgaaccggaccatgcccttaaccggcgttttgaagtattgcaagtatcggaacctgaccttgcatccaccgtaaatatgatacaggcagctttggaaagatatgaaagctaccacggtgtgggggtagatgtagattcgttgccggaatgcgtggcactcgccaagcgttatgtcaaggaacgccgtttgccggatgccgctattgatttgatagaccgtaccctctctgcggttaagatgattaaccagagcggggaaaaagatataaagggactggcggagcagctcgccgcgattgaagcggcggaagaccagcccgaagcggagcgcacggagaagttgcggttagtcaacttcaccatgaagaaccggttaagccctatccttctgggaatgctctccgatggacagaatgaaccggagtcatcagactacggtgaatggatggattatattttaggtgtacttgaccgattgcgtgaattgaccaaagagaaaatcgggaaaatcacttcccatgaagtggcagccgttatttcttcttctacaggtatccctatcggcaagatagagtcgggcgagaaagaaaagttactcaacatggaagatattctgcgtcgtagagtggtgggacaggataatgcgctgaaggtattgacagatgccattgtcgaatcacgaagtggaatgaacaaaccgggacaaccgattggctcattcttcctgctgggacctaccggaaccggtaagactgaattggcaaaagcattggcagaagcacttttcaatgacgaaaaggcgatgattcgttttgatatgtcagagtttaaggaagaacattcggcagccctgctattgggagcgcctccgggatacgtgggctacgaagaaggtggcgtactcgtgaaccggatacgtcgtcagccttatgcggtggtgcttttcgatgagatagagaaagcccattcttccgtttatgacatcttcctgcaaatcatggacgaaggcaagctacacgaccgtttgggcaaagagggtgatttttccaattctatcgtactgtttacgtccaatgtaggtagcgaatggcttagcaagcagattaatgagggtaagaatccttctaccactgacctgatggaagttatgggcagttatttccgtccggagtttcttgcccgtttgtcggaaatcgtgcctttctctcctattaacgaaacaatgctggttcgtatctttgagatacagttaaagggagttatagcattgcttgagaagcagcatattgacattgagattacggagaaggcaaagaacctgctcgctacccgtggcttcactccgaaatacggagcacgtcaggtggcgggtacgatacgtaactatatccgccgtcctatctcaaagatgattgttgcaggaacattaacggcagaaaatacagtggttgtagacgtggcggataatggagaaatcgattggaatgtgaaataataaaatggagatactatgtttggacataaaagttttttgaggataggtgctttgagcgattccagtatttcggggttgtacaaagacagttacgaacttgaaaattgcaactttagtttttcgcaaggagtcgatggtaatggtaaaccacaaacggaagttcgtgggggaacaataagtcttacttacggtggtttacctcagcaagatttactccgctggatgttaggttcgaccaagtatgaagatggagctatcgttgtgtgtgacgacaataatgaacctttagagaaaattttcttcgagcaggcagcttgcgttggcttggagatagattatgtccaacaaggaaaaggatatattcaatctaagataacattgcaggcacgcaaaatcaaagtgggtgaaaccgcccttgaaaaccgttggacaattaataaataaaagatatgggattatttagcttaccaaagatagacagcgatttgactgcacgattcatccttgacggcaaagagtatgagatgagccaatttagcataagtttcggacagtcggttgatcataaaggtcaaccgcaagacgaagtccgtggcggtagaatgcttgttgttttgacgcaggcgctaccggacaatctttatcgttgggcaatgacttcatctcctaaaaacggggagattgtatttcgttctaaaaccgccaattcacctttgcggataatgtttaataatgcgtattgtgtgagttttcagcgtcaggttggtaatgcttccggtatgatttcaaaactattaatttctcctgatgagattctgatgaatggaattagctttgataatcactggggttaaataggtgtagatatggcttatagaaatgaatataaaacgcaaagtgaatttaatgtcatcctggaacggggggatgactatgaaggatttgtagttggcttgggatatacttggatgagtagcaaggtaattctaccggtaaatcaaaacggatggagtccaatatctcggaatgtttcggtggacgagagttttcatacgatagtctcagaaaggaaatacgatacctcccaatatgcctatgaaaaaagtttgatgcaagatgaatcgaaagttaccgaaaaggtttttgacttaatagttaagaacaaaggtaataatatcactgagataaatttaggccaaggaaagcaatatttgcccacggataatagtgaaataaatattgtaattaaagacacagggagccgatatgaaattggaatcactgccaccgataaatccaatggtaagacttataagataatgtatgagagtctgatagattttttatcggcggtacatgactcaaatggtctgcctgctgtaaataaggagggtctgaacctggaaggcttagcaggagtaggatttggaatagctgaaacggcaggagattgggctgaaaagattatgaataatcgaggagcatacctgcctaaatcgaagcgtttttcacccaaaacacttcctccgattataaggtcaccttttgggaattatgaaatttctccaaaagtaatgagtggcttgcgtggagtgggaaaagcgttagggtgggcaggaatggtactaaccggaattcaagttagagatgattatttaaataaaagatatgcagtggctggtgcaagagttgccgtagcaggtttagcttatggagtaacttttattccttatgtaggttgggtattagctattggtattggagttgctgattatatttggggagataagttttacaattgggtagataataaagcttccgaattggaaatgtggtggaatggcgtaaggttagcattatgatactctacgattatttattttattgctcgtacaaaatgggtatgcgttcaaataattttgtaggattacctgttttagcgggtatgatgatggtgatacccaatgttataatacatgtgatgactcttgattttattatgtgtggattgggtgtaacatggtttgctgagataatgaagaataaaatatttttaggattgttctattcttctatattgggacttatgtactattattactcatataaaagaagatatgaaaaaattatattaaagtatgattcaaggaggaatactgtgtggaaaaagcatccaattattgtttatattttatgcctttttgttagtatggtattactacatctatcagcgatgttttatcataaagagggtttgtttagtgtaggatagcttcgtaaaatgaagcttaatggttttgcgagaagaaatatatgtagtaaatattagataagaagcgaatgctctacgattatttattttactattcctataaaatgggtatgaggtcgcataactttgacggattacctgtgttggcaggcatgatgatggtaactcctaatatgatgttacatttagctatattgcaaattgtattacaaatattagcagttcattggtttgaagaattgttagctctaggtttgtggggacgtattatctatttaggattttttgttagtgtttattgttactattggtataatggtagatataaaaaaataattgaaaaatacaatttagaaaaaaatacttattggaaaaggcatccatttgtgacaatcttattgaacgtaatcacaaattctgtagtgtttttcgtagttgtatgcattaagaagggatatatattgatcaatatattatgcaaagaagaaactataatactatacgattatctaatgcattcctaatatatgaatttaaatttatgcttatgcaaacgcacctgtaccttcataaagagaacaccgacctaccccacgacgagtaccgggggaagtatccgctgaaacactttgattacggattgagccgtaatgtggggcgtaaaggtgaaatcacttccggcgtatgcggcggagaaatacgaatcgtcattgatggatttgctgacgctaccctgctgggatggctctttgacaccttccgtaaagaagatggagcgattgttacactggatgaacacgaaacgacctttgccaaactgcaattttcgggcgcatcggtaaggagctatcgtatgaactacgattcgcgggttaaaaaaggtgtggtgactatcattgtgatagaagccaaagagattgtaacggacaatgacttattttttaaaaacaaataactatgggctttttcgacaggctgtttaaaggaaaagaagtgtttgcggatagacgcaatccggatatggtatgcgagataacgctttgcgggcagtcgcacatcttgtccgagtttgatattgcctatgagccggataattcctcgaaagaatatatggaagcatacgccgtattttcagagccggtgaatgcggaggtagaaaactggataatgagagcggacaggaaagaaaacgggacagtccgattctatctcaacagcgatgctatggacgaaggtgcactgttcgagataaatttcagtaatgcgagctgcgtgcattatcacaatgtatcgcagggagacacatcggtaaagaccattgtgatgacttttccgtctgtccggatgggaggtgatgaatttgaactaaaacgataatactatggctatatactcactacatgaaatggcaggactactcaaaacgggtctttggcaaggcggtgaagtcgagaagctcggatacatcgggacggcagttccccatgcttcccctgcaccggcttgcgggctgacgggagtatatatcagttatgataccatgttggagagatgcgaagtctcgatgcaaggcggcgggtgtgaactattcatttcacaataccacccctataccggaacttatatgacctatgttctggaaagcaatctttccgacaggagattacttttggctaagttggaggagatactggcagaccggaggaatccctacctatggtcgcataacttgtacaaaagaaattcattcggcatcgagcgccggtatgacacaggacatagtagtatgtggggcggtagaatagccgtaccacgacaaagtaaattctttggaagatgaaacagaaatactataaactaccggtacgtttggaaaagctcttcgaaggagatatccggcaactggaaagatgttccgaactggaatccatcgaccagcacatcgaactgttgctgaccacctgtccgggtgagcaccgtttcgaccccaaatacggttgtcggatttgggagttggactttgagcgcattgtttctaccgaacaatggaaagaactgtttaccggatacgtgatgcaggcgatttccacttatgagaaacgcatttccgacatcactctctcggtaaacctacaagaagtcgtcagggaagaagttctggataaccggatgatacgtaagcgggtagatattacagtactcgccacattgaattccaccggtgctccctgcggtttcgggtacaaattatacatgggacctttatcaaacgaataatcaggcagttgaaatataaaattaaaacgtatggcaaatctattcacaaaagaaagcattaaagcccggatgttcaaacaggcggcaaccctatatgacatacgaaatatagatggcatagacccccttatccgactgctgattgaagccttgtcgggcgaaattttcaagctgtccggtgatatgcacgccattgaaagccgattgttggagaaagtcgcttccgcccttactccacacacggcattggttgccaaacccgcccatgctattgctgctgcccgaccatatacaccgcaagctactgtatctcccacagacctgttttcttataaaagcacggagatagtgaagaagtataagatgaaaaatctcttctttactccgctgcatgaaacccgcataatcaatgccgaactgaagtatctcgtgacggcggatgaattttgcacaatcactcccgaaggagaacgtgacgccactgcccgctttcgttccgatgtgccggtaatggggcggaaaatcagtatcgggatgaaaataggcaacaatgtaactaccctcaacgacttgccgttatatatagatataccgcttgtagcagataaaagcagttatctgaaattactgccgtactgccattgcacgattgccggtattcctgtagaaattaaagggggaatcgagtacgaccccacacgttcggtcagtgagaaatacgatcttggcaggttgattacggaagaaataaccagcaaatatgcttcccattacctgacattgaaagctcacggattaaaagtcagagatttgtcacgtagcagagtgcccgaagaaatctctttcctgctgccaagtgatttcattgctgaatgtgatgcggatactgtttggatagatatagaatttcccaccgctttttcaaaagaaatactggaacagataaaggtgcagatgaacacttttatcgtagtaaacaaatatccggcaaagattaccagaaaggtagattccgtctcggccattctccctttggaaaagacggaatttgaatatttcctgtttgtggattcgattaccgataaccacggagaccggcttagggaaatttccagcacacaggatgaaggtagagccggctgttattcggtcagaaggggcggttgcgaacgcttcaatgcgatggatgccaaagattttctgaaccgtctgacagacctgctatatgacgaaagcatggccttctcttcgacagacaaagacgggatgaaagaggtgatcgagcagatagaggaacgggtaaaccaattgggagataagaataaagacggagtcggaggacaggaaatgctgtcgtatgtagtcatagaccaacgttatgacaaggatacccggttaactgtggattatactcttactaatggcgaatttgccaatgacatctatgcgggagaaccgttgaatgactgtgcaaatcccgatatagacaaagatacgctgcagtttgtcacttccgttcatggaggaaagccgtccccatccgtaaagcgccggatggatatgtaccgattcatgctgttgtcacacggcagcatatacacgaaagaggatatacgcaacttctgcatggcaaggtatggcgacagcattcgctctgtggaggtaaagctggggtatgcagccggtaaaaaagaaagcgaaggtttcataaggacactggacgtgtatctacggttatcggaggggatgcaaggattggacagggaagagttcgttgtcgatttggacagtgagctcaggcggttgtctccggagacctataactaccgtgtttttattaactcatagtattcacccataaaacatattaactatggcatcgacaaacttggacgctgtaagcgtggagataaaagtagcaggaaaagtctgcgattatgtgacaatggaactctttcagtcggtcagcacacatcaccgtttcaaaatcaaagtgaactaccgtccggacaagccaagtgtctgggctatcggtcccgatgtgatattcaagcaactgggtgagaaggtatccattctcatgacccatcatgagagcggagagaaaacggaatttcacggactgatttctgatattcatgtggaaggcttcgacggtaatcagggatttgtcattctggaagggggaagtcctaccatcctgcttgacagagacccctctatggactgttatatagaacaaaacctgaatacgatagtcagcgacatacttgacaagagcggggtgaaaatgaatgtgaccaacaatcccaaacatacggacatcatcccctatgtcgcccgctataaagagacaagctacgggtttctttcccgtctgctgcgctcctacggcgagtggttctattacaacggggaaacgctacagataggagatccggaaatagatacggaaatccgtgcagggtatgatgtagatctgacgggtatcaacatcaatgccaccatccgttcgctaaaccatagtacctatgagttcgaccctgtcaatgataagttctattacgactttagcggaacgcctaaaggcgctacccttggttcccgttcggctgagaaatgcagtgaacctatcttccctaccgaagcgagactcccctcgataagacccgcatatagtgcaatggatttggagcactacggggatgccggatttcaccgcaactattcccaattgtctcaaatcagggctacgagccgttactgcggcatccggctgggagaattggtggttacccgtgtacccgaaagtttcccgggagttaagattcccgatttgggacgttaccgcatcacggagattacccatacggtaaacagtaaaggacaatatagcaacaccttctgcggtgtgcccggcggtacgcccgtcatgccgtggggagacgccgtgatgccgatagcctatccggagatggcaagagtgttgagcaatgacgaccccaagaatcaggggcgtgtcaaggtgcggttcatgtggcaggagatagacggcggcgagagctactggatgcgggtgcaaagcccggatgcaggcaagagcgagcaagtagccaagaaccgtggttttgtgtttattcccgagccgggtgatttggtgatggtaggcttcgaacaaggcaatcccgaccgtccctatgtgacaggcagccttttctataaggctaattcagagggagcagcaacggataacagtgtaaagagtatgcggacacgcagtgggcatacgctggagttcaatgatgatgagggtggagactggggcattacgattaaggatggtaacggttgtatactccatttagacactaaaggaaagaatattgaaatcaccgcaccggaaaccctgtctttgacagcaaagaacgtcagcatcaatgctgaagaaaatgttcagattgcagctaaacagaatgtagatgtaactgccgaagccgatataaatcttgcagccaagggcaatttgatgcagcagactgatggtgacatgtcagcatccgcaaaaggaagcatcaatgccgaagcaaaagccgatgtcaatctctccggtcaaaatacaacggtagacggcaagaccaaagcgacaataaacggtgcagaaacattagtatcgggcaagatgacaactgtgcagggagctgcccacaaaatagatgtaatgtaaaacatagaacgtaagcttatgaaacagattgtgacagtgactttaaatcatatatgcccaatggtcacaggtgtaacgccccatgtgggaggtccaatcataggtcccggttgtccgggagtattggtagacggaaccccggtatcccttatgggagatgcctgcgtatgctgtggtcctcctgacatgatagctcagggatatccgggagtaatggttgacggcatccctgttgtcgtacaaaactgtatgactgcccacggaggtgtgatctcggcaggagtgcccggagtcgtcatcggtagcgccacccctataaaaccgattacgatgaatatccggaaaataccgttcccgaaaatccgtacagttgatagcgtaggcgctgcagttacaggcaattcaaagaaaatgaaagaagccaaaaacaatatcgcagaattaaaaaaagaaacttcgggtcagactccaatgatttataatcttagatgggagaaagaaggcgtccgtctttattccgatagaattgacgaaggtacgaaaatggtagccgatgttaccaatattccggatggagacactgtgaaaattagtgttctgattgatgaggataatcgtattgtcaaacagtttgaaggaacagtaaaaaacggaacggttgaaatagactgggatatactatccaaacactttaaaaaggaggagtaaaatatggatgatgttaaattaggtagctataaatttagcgctgaatatcaagacataaaggtagagtctccaaagcttgacatcattgacggtatcaggctctttccaatgcgattcggcatctattgcgacagcgaggaagcaaaagcaagcgtttacccttccggtaagctcacacttctcgatggccggggcggtgcgattcctgtagtcaaaggttatggctatcatttgagtccgatgattttacgcaatggttggctatatgtatatagccataatacggaatccgtatatatctatgaatgcacaaataataaatatacattaacagggataaaaaagaaagataatgcgtctacgaagaaggattgtatggaaaaacatataaaccagaccaatgatttcatccttttactctcagacgatgtggcgcagttgttttatacatccattgaattatccgattcttttattaatgaaacttattataataaacaaccgataggttctgttttcaaatgtaaggaatggagcgatggtacaactaagagcgatattgaaagaagacatgtcgatgctgattccatctggtttatgccggataagacagtgatgccggaagacggatatgctaatgcaatagcttatgattacgaacggcttatagattctgtaaaaatacaacatcaggaaaaaagaacgaaattccgggatgtattttttgttttagacgaccctctcggttgtgtagaaaaactcattcatgatttgaacgatgcgcgcatcgagcatgaatccttgattcgttctatccagacaggagtgtctcctgaaaaaatcaagcacttacttatgaagagcgccggaatgcaaggtttagaaaatgaggaaataatctatctcttatcagagatggacttgttacagggaaaagattttgatacccggaaagaagagattaaacaagcccaatatatacatactctgctactttatttctataattttgcctattctaaagaagaaaaccatttaaaagcaggagctaaagcattagaccgggattctatcgaaaaactgttagctaccgaagaacgaaaagaaagcagagcaaaaattgaaaatctgcgtaaactgatttcattgtatattaatagtcccatcttcacccgactttgcgaacggtttaccgtagatacagtcaatatagcatccgatgaaaatgatgtgatgcattctgaaatgaaatttaaactccagagttccctaatgactatcttgctggcgctatcacctgttcctcatataaatgataaagggctggatttaccggatgcatataaaaaatacaatgacccttgcgcttctacgataaaatccatattcgatgcttttattggagaaggtgacaataaagtgggtttattactaaaagatattcctactcttgcttcgttaaaccttgatatagcaagagatactaatgcagcatataaagagaaaaatagcactggggtagatggaagtttttctgcagttatgctactgcttgacaatgcaataaatactttttggagaatagcatacgaaacaaaaaaaacaaaattagtgacagacagatttctaatagatcgggataacctgttaatagagtttgataaaggagatgtcaccagacgcctcaatgagattggacgtagccgactagacgaaacagtaatcgatggcagaggttatattcgaattaaagtaaaaaaaatagaagatttaacaaaacctgtttatattaaaactgtcgccaaaaatccaaaaaattatcaaaagtttttcaagcgtatgtcatgtaataaatcttatttagctatattttcttttatacagctatctgctattgtggagggatatgacaaagaaaatgaagaactaaaaacactagttcaaactattggatttgcatctgctattgcaacaatacaacgtcgttttattgaaacagggttggatttgagagcatcagtttcgaataggcaggcattaatctaccaagcgtctttagaacggattagattacaaataacagtacttggtgctgtaggaatgtttgctgatgccgctactgcagtatttgatgggattgcccgtataaataggaatgacaaggatgctgctacattttattttatatcagctctatcctttgctacaggcggagggctggctctattgggtcttaaatttgcttgggctggtggtccttggaccattcttgtttgcgccgcaattggattgatatgtggtttcattgctagttatttgatagatagcgatattgagacatttataaaacaaacagtcttatatgaagatataacaaagagtctcacgggagagccttaccagcaaattcaaaaactttcttccgtagaaatcagaactaatattttcaataatagattccacaaaaagaaaaacaataagcaccttaaagctttatcagattatagatatcagctcgaagcgtttttctatacccaggtaatgataccatttttcagtgctaaaatagaatacagacggaaagaatatgtttattctgcagattcacgagtacgtcctcctttgtatgacgaggtgctggtacacatttatagcgacattacacaaatagcgatgaatctttctggaataaaaatgcgtgttaagttcgttaaaaaaataccggtgggtgagaatccatattttgatgtagatttaaaagaagtgaacagtaaaagtcagaataatattccttattcatcctactttcatggccaagaacctataatgaccgacagtttttatcattatatttttcgggatggaaaccttgcgaacactttctatgccagtccagaactatatatattattatatgtgagttttaggcacaatgatggaagtatcactccaatgccccgtaacggagaagagacatttcttatctacaggtataaagttgatattccccatgtacctttagattcaagaaggcttctttatcacgaagcaaagactgtattagaacaagtatttatatctccaaacagtaaagatgtgtggaatttttaaaaatagaaacagttatggaaatggaaacagatagaaaccgcccctctacaatcagaattatagccggaatcattgtattgttatgcggatttccggtatttggggtttgttgttatggaatgtggcgctttacaaattggtcttatgaggagctatggatttttgagtatgtatggggtaagctattaatactcttcgtatccggaatgatatttttgatgtcgataggactgattttggtaggtgtattaatcgcaacaaagatatggatggggaaaagcagaatgatggagcatattatatatccctttccaactgtattaacggctgagcttgccgatagcatgaatgtagaaagagctgatgataaatttttcgtcttcaatccgagttccttaatccggagtactttggtagtcatcggggggattctttcatgcgtaggaataatcgtcatttatcgagaaataaatgatccatctagtgatctttattcacctcccataagtggaggaatagtagcctctttttttctgcttttaaacggattacttgctccttcccgtcgttttgtactagacagaatgaagggtactgtgacttttccccgccatttgttttttccacgttgtaccattcccttttcaaaagtaattccggggtattctaacggaaacttaggttttgcacatccttacagtggaattgtcattcctgtccttggtgcgtatgattccggctggtggtcattttatgtcctctatatggataaaaatcgtccgttacctcaaggggacactttcgatccttacagggagaaagactttttacgccggaaggcagaaggattccctaaaccgatatatcctaataccatacttgttacagatgcttatatgggttatatatatggtacggatgagtttaagcagagattatctaaaataaaacacagaatagtatattattatgacagagtgtcatggtattgtcagaagcatgaaatagaaataccgaatgataacgatttggtcttaatcggcatctggaaaaaacaatttgtatttaagttgtttgctcctgaaaatgtggaatatatcgtacttcccgacgacactgtattgaccgactgttttctttgtgatagtaacacagcggaggtaaaatatatcaaataacctgatagcatgaaagtacagaagtcatataatccattagaacaagtatttatatctcagattaacttaaaacaagagtagaaatatgaactcattcttccaaacccttgccttaacctaccttctctacccgatactgggattgttgctggtaggcttaggcattttcatagccaagaagaacgccttgctgggcaacaagcggctggtaggctacaccatcggtgcaattgccatcctgacgctccctgctttgttgggattccttaattacggtttcatgccctacggctacatcttccttgccatgctgtatctctttctgggcagttataacatacgaatgattgcgtgggtttttaaggacgactacaagtaccgccacgaaatcatactcaccagttttatactggtggtatccatgttgttcttcacccttgtcttcaatctctgcaatgaactgaaatatggtctgtgggcatccacctgcctgcttccattcgtcattgtctcggtatttatccgcacctatcgtatctttatcgccattccgattcccgtgtatgaagtatggagatatacagacgataccgagcaggacggatattttgacccaggcagcctgcaagtcctgcaaatagagctatacaaacaagaaagtgaccgggaaccggtcaagctcagtgtgaaagcacccgatgaaatgcaattcggcacatggttccaccggatgattgacgactataatctgaagtctccacaagccccgatagacgactatgcagcaaaagagggaggatggattttctaccggaaacccaccttgctatctccccgacattacatagacttcaaccttaccgtaaaggataaccgcatccgcagccgtgatgtaattgttgctaaacgggtaatggaacataatgagaactaagaatataaaaataaaactacatactatatggcaaagaaaaatttagtaaactggtcggactgtatgccgctgtcagccgccatcttcaaccaacatgacgattactttctggacagcattcgcgatagcatagaagtacgaaccaacagttataactacgggctgttgcccgcacggcaaaacagggatggcgaaaacggcatccgtatcagccagcacgtgaccggacacattgaagtgcggctgaaatcctgtgaagcaatcacctcttcgggcatccgcatccaatttgatgccaccgaaacgggaagcgaattagtgaagaactattctgtagaatcggatacccgtaagaatatcacgcaatgggacattatcctctccgtggatccgttccaccgggtaggctcgggtgaccccaatccggaggaagttccaccccgccatccgaactccttgccctcctatcggctgtttgtgatgcccaaaggagaaatcaatgtgagtgagctgggggcgcattacctgaccatcggacgtatccgcaaggatgccgaacgattcatggtagatgccgactttatcccgccctgtacgacgatgaaaagccaccccgaactgcaagagtatcatgccaagttcggaaatatgttccgctcactggagaattacagcaaaattatcatagccaaaatacataacagggataatcgcggcgaactgggtgcgcacatctctctgatatgccgggagatgctccgctatctcgctaccctgcaattcagttataccaataaagggttatacaatgctcccatagacgtattggaagccgtatcgagcctggcgcatattatgtatgtaagtttcagctacctatcaggaacgcaaaaggaggaaacgcagaaatatttctacgagtggagcgacgtaacgcccggttcgttcgacgagcaactcgccgatacgttggagatgctgtacgaacatacggatatccgggcttcgatggttcgtgcctattcgtttatgtacacacttgccgaattgtggcaacggctcagtacgctggaatatatcggtcagcataaggagaatattgtggtatcggaacgcacaacgggaaacaatactacgggacaaaacaaaacatggagcataatggattgatatggaacatcgcttacccaaagagataaaggggcttcttccgcccaatacaatggacaccgacttcaaggcagagctatacggagccttgctagcggaagccggattcgacaccgctcaaattatgatggtgcgtgacggtaataacctgagcaatgtttcgaaagatatccgatcggtgaagtacagaaatcatgtcggcatagcggaggggacatacatagaactaaagaccaaccgccgggggatttatgattcgctgccggagggattgttccatgaggcgctctttcccggcaaggtgaaagatttgggacttattctggaagagatgcaacaacatagtaacgaagagttctttatccgccgctttttcagcctgctggagagcgaagtggacagagaagggatacaggcacaattgctcgaattgcggtacgataaaaagaacaaatattctgattatgcgaagctctttgccgcttgctggccggtcatttatattttgtccgggcagggggcgttgctgttcatcaagttcatgccgcatgtccattcgatccggggcagactggaagaggtcagcgacgcattgtcgcagattctggaagctccggtaagggtgcgtcccaaaatggtgcaacggacaataagggcgcaaaaaccgaaccggctggggaacatgagactgggagcaaacagtgtgaatgtggggttgcttaatggtgcggaggctgatttacatatacacataggcgacctgccaacccgggaagtcgaaaggttcctgcccggcaaccgctcccgcaaagcccttgaaatgctggcggatatttttcttggcgcgtggcaggagttcgatgtgacggtcagcgttagccctgacgaacgcaagacttatttaaaaccgacgggtgacgccagtccgtgttacctcggaataaacacttatttataagaattatgaaagcaaagaacagtgagaaaatcatccgtggatatttggagtttgccggcggactgttaatcagtacggctttgagcatggcactgctcacaggctttatccatacgaatggaagcgaatataaactgatggaatccaaaacgcaagaatacgataagatttacgccagacagattgccctggtggataaggtggattcgctgtataactacctggtgctgatgggcagtaacgaccggctgaatcaggtggtgctccaaaaagttatcagtacacgcaagatggaacttatcgaggaactgcaaataatggatagtaaggatgtacttctgtacaaaaaactggcttcgcaaatcaacgtgtttctggacaccaaagaagccatacgtaaagcggttattgaagaaagccttgtgagaaaagacctgatgcggtgcattcaggacaataaacaggctacccgaaagctgacattgggaaacattagtgtagaaaagtaaaataggaaagatatgagcataacccctaaaaataaaagcagcaaaaccgttagcgagcgtgaacgctttatcggatttgtatatgtgcttaccctgtttattgttatcacaggagcctgtggatttattcttttcaagtatgcagggacacgccacatcttctccaataaaataatggtcattaaaaagatggagcggcaaaaggaatttcaaaatatacaatcagtacagattgtgagcgcagataccctattttcacgtattgaacagtttgagccgggcgtcaatgcctcttatgaggaaaatgatatcaagttcctgataaacgaccttgccaaacaatgggaaagaaacagttttgacaagcgcaataagatgttctggcatctcgcttcggtatatgaaatgtggtttgccgacaagaaagaactatggagcaagcaggataacataataaagttcaagaagaatctggaggagtgcgaagtcggactccagaagaaagaaggcgaacttaaaaataaaggaggcaagccatgatgaataaattcctaaatacgaaggttctctatatctttatctccgttatcatacttattatggtttttctgctggtaatgagagcttgctcgcagaagcagccgattcaggctactgtaactccgtctgaccctgtcgtgggggaagaaatatttttttccgattccacatcgggagcgagaatctggtactgggagttcggaaacaacgagacatccacacaacgcagcggacaccatcggttcaagcaaaaaggggtgtacaaaatacgactgaccgtcaacggaaatctggaacgctactttgatgtgagggtaaaagagaagaccaatgcggaagacctgcatctagttcatatcatagctcccaaggaagccattcagggagaaaatatcatcttccgtggcgaaggacacgacgaacaatggcgctgggagttcggagagacggggatgattgattcccgtgaaaaaacggctctttatgcttataccgaacccggagagtacgaagtattgcttaatacggagaatacccggtatcccatcagacaccggataaacattctgccctactattcggagaatgattctaccgatgtaatggtgctcatcggtttagacatcaaagagaagttgcagaacattgcagacggtaaaccctttaatgtaaactacaactatgtcgtggacaagtattttaataataacccgaacacgctggttattgtcaacaacaataaatataacgacttttattcttattgccaaggactgcaccatatcggcagaaaagaaacgattatccagaatgtcatcgtagagacggaggatgaagagagcggatatatcacccaaataacggttatgcaaatcgaaaaaaagaaatgaaatgagaaagttatttgtcctattgatttctatcgtcgttttatcggcttgtgctcccgtacaccgcttcactcaactgaggaagctccctcgtgaatattctgaaaattattccatagaggggataaaggcacccagaagcgctgcccaccgcaaaccgtggattgtctattcggacagggtggagaatgccgcctatgtcaatccgggaggcagggtaaagtctgccgaggtaggattactggatacgttcttagttatcaagaccaaaggagattatttgcggttgattaaatataaccccacaaatatcaagcacaaccgtatgacccaacgcaaaaaggcggaatatgtgggctggatgcaccgctcccgactgatactttcaccttcttccattaccgatgtacagtcgggactgcatgacaaattgttgactgcgattaccgacaccacggcaatcatgcaatccgcaacttattttacaaccgccgattcattgaaagtgtttggcgatccggagctacagaatcaagccggcgtggtgggtatccacgctattatatacgcgctcaagtattctgttgacagacgcagtgtattggtatcgaaaactccttctctctctgccgataaaatcggtgagcaggttatcggatggattcccgccgtcatgctgcaagaaatcggacatcaggtgttcacaggaacggcgttttccagagtgccggctttgcaaaagacgctgaaatatgctcctatgatatatccttaccataccgattccacctgctcgttcgtcagcggaacattagaaccggttattgacaagaaggacaaccacgtgttcaacatcaacggaaagagaatctcttatacccgtggaaatcaaatcaagcaagaattgaagcgaataaatatcctgttcgcaatggaacagtcttcccggctaccggaacaatacccgatgctgttgaatgccatacagaatctgggaccgttttttgccggttccggtgaatcgttctcctatcaattcggagcggcggtagctacccaccggggcatggagacaattccactgactgctgattacgagatacttatagaccgattggtgaaaatggcgtcacatgtagctgacacagaaaatactcctttgcctgcatggaaggcaatgagaagtgcattggaacttatcggcaatacacctgaagcggttaatctgattatatcagtcggtgaaacgggagaacagcaagagaatgctccctcttccattgtgaaaaccctgaatgaaaagaactgtcgcctgctcggttggcaactgtacgcctcgaacgacgataagtacaacaactatgtgcttcaactttcaaacatgattgaacattacgccgagtaccgcactaaaaacaagcggaatatgattctgtatgccgaccagttttgccgcagcaacctgctgcgggaagcaggcccgaattttctcatgctcgactatccctatgccagcatgacacaaggcggtttcctgtttccggagaaaggtgaaaccctgccaatggaattgtttgccggagcggtggattccatcgtaacgcagataaaagcggatcaccaactgctctctgaaagcatagaccgtgcatttgccacggttggcaacggtaaagaccgtttagacagtcttctgattgcaacctatcatctgcctcaaggggtaaaaccgaataaggagtttaaaaaaatatttggtgatgttgctccgatatggtataggaaaacagaaagaattaccgttccggacagtttgatgcgctattacctgctactctccgacccggaactgaaacagacaatagaacgcttggaaacactctgtgccatagaagtggatgtgaaggacatgaataagccaaagaaaggtaaagttaaacagttgtgccgctatttaagggaaagggtacgccccgataaggtggaaactctcggcgcatcacccgcaaatcccgaaagcaaagcagatacggtgtatgtatctaccggaaaaatacgccaccacctttatcgcttttatatgtcagaactgcgcaactgccggatctgcaaaaataagcgaaaggaaatcaggcgatattctctttcttatgcacacagtcagatatttggagttccggctaacagccctgtgcttgatgacataacggtgaaggatctcaaaaagaaaaaacagttaaccgacaaagagttggacggacttattcaatattttaaagagaggaaagaaaatatggctaagaaatacggagaagaaaaaataacgatggaaggacaaagctattactacatagcttcagaactgttaccgtaggagaaaaagtattttccaaagaaaaatagcgtaataaattatgatacgaaaaaatcataagccggcgttttgtgatgaaaatccaatagattgccattttgatgtgaaaagctttcctgccggaacaacggtgcataacaacgatacgaatatcatttacctgatattctgcatgaaagggcatgcacggattaccagcacattcttccacgatgaaattttgtgtgcgggagaggtgatgttcgtccctcacgggagtgaatacagcggcgtggcgttaagtgatgttacgctgctggttcataaattcaataacacagtctgccgggcagagaactgtatcctttcctatctttattcgcacaagaatattgattccaaaatttattgttgccaaagaagaacgtaagaaacatgtatatagtttagttcttgtcacaatactgattaagttttattgcaaatacaaaacttaagcaaaaaacagctacacaaacttagtaatcttgtaatccaacaccactttattatactaatttttcacgattaaaatagtctaattcggccataatgtaacgttaaaccacaagattactttttattatgattatattactttatcataccgaccatggcagccaccattgcagcgatagaggcaatagaagtattcattcctgcaacgtccctcggcacagtctttttcctattttctttgcttggtactattatttcacatcctggttcaattgcacaaaccgcactctttctcagacgagacaccattccgttcatatatactacataaatatgtcgcttcagtgcccggtttccgaagccaccggcctgttcaatgtaatagtcaagattactccccttttgataaagtattgtattaggatacatcacggccccactgattgttaccgtactgacatatttgggaataaatagtacatctccttcacgcaagaccatatcttcgtcagaacccggatttattaacgctttctcgagttctatgcctaccggataagtagaaccggtttccaaagcgagcaaagatatagaattttcttcactccccttgaccaacaaacgtactacatcctgtttccgccttatctcatccgctgtcattctacgtatcagacgtgctcctctcacataagcttctttcgataatcctccggctcttgctatcagactactcagcctttcattgcttttggttaatgcgtaattaccggtgaaaaccacttctccttcaactgttacattggcctgtttgcgataccccggacttcgacgaacgaaaacgatatcataaggttccagttcaaatcctttatcctcccctatcaacaatccgtttgcaagctcaaccgtaaaactcttgccaataacattggaggatagtatacttccaggatctttgattcgacgcgacacatcgatccggaccatagaagcagattccggcaatcctcccgcttttacaatcaaatcctgtatagtcgtatttttaacataaggaaactcacccggtacccttacatcaccataaatggacaaagttccttctttctcaatatctttcacactgggaatgtagaggacatcattcttctgcaaacataggtcggcagatgtgtcatccatcatttttttcaaatcgacaggaatcatttcatgtgtcagatcttcctgttggcgtctcaacaaagccctgttaagaaaagcgtctccccgaagtccttccgctttgctaatcaactgcctgacagttcctgttacactatcatccaattgatatatgcccgcacgatatacagcgccacgaatttcgaccttgtttgagaaacgttccaataccgcttcaacggataatttatcaccatcggccagaagataagactgataatcgtcctgcgccacattgtatacctgttttgcttttccgcccatacgaaacaaacgtatggcactccgataagcatctcccgtaaaacctcccgcataactcaacaaagtagctacggtttccccacttttcatttcatacttcatcggacgttttacctttccggaaatacttaccagattctgataaggaggaactaaaatgacatcgccttccgataaacggatattatccgtcaatttacctttcataatataatcatatacatcgacacggacgatctcctttccatctctcacaacacgaatatcacgcaggcttccgatatcactgattccaccggcacgatacaaagcatgaaataccgatgcaaatgccgacaaccgataaataccgggtacttttacttcacccatgacattgatcatgatggtacggattctccccaacgataactctatatggaccgttttttgaggaatagcagcataaatcttactaaactcacgcctcaaacttcgttcggcatcctgtatattcattccactcaggaaaatgggacctatacctgctacatgaatagtaccttcaggagaaattatttccctgactgtattttcagaagtgccccatacgtctattatcaattcatctccagaacctaatacataattttcaggagtaggaatatccaggctaggctcaaaagataaatttctggcagtaaatatattacgtccaaaaacagcaacctgcttaccacgaatgacatgatcatctttcctatgttgtcttgctctgctgcctcctgccaataaaataaacagagcaaataacaatgctcccttatcgtttatttttttaaatatcatatccttcagacagctcactttttttgcgacacaagacacaaatcgcacaaatatttcacttttcataagggagcaaaaatttgaaacctcttccccgtaacatgacttccgactcacgcacttcttctacatacagcctatgtataccttctgttatctgcggtttcaaggatccatggcgaagtatatttaaatcgatagagtcaccctgtacgggattcatgataggagctatttttatataagaactattatacatcactcccccaccataagggcgggcactgtttacaatccatgtacctactccttttcttttgactaccatgttattattttggatcagatagtatgaacttgagttggtgctataccaccccggaatttccagttttccttccggtctcactttaacatgaataaccttcttctcttttgcgtcttctgaaatagcgataacccgggcttctccctcatatttgggatatatctccagcatccccgtagaaccgtcccatttcatatccataatatctgcgggatcgtcctcttccagcttagtcaattctcctcctccggaaatacttatgaatttacttctaaatcggggaagaagctgcactacggaatgacttattccgagctccggaaagaccacgttgattttcaaccttatgcgcttatcatgagaaatgatggtagcaaacgtttcaccttccaaccaaccttttactttaagggtatccatacttatatcagcagtggctatttgtgcgttctccacattaactatatatttcccgtttccacctgacaaaagaagtctcttctctgtctgtttattcaacgacaactcatcaatgactccttcttttcctatacggatatcgggaaattcttctttttgtttttcacatgcaaaaaagcaaataagacaaaaagcaatatacaattgggttattacagtctttatcattggcttgtttcctgtttaattcaatttctatttttcatttctttttacgcccaaatgaggatacagaatctcccattcacgaccttctccctcatcaatataaacttccaggcgaaatcgtttataaaatccttcgaactccggaaactctaaagtattatctttgggttcaatagttactccgtccaatttataagataccttggcgttcggattggccagttcattataataaagtttcaaaaaacgtccctcacaactcccgtcaggaaggatggtacgcaaataaggaatacgatcttcggaattttccgcttcacgcattctttctgttgcacctcttcgttcggcatatggcgagaactccttaccctttaccgctcttactttaatatgatgggtacttcccggtttgagctttgtctttacatatgaatttccagacgtgattgtttcgacttggtcatcaaacacgacttcccatttaatggtttcgtctgctaccttgttccaggaaatctccatttcattctgatatgctttcattcttaaattatcgggtgcttccggaacgggagatatgtccggcccgctctctttgagtaccattgacatatcatcgaacagcatatagccctgatagctctgtgtccttatccccatccccatactatggatattctccggtattgttacagtactttccactcttctccactcatctttaaccgttcttatcgaaagtattttttctctgctttttatactcccgttatcataccaaaacagagttactactatttcacgatttcccacacttcctttgttccaaaaagagagtgtatattgttttcctgcttttaccgatacgggttgagccaagaaaacagatcctccgttaagccatattttaagtgcatacacacctgtactctccggacgtctttcctgtacccgctccggatttaagctacttactatacgccaaccggtaggctgtcccgtatcttgccacttttcaaaccctccgttaggaatcacatcgatacctgctgtaccttgagctttaacctgaattattgccatcatgaatatgattgccggtaaaagcaatttatgtatctttctcatctcttattttttaatatcctccggtgaaacatcaaacttctctccaatacgcaccgccagattgtataacgctccctcggtctgctctctccctaacaagcgttctttatcccataaaccatcccctttctccaattcatgcaacaaaatcccggtttcttcgtttgttaggaatgattttccttgcatattgcgtgcaaactgtgcagcatagatcaagccgtaagcctgagaaagaagacggaacgcccgcctgggattttcctttaagttggccaatgtattcggaccgaccagcagatgcatagcccttaccgcaactacacgtgacagttcttgcctgatggtatcagcttgcaaccgcatttcatcatattgggaagtcgtcatcaaagcgcgccctttgacaaaggagcgggagatacgcagatgacaatcttttaaggccggtaagccatcggactgggccaatgttttccagaagtcgtaatatccatatgccagatcccaatgatgttccaactccgtatagttgtgaccgggcaagagctgggtcagatcattccgtacaagtacctcgttattttccaatatttgctcactcaaatgtatgttgagtatcttgtccagatatattgctcccataatagcatatttataaacttcagctacagcaattcctctttcatccacataacagatatctttgtctcctatgccatttcctacatatcctgtcaagcctttcacggcttccctgtttctatgttcgtaagaagggatattcgctcccaagccggcaatacgtgcggaagtttcaaaccaagcatcaatatctttcagaatcttatctctatccttcagatgtttagaagaagcagaaacctctttttgtggttttaacccgaagttcccttcatgataaatccggagtgcctcgtcataatccctttttgtactcatacgcgcttcgttcatgtattccgaaaaaattctatcgataggagatttcaaaaatccacactcaagtacatttacagaactctctccgttcctagagaatttatacgaaggttccggcaataccgggagctgatacgcacttatcactgtttcatttatcccgtcggtacatgccacaacacttatcaacagacaggacaagaatagacatttcaataaataattcatcttttttctattttttcttaaggtaaaatcaaatattcacaatatggatacctcagtggattaatcccctcctcattttgatattgctctgtctgcagactgggaatttcgatcagtccatcagtggagacagctgtgatacttgctcttatattggatgatctgggtccctcaccggaaacactcagatacagaggaaaacccgaatgtacattaaaagaaatttccaacttctcgccgttaaacattacattgggtcttaacccgtcagcatcctctccggcatttcctatatttctctttccacaactgatcgtcaccaattcttttttttcattaatatatttcactttgtactgagcactgacatctttagtaagattaccatcccagcgtttttcctgaaacgaacatatcagggttatcttatattggtcagcaccattcggagtttcggtaccgggatatttatagttctccaatgcctgatcgggatcacacaattgtacaagcaactctccacgcttgttttcaggtttctctatctctttggatggaaacaacttctcataatcttcatttactacaaaatcttctcttaccgtgttgcagctgcatacgaacagcagacaacttattatccatacatgtttcatatttatcctgttgttttctaatttaaatttcatcccggatttcagctataactccactctcttcgccatagggagcaagatgcttgctgacccaatgtatttttttgctgtaagggtcaactactttcacaagttcgcaaacaaatctctctccttctctacgaaaatcatagaagatatacgtttcactataacgtataccgggcttgaaagtcagaccgtcggctgttcccacataccccgaacccaatccttttactttatttcccaaccatccctgggaagcaaaataatctctcgcaagaaacagacgatagcgctgatatacttctggaggttgctttccattcacacttccatcccctccataagtgacattcatctgtacatcgctatggaaataaactcgtcccgccctacgaatgattagctgaggatttttcatcttctcaaagaacaatttattgtcatatgatttttggatgtcctcctgccaactttcatcattcttcaattttgtaaaaatgatatattcccttgcaggctctatatatgaagatgttttaaatatcaggttgccatcaacatcttttcccgtataaagaaaatccgaagagccggtaaagcggtcattcaccaaagaatgcagataggtataagtagtaaaacttaactgcgtaaatgtgttttggctcacttcaaactcactttgcagctttttcgtcaggctctcctcattatagtcggccaccgtctctacgatcccattttcggaaaacttcattaagaaatagtgtccaccatatccatatttgttcttgtcttcaaatatccctttgggaagagttatcaattcattcacatttgtaaacaatagagaatccgttcggggaaaataggtgacagcccagccataaggagcatttacaagttcctttctcagttcgccgatatggtttgcattgcgctctgaaggagacgagtcgaaaaccttttcatctttacaggagaagcaaaacaccattaggataagtatttgaaatcctagtttcattctttcttattttttattaataaattcctttacttgcttcatgcttattaattgaaggtagttaagcgaaatcttaatttctttactaaagtagtcttctacaaatgcttgcttttctaccaattctttatatgcctgaagcgcttgttcatcatattctttttgaagatctttatccgatccggcattgtaaggagtcttggctctgtccaaagcctgaagcaaatccttaggtccatatgtcaacttcaaactgattatctccgcaaaatctttttcaggtgaaaggagagaatgaaaggtaaagaaacctttcttattcggataaccagccagaataaaccctctgcgcccttgcgtctctcctttgaaaatccatgcaatagatttagtcgattcgatatacttgtttctgctgatggataggaatttgcttctgtcataggggaaaagttccataagatgtctggcaaactggtgatgtacgcttcgcatcagaatgaagaccttatcctcatcttggggattaaactcgttgacgttatatagaaacatctcattagtcgttgcttcaagattatctaatagttccattccgtttccgtctacatttcttcctccatacatgtatattttaagaggattttttcccaacagaaacttatctcctcccaattcagtagctgtatagaggtcaatccatagagttttgatggtattgagcacactttttacattggcaacttccggcgggtagatatagcttccattctgcactgcatttttgtcccaccgatattccacctcaatcccgtaaggacgggtgaatgtatccagtatccatttatccaactctgtcctctcacgctctgtctcacccgcctccaccacactccgggcagatagggatgcctcctcttcacagcccgccaataggaaagaaataatgagcaaatacagacttcctcgaaaaaagtatctgaaattcacttttctaataattgttttcatatgcttgattttattcttgaatcatcttctataatactctatcggggattaggaaccagtccccggttaatggcttctgccggtatttgcaaaagttttctggaatcttctttttccaatggtctgtagaatttatactttgaagtgcgttttaccgatatataaaagcggcgtatatcaaaccatctcaaaccctcatgtaagaactcctgtctcctgaaacctaaaagtattttcaccaacgccagttggttgatactcattccgtaaaatggggtatagatttgatagttttcactgcttgtctgcgtataagtcgaacggccgcaagagggatacactccatatttgacagacaagtaaaccaacagattatctatcgctttatcatactctccgagcattgtatacgcttccatccggttgagcatcacttcgtcagtggagaataaaacattggtaacatataaccctctgggacgtatccccgtatagccggataatgaaagctcgtcaaatttggctatatattgcccgtcatctatacgtccgtcgttatagttaaacagaaagaatgactgcatcttcattttccggaagttaaagcatccgtctatcccgtgttcattatacaccttttcggcactttgaatggtcactccatatttttccgaaggaatattacgtgccactcttgactccgtagtagtcaataaaaggttggcaggttcatcaacacttgcgtatcgaatatagagatatttatgattagaattaaattcttttttgtacttctgccagtttcttaagaccggctttgggtcaacaccgagcacataatcggagtatgagaccaccaggtcccattctcccttaatcaggtaaaaacgcgaagcaaaagcgtaggccgcttttttattgaaatgaaattttggtttaacataataatcgtcattcaccaacgaaagacccagtttcagatctttttcaatcttttcatacacttccttcaccgttcctcgttcatagtccaccaacgcatttttttcgggccgggttaaataaggaatacctggggctgttgccgatttggtagttccataaggctcagcccagatgtttaccaacatgaaatgcagataagcacgcaagagaaacgcttctccatacaaagcttttacccggtcacttttagggtatttactaagtaactctaacgcctgattagcctgagcgattccggcataacatgcattccaatagtttagcggagtatccaaatcttcctgatcgtaatcttcccaataatacatagcttcattcagtcgcgaatgaatgccgttagtcctttctcccacattgtccgtacgcgcttctaaaaaagcaaaataactggcctcgggatatgctccggcaagcagttcggcaattttgtcctcactgtctatttgtacatcaaaagtagagtccggatttgtttccagataatcctgacacgctgtcagcaataagattatagtacttaaaaagattgtctttttcatttttacccaattaaaattcaacattcaatgtcatcgtatattgtttgggagtaggcaatgaaacccctcctgatctataaaattccggatcttgcccattcagtttcctgtctgaatagataaggaacggattcgtcacattcacctttacgttcatctgtttgattttaagatgtgaaaggaatctttgaggtaaacgatatcccaacgagatatttttcatacgcacaaaactaccgtcagccaccctgttttgtgaatagttataagtgttgtaggctttttctatattttcttttccgatattgcgtatcagatcttgagaaggaattacgggaatattggttttccgctcgtcaccgggattcaaccaacggttgtagtactccttggaaaatacattaagatcggcaaatgccggatcaaaagaaggattcatccgaattttattacctgcctgcatggtaacaaaacacgagaattcccaatttttatacttaaaagtattggatatacctcctatatattggggttcaataggcccatggtaaataaggtatgattttgaatattgtgcatccaaaaagtcagctcccgaaatctcgctatttgctcctttgttggaggggtacagtccgaaatcgaaggtcggcagaccattgctgttaagtccctgaaaattgaaggagaacagagatccgcgtggaaaacccacgatgttaccacgcccggttccggccaccatatcaaaagtgttaggggtattcagtaaccgggttattttctgcttcataccgctgatagtgactgtggtagaccaactgaatttgtcagtcaatatattttgtgtctgtatggccagttccactccacgcgtacgcatatctccgaaattagcgtatttgtaatactgacctcccacaccagaggtacgaataaggtctatcagatcaaacgagtttcgttggtacacatcgaatgtcgcactgatacgattgccaaacagtccgagctcaagaccgaagttcagctcatacattttttcccatgtcagatcgcgattttccaaatgtaaaatacgcaatgcattctccctatctttcaaaagagtacggttgaccatcacatgcttgaaaactgtggtagagttaacagcttgttcattcattttagcggttaacccgtaactcgtacgcaggacgagccttgaaatggtagtgtgtttcctcataaacttctcctgatccagattccatttggctcctatattccaggttggcagccagcgggaacggctatatttacctgcagtattagccccttcgtaattgaatactccattgaaaatgtatttcccggcatatccgtatgtagcgctgcccgataatgtcactcccctttcataacgttcggttaaagaaaaataagtatctccttcattggccagtttttcaaaaatcaggggattggaaaagacctgattacctctgtcgtattgtattccatagccttgaaaaggattcatgctgcgatcggcatatcgtatttcagtaaatccgaaagcgcgtatgttatgttcactcagttgcctgttataatccaaagccaaacgtcccagatagcttcgcaaggaagtttccgttttattgaatatccccccatgtgtcaatgctaccccgggcagttgcatcggatcgtctttattcttcaatagataaatgttttctctggctacgtaaggagtctcattggcacgaaaagcctgtaccacattggatgcttcagcaataaaatgtgaactcttggttacggcgtgacgcaccattgccaagccttttacttcaatatgatcattgagcctgtatgaaagttcaccctgtaatttcagatccagcacttctgttttcaggtaattgttttcatattcattcagaatgttaaacggagcccagttattccgatagaactctcgttctccatccgcattatggggccgtaaagtgcggcttgtgcttaaagcgtaactaaaaggattgatatcgaaatcacgttcgaatgttccgataacagtatttctgcgttgaggaattgttcccggcgagttctggttacgtagatttccttgtgcggatatagtagcctttatcttatcttcgttccagtaaaaagagttcttgatgttggccgtaattcttttaacatggtcggccagagtccatcctctgtcatcataaaaaccgatggaagcatacattgcagagttctcccctccccctgaaaaggtcacagtatgtgtatggataggcctatgtgtaaacagttctttaaaccaattggtgttagcatactctctttcacgcatgaatgcccttttgacatcatccgtattctccagataatattgaccggtagccggatcaatggtattaagagccttatacatctgataatatactccgctgcgacgaccatatagcgtattttgcaaagagaaatatccctttctgcccatctcttgataaacagacatactctcttgagaattaagcaaatcgaaatttgtataagaaggaatagatcgcatacttaactcataagaataagaaaatctgttcggtgcatttcttttaccggaccgggtggtaattacgatcaccccgttcaatgcccgggcaccatagatggaagttgccgaggcgtctttcaatacctgaatatcttctatatcagatgcattcagtccggcaacagccgaactgataagggttaccgcatcaccggaagccaattgatcaagtgtaagtgaaacaagatcctcgtatactgccccgtctatgacccacaacggttgtacatttcccataatggaagcaccaccccggatattaattcggggcgcggcaccaaagctacctgtcacattctgtatggagagacctgcaatacgcccttcgagcatgcgcgacacatccgacacaccgttcaacttgatttcatccagctttaccgaagctgccgctcccgtaaagaccctgtttttaatttgttgatagccggtgactaccactccctctatctcctgcacattatcctgaagtatgatgttcataatgccggatgaggctttaatcagacgaggtttcattcctacgaaactcaccttcagcatctgtccttttcgggccttgagagtaaacctcccttctacatctgtaataactcctcgtgcagttccttccactatcaccgtagctcccggcaaactttctccggttacagagcgtactgtaccttttatctctactgccacttgtgccggacaagtctgagaaaaaattgccatcagcaaactactgattactattcttatcattgatgaagtattcattgttttattctctatatttcttcgttttatggtttatcacaattaaattttatagttagaactgtacattagctcctgcatagatcccaaaaggatgtcccgctctcaaacccgcaggatggcgggatgtaaggtaaaccctattggtcaggttgattgcatttaatcttactgtcaagtatttattcacaaaaacattgagcgaagcatcaaatataaggtttgccggtactttttctctctccgcaatcgtcccctgcccgggtgaagtacgcatatcactgttatagcgtgtaccgatattggcataaaaccatttacattctatacccaactgcatgttcagagcatgcttgaagatgtaaggtatttcatcacctctaaccacattaccccatgaatggctttcaaacgaatttctaatttcagtatccgtataagtataggatacctgcaacggcaacctcacattacagttcttcggaagaggctgatattgtaccagaaactccgcaccttttacccgggcctcccctacattaaactgttcaagtgttccggccccacccgaagcagccagatcacttcccagcatattactgtaattattgtagaacccgattagttccgccctaaaattcccgatagcaacacgtgtacccagttccatattcacactgctttcaggcttttgatataattccgcgcttggaggggcaaagcctttatgaatcccgaagaaaacagaagcagccggcatcaattgataatgtaatcctacccccggaatcagtacacgcgcatgattcggagtttcaatacgtaccttacccgaccgtgccaaatcttctttcgtatagtcttttttcagtaagtctacatcctcatatcgcagcccggcagtgacagtccacgcgtcatatcttaatttagcaagcaggtaaccggctaacgcgttggcagaagtaacacggttagcattcgtaccatgaataccctccataaacagtaccattttcttatttttcatggagtaagaatcatcccactgaaaacgatcttcctcatcggcatgataacgaagtccgaactccagatcgaagaaaaactcgttcaggttgaaacggtattcggccctggtttgtatacctctggaacggtaagttctgttattggctcttaccaacagtgcttcctcttcccgatctgttttccccgtcaaaatgtcgaagtaacggatattcgtttccggatccacaagtacatcggcgatggatctcttctcttttgaagtgattcctgcgcgcacatcattcagtttgtaccaatttcggtggaaatagttgtaataggcgttggtcgttattttcaacttgttggaaaaagtcagcagataagttgctacccactgccgatgatcggtcttaagtttatccatttgcgaacctgcatacctgagaaaaggagtcttcttaaaatcatctgcagagagtcccacatacgtttcatccgaattttcgtctgcgtatccgaatttcagttccaaagcatgattcactccttttacatgatccgttttaacccttattttagctataatatcatttcttttaaatcctttggcagcatgatcttcgtatttcttaaaaccatctgactgataacgcaaatattctaccatatacccgaaatgcttccaactgcttccgacagatgtatgcgacttaaacgtatttttgcttccgtaagaaatgttcgctttaccggaaaaactgttcggaataggagtcgataccaaattaatagctcctcccgtagtgaacggaccgtattgtacctggctacttcctttcagcacttcgatggcctccatccgggctacattggggaaataataagctgccggagcggaataaggagccggtgccgccagtacaccgtcctccataatcgagatgcgttcacttcgctcggctttcgttcctctcaaactaatgttcgggcgaagaccgaaaccgtcttcttcatacatattaactccgggaacggccttcaacatacgattaatatccgtatatcccaacctgcgaatttcctcaggcgaaatataatatgccgatcctgtgcggtttcttgctttaaacttactcccaagtatctgttgggacgataccactatctcttgcaattggtagacagagtctttcttcacctgctgttcctgtgagtatattcctgaatatcccaaagaaaagaggatgataaataaaggttttctatttgtcatattaatataattgtaacattgtcagggggcttctattcgatttacctccacaagagatgcgctttacagaaatcaagctacggatagcggtattacctgcttacttaacacccatatcgactctttttgaaaagttgtagtgcctgcatggataggaaaaaaaggaaagcaaaactctaatgtttttagggttatagaaactgtattccttaaatctggtttagttgtttgtttatttacggcggcaaagataaagacactaaaattaacccacaatcactatatttaggtatttgtataaatcaaaagttatattaatattgcataaaagcacttgcttatataaagagtataagcattatatggcattcaatttatagtgttacgctggcagtaggataatagccaattaagtaatatttgtatgttgcaccggatcacataaaattgaacttacagttcaaaaacggcttttatcacttaaaaaaacaggatgacggatggctcactacagagataaatcttgtaccatttctctcagtaaagttcttaactgcactcttgtttatacagaaacttttctactttcaggaattaatattgtcgaatggatgcaaagcactaaaaactcaaagcaattaagagcatcatcagatggaacaaaaaaatgaaggatcagagttagcaagcctcccaacgaaagcccaatagccccaattaactgtataacaaagcattgccaagataaaaagccggaataggatagccccctaatccggcctttatatgattcttcgctataaatacgtatatcagtactccaaatcaggagcaaccttcttactttctgttctcaatttgctgggagtcattccaaataatctcttacagtaggaagtgaaatgagcttgcgaattgaaatcaaaatccattgcgatctcttgaaaaggagtatccgactcacttattttttctctgatcaactccgccttctttttttgcatccactgataaggactttctttaaaacaattttggaacttacgattaaaagagcgctcagaagtacaatacaaaccggcaaattcctttacactctttactttcctataattattcattacaaaatcttcaaaatgccctgtattccccaatatagaagaaaaaaaagtaaataattctttcttcgtataatatcctctcaaaaccaacaaaacctcttgttgtttgataagatgcatatgtttacactgcatcttagcatataaatatgcgacaacggagtttaaaacagcttgcaaaggatctcttataggaagcacacacatctctttttttctttccttataagaagaaagagagttcatatatactttgtcacacacccttatgtctttattccaaaatagtaaaagacattttgcatcatatataacttcaattttattatctacatgttgcggaataagaaccattttatctttctcaatatgtacattctgatactcaccactatcaatagacacctctccatcaagaaggaaaagaatacaaggagaagcactattatctattttacttacactatctttctctaaattataataaacgaaacctgtattaacatttatttgatagtttatgcatgacagatgttctttaaaataaagtaatttcataacatcattttatttaatatataaaattaagctattagaggttacttatcatacaataaccttttacataaattcgccaattatgtctataattattcataagataatcttctttagcatttctttttcataaagttctaaaagctagttagttttaggccagatgatgattaatccttcaacattctattatttcttcaaatcatttcattctatatcaaaacaacggaacaaaaaaggcaacaaaaacagaattgttcttgccgcctttatgttttatacaaaattaatgtaatacattattcttcattcgttaaccaaccccaataatctgaattcgtcactctctcaatggacacctttcgatcacccatcctgactttatccggacctgaagccggcaccgaactagcatgatatccgactccgcgccatttcaacatatgttgaggtacttgtcgtttcagcaatgcactatacacagctttagcgcggcgtttcgacaaatctatgttataattgtcgcttcctcttgcatctgtatacccggttatcaagaaattgttatccggataacttttcaacagatctgcaatcttatccaaagtgatttcagattcggaagtaatcacatccttatcaaacgcaaaatgaatgttatcgaataaatcacaaacatgactttccaccacagccggcacttcaattctcttttcaacaattcgttctacaatcctatcaaccggacggtctatatattgcacaaccggcataggacgttttgtacttccacccaaacggaacataatacgcatcgaagcctgaacaaaacgcgtttgttttttatcgacaggcatgatgtattctccctgtaatcctactccccaatgatcgttaagccaagcttgtactccggctccgaaggataaggggaaataggattgtttagatcctattttctctttgttccaaggattggatgatgtccattctgcttctcctataggatcattttcaaactttcctgcattaattgcataaaaatcatgatggaggtagttaacacctacgcgtaaataaggttctacatattttgatttaaacaatggggttaaccggaattgaagtcccggaccggccatatacatgaaatcaaacttacgcccgcctgtttcaacttgttttcttgccagtcccaatgtcccctgcaaatcaagataaaaccaaggattcaattcacgagctgcatagagttggataccgccaaaaagatgatcgatattcattcgatacagatagttcccatcgacctgacgaaaatccgagaaagtcactctgtcccagttgataagagctccacctacccctatttcccaggctttggttctatgtgctgtttgtctctccactttatcgttttgagcataagtatagaagggaaagacagtaaaagccaatgctcctataagaagtctatttattattacactgaaattcatcttgcttatattttatttatctttataagttacactaattgcaggcatatttttatatgtattttcaacataatatgtaccatcatctactttcttcttgagaactcctaaagatacaccactgccagagttagagtagatgaaagcactattcgcccctaccgaatagattgtagctcccagatacggactaagagcagcatactcaggtttattataacttgacttattatgctcgcttgtagctgtttgcactcccaacggagaggtataagtaaacttaacataacaaagtagaagtcccttcgcttcttccagggtataatattcaggttcaatgtaatctattccgttctgtttcactgtttttaccaattcacgcttagatatgatattgaaatcaatagtcgaaaagtcaaattccccctgggctttattcaagaatacatcatctccactttcagcagatgcctttgttaaggctagagttttaagtgtaggaggtatctgataaggtgccatcttacatactccattccaataaatcgtttctccataataaggggtatcttttactatcgagaaatagttgtcttttccatcccaaaagtcagttattccattttttataccggcagggttctctttaacatatctattaggattaatagacattgatgtactactcatattaggtgtagtactttctatttttttcgttttatcaagagatgtcgggtcttccggatttgtaacctgatatgccgtaaatccggcattgacattaggcaaatagctgggcaatgttttccattccgcaccaggatctgtctttctctctactctaaactgcaggttatgttcataatcaagatatggagaggtaccaatataaatcattctaatctgcattctgttagggacataagtgttttctgcagattcctttgtcacattattaatagttacctccttaactttcccccatcgagcatctatatcgtcaatttgaggaagatcttctttcggaataataaattctccctcttcattagctgtataagttttagccggatccaaaccgggaattcccttaaccacagccttcggagccttattgccagattcgtcatacacacgataagctactcctccatcggttgtacgaacatactctccaaattcttgttgtgaataaagtgcaatcacgttaggtactcctttgataatagtaacttcagcacccggttttcccggaacaccgggttttccatccttaccgtccgcaccatctttaccatccgcacctctcaaaaactcccaaaaatcacttaaagttgttttaccacaatcccaatccaaagatggattatgaggatttttcactttagggccagtattgttacaacccgcctcaacactctctacccacaattcataggcacttttcccattagcaccatctttaccgttagcgccgtcttttccagcagccccgtccttaccgttaataccatcttttccgttggcaccatctttaccgttaatgccatccttaccattggcaccatctttaccgttaatgccatctttaccatatgcacgaataccggtatctttcccattaatataccagttcccattggtaccgattattacctctggcgatcttccatctttacctatcgcagcctttccggtatcttttccattgattacccaatttccattttctccaattgtaacagtaggtgttgttcctgcaactccttcttcacctctggaaggttttcctgtatctactccatcaatcaaccaattaccattatccccgatcgtaactaccggtggaacagcatcttctccattctgtccatccctaccctgagcacgtattccggtatccttattgccaatccaccaattcatattattaccaatatgaggtgtttgcccattctcgccactcgctcctgtcagataataccaaaaatctctaagattattctgggatacaggccacatacttcccgggcggtgaggattatccagagcaccagtagctacttcttccttccacagttcaaaagcactttttccatccagaccgtccttaccttttaaatacttaaaaaaatcagttatttcagtctctttcttaggccaagaaatcactccattctctacattctctttccaaaattcataagctgacattcctctatcacctttcggtcctttgggcatcgtaatatccacctctgtacaagactgccctaaaataatggttaagatgtaaaccattaaatgtaataatttagcattgttcattttgttatatcaataaattatacaaacaacagtctagaacacatctataagtccaaaaaaaatcatattcagaactgcgtttgacaagtacgtacttttcgatgcaaaggtaatgccccacaaacacatatatttacataaagaagaatactatttatatgtatcagacaatttcagaatacgagtccctgcagccggttacatatcaaatagacacagaccgcttcgaaaaaagtcaaataaaagactccgcaaaagaacagtataaatcagttaccaacctctacttaccacgaaacgacaaaaactgtatatgcacgtcagtcccgaacgttaatacccaagaagccaagaccggcagataaaatcctaagaaatgaggattgccaactctagggacatgccctacctttgccgcaaaccctaaaatatgataaaaagattatttttcctcctacctttctctacgatagtctcggccaatgagcccgatacaatacaggttaagcgtatcgatctggatgaagttacaatagtagcttttaaacaaaacacacctaatcgtgagccactttctatctctaccttagataatcgcttcctgaaagagaatgaaatatcgggagctaaagacttaagttccttacttcctaatttctatatgcccgattatgggtccaagcagaattctccggtttatattcgggggataggagccaaaaaggatgctccatcagtaggcttttacgtagatggcattccctattttgaaacgtccgctttcgatattgacttgtcggatataagtagtatagaagtacttcgcggaccgcaaggcacactctacggacgtaattctattggtggaaccatcaatgtatatacccattcgcccctcgattatcaaggtacgtatttccggttgggatatggcagttacaatgatatgcgattaatagcttcgaactatacaaaggtgaacgagcagttaggtttatcctttagcggtaattatcatcacaatgatggcttttttaccaatttgcatacccataaaaaggcagataaacttgataacggagccggacgaatcgggctcacatggaaacccgcaacccattggactacccgcttcataacctcctacgaatattccaatcaaggaggatatccatacggattgtataatgccgacaagggaacaacagaagccgtaaactacaacaatgaaggattataccgacgaaatctgctaacctccggaatcaacatacggtataacggcccccatatcagcttcaacagccaaacatcctatcaatatatacaggacaagatgggaatcgatcaagatttctcgcctcgcaatatattctatggtcaaaataagatacggcaacatatgtattgccaggaatttacggttaaatcggtcaataagagccgctatcattggataacgggtgcgtttgttttccgacagaccataaacaggaaagttgaccttagtcgttttacagataccacccgacaccttactaatagtggaattcccacacaagggatcgcattttatcatcaatctacactcgatctgttgcaaggactgtcttgttctgtagggttacgttacgattatgaacacgcccgatgcgatttttccaaagtacagcagccattaaatggaaatggggaaacaaaatcgcttgaacaattcaaccgatcgcttcacttcgggcagtttactcctaggttcagtatgcagtacctttcttctcacaatcaattgttctatgcctccgtatccaaaggatataaagccggaggattcaatgtctctttcctcaacaatgacgactacctttattcccccgaatataactggaattacgaaataggtaccaaactatcattcctgaacaatcggctatcagctgatttgagcctgttctatatagattggcgcaatcagcagataaccaatactattccaactgtaggtaacgtaatccgaaatgccggtcgctctcgtaataaaggcatcgaagccagttttcaagctcgtccgacgaaatcatggatgatgtatatgaattatggatatacagatgcacgatttgttcactatcaaaaagaagaacgcggtatcctaaaagattatgaaggtaactatctgcctatggttccccgccacactttctctttgacaaccggatattcattttatgacatctgttcctggatcgaccgccttaccctcaacgccggcgtatcggtaacaggtcccatttattggtatgaagataaccaagccaaacaaagcccgtatgcattggtcaatctaagaattagcataaacaaaggatgctttacatgggaagcctggagcaagaatctcacaaataccgactacctgagctactacttcgtaaccagtaaagcctatgctcaaaagggaaaacccattaccttaggtacatcagtcagcatcagtctctaatcaaacgatatgaatcacatgcgtataaacaagctttcaccgctttcctggaaagcactgaacctcagtacatttttctgcctatacattgcacaagccatcccgatgagtttcttctctacagccatacaagtactaatgaggcaagccgattactctctttcttccatcgccttattacaactcatcaaactcccctggatattgaagtttctttgggcaccgcttgtcgaccggcattgtatcaccctaaaagactataaacgctgtatcattacatccgaaatcgtatatgcattactgatcctgatggtaggcctgctcgatatccaaacagatctctaccttatcattggattagtatttctatcattgatagcctcagctacacaagatatagctacagacacacttgcagtactctcctttggtaagtcggataaaagtttggtcaacagcatgcaatcaatgggtagcttcggaggtacattgataggaacaggtatattactcctcgttcttcagcactatggctggcatgtggtgataccatgcttatgcatttttgtactattggcaattattccgttattgaaaaacaaacatatgagaataatacccaaagaaccttcgaaacgggcacaattcactgattttatctggttctttgcccgtcgtaacatctggaaacaaataggattcctactactatattatgccagtattatcggaattttatcggtgttacgctcttatctggtcgatttgggttattcaatgaaagagataggcattatgataggtatcggaggtaccggagctgccttcgcatcatctttcctggccggattactggttcgtaaaatcgggcgatatcattccagaatactatttgcaatattcatcctgcttactacactctattttatgtgtatttcatggacagtcccttcattttcaatgctttgtttagggatcgtcctgctatggagtgcctatggaatggcaactattgtagtgtataccacttctatggattgtgtacgcaaaggatgtgaaggaaccgactttaccatccaaacagtactcacacacttaagcggcttactaatagcctttcttagcggggtggtagccgatagaaccggttaccacggtctctttattttcgaagttatattggcttccgtatcactgatctatatattttatttcttcagaaaagaatctcaacccattcattcttaacatatatgtatactgaaataatcaataaatacaatgtaccggtacctcgatacaccagttatccaccggccaattattttgagccatttaccaacgcccgctacctgaaggctgtacatcagtcgaatcaggcttcagagcacgcattatcgttttacctgcatatcccgttttgtcggcacttatgccactattgcggatgcaattcgtatcccatggcacgtcccgagattattgagtcatatgtagaagctttgcatcaagagatagatctgattcttcccctgttagataaggatcggccgatcgcgcagatacattatggtggtggaagccccacagccattcccgttactttaatcaaagaattgaatgctcacttattatcatcattcccagccatcgaccgccctgaaatagccattgaatgtcacccaggctatctctcagaaaaagactggctgcaacttaccgaatgcggctttaaccgtctcagtattggtgtgcaggactttaatatcgaggtactaaaaacagtcaatcgccgcccttctttattaccgatggaagatatatttatcctgctacgcgaaaagggaataagtatcaaccttgattttctttatggtttacccaaacaaactgtggagaacttcacccgcaacatagagcaggctattcttttatcacccgacagactggttatgttcagttatgcccacgtgccttggattaataagcgacagttgctcctggagaaatcaggcctacccgacaaccatgaaaaacagacaatgtttgacactgctgccggactattgcataaatccggttatcaatctatcggaatggatcattttgtacgccccaatgacgagctgagcatcgccatgcaaactaaaaaattacatcgtaattttcaaggctactgcacccggcgtactaccgcacaggtatatggtttgggcgtaaccgctatcagtcagcttgaatcggcttatgctcaaaatacgaaagatattccccattacatcaagactatcagtaaaggcgaactaagtattaccaaaggttatgccctttctccaaccgaacagctcaccagagaggttatcgaaaccctaatgtgcaatggctgtatcgattggagaaatctttcaaagcgcctgcatgtatcggtatccactttaaaggctgccactgcctacgatgaaaaaaaactatctggctttgccgatgacggactgatttattatacagacgactatcttgagatgacaaccgcaggttcggcatttgtacgcaacgtagcggcttcacttgacaaactgatgctccactctccacattcatattcaaaacctttataacaatgaaccagacagtaacagaaaatcatcgtttgcgagataccatcatcatcggtgcaggtctaacaggtctgactaccgcctattgccttacccgtaagggatgtgatatcgaggtaattgaacagagcccctgcgtaggcggccaaatacgtacctaccacgaaaatggttttacgtttgaaagtgggcccaataccggtgtaatctcccaccctgaagtagccgaactcttggcggaactatcccccacctgccgtttagaaacggcccgtgaagcgtccaggcaacgccttatatggaaaggagatcgctttcatcctctcccctcaggactgttcagtgcaatcaccaccccattattcagtacaaaagataaattcaatatactgggtgaacccttccgtgcaaaaggaaacaatcccgatgaaacgattggtgaactggtacagcggcgcctgggtatctcttatctacattatgcagtagacccattcatttccggggtttatgccggtgaccctatgcgattggttacccgtcatgccctgcctaaactttatcaactagaacaaacttatggcagtttcattctcggtggtattgcaaaatcattttcacatcgaagtgaacgcgaccggttggctacacgaaaagttttctctacttatgggggacttagtaacctgacaaaagcattggaacaggccattggaatcaaacgattctccctgggagctacttccacttccctaatgccatgtgaacaaggatgggtagtttctttcacagattcctgtggaatagttaaccgaatccactgccgaaaggtgataaccaccgcacctgcctttgccctcccttcacttcttcctttcgtccctgacaagcagatgaatcggataagtaatcttacctatgcccctgtgatgcaagtctccgtgggattgcgtaatacttatggaaaagagtttcatgcctttggcggattggttccttcctgtgaacaaaaaccagttttaggtattctgtttccatcggcctgtttcgataaccgttcccccgaaggaggtgcattatattcatacttcttaggcgggacgagacaccctgaacttctagagaaaagtgacgacgaaattatcaggttgataaccaccggcctgaatgaaatgttagattatcctgccggaatagtacctgatcttatacgtatcttccggcataagaaagccatcccccaatacgaaagcagcagtgccgacagatttgctgcgatcaatgaactgcaaaaacagtatcccggattggtggtagcaggaaatctcaaaggaggaatcggcatggccgaccgcatcaaacaggctgttgaaatcgcccgagaaagatgaactctcactttcatcgggcacctacatctataacagccagaaaggattcactcctctcttataagattctatcgttttcttcgtaacatttcatatttggattcagagtgcttttaccatgtggaaaggtgcatcttgatacaagcccgactgatctaatgcattgtctatatgttcatatccgtatttttcatacatactaacagcatttccaaactgatgataagaaacaatatacatatacacatatccggcactaacagcacgctgctctatgaattgaagtaaacgttttccaatacctctccctctaagctccggtctaaaatgaaatttcgataactcagcataaccatgtggtaaacctttggtcggataaaagccacctccgcctaatattacaccattactttccactatccagtattctgcacctttaatattaaaagtctgaaacattctatccgtatgcggatcatcataaaaagtaccgaccttaggagctccatgctcctctactgacgcacgaagcaccgatgctattgaagcattatctgattcttctatcggtcgtataacaattggctcattattatcaacggtaagaccggtctccacactatttattatcttataaatagaatccatacaatgaaccaatctttgtagttgacgatcttctaagtgtgagaatatcctttcaatagattgatttgcagcagtattcaagcggtaataaacctcacaccctttttctgtgagatttatcaaccccatacgattatccttttccgtgctttttcgaaatatatactctttctgttccaattgttttaataagcgggataacaagcctttatccatgtttaattcattggatatatctttagaactcctgtcagggtgtaaataaacatcctgaataatacgcacctccggaagtcccaattcacttcctaaatagtatttgttgagtatacctaatattttcgtataatatctgttgaaagaccttatacgacttatatattcttgcttcatggcacaaagataaatcttttgttgataaagtcaacaaaaaaaagagctgcatatcatagaagattttctttcgcatcaggggcatgctgaaaaatagcacctactatctgacaatcatccagctccttacaatcgccacaggtattatatcccttctcatttacacattttcgaattggacaataatcattgcaatacgcaaatttcgctccgtccgtacgacaccccatacaatttatggttgccggtgtaatttccggtgcattgttcattatgctccacttttgggcggttttctctcttaattcattatcatctcggacagtggctatacgggcatcgcaattttcgcaatctaatccgcaacatgcaattaattgtttcatcatttcgggtttcattattcgacaaaaataagaataaaaaacaagaatatgagcagataagaggcatttgattaccttctactacgcatgatatagatacgcacatgatcaccgccacaatggaaggtaatgctgcagcacaggactttctctcacatctccctctgaaagcgacattaccttttataccccgtggagtaacgttgcaattttctgctttccttgctcctacgcatctatcttccgaaaagttcgttgcggtcgtactctataccgtccaccactttccagccaaagataccatttcgctctgtcacgaaaaacgtgcaacccgttgtcacttgcatatttatgggcatatgaaaatagtatttcacctggaaattgtccggacatacggtttccacgatgcgacaatccagcgaatagttcggaacctttctccagcttttattccttttcaggaaattaatgtccgttaccctgtattccttccgcacgggtgtcttgtctgccagccaatcgttgatgttcagcagcaagttaaatcccaaaccaccgaacagcattccgaatgcgaggctgtacgacactactttcacataatgaccaattcctttgttacggtctgcgaacagcagtaaaccgatgatacataacagtccacccatgaccgccatgaccagcatcagcagggggaggtaagtgatgcctcgcaataccgtttgccccaacagtctctcgtttggaatattcaggtagccgatgcccaacagcccaacaagaataatgacaaccatcataatccccaaaaggtattcccgtctttcgttccgtttgttccgaagttctccggtggttacaaatcgtctgtattttctcatattcagtcaacagttcgttacaattctatttcatttataattgttgccaatatttggtaactaatcactgtttaggcgataaaggtacacattaaccaccactataattcattatttttatgcgttattctatttgacctattaaagtctccgtttttgcgtattttagtcgaattttcaatacactttatctgttcttgtatgttcaagtacaaattcatagaaatactgatttcccttcttgtgccaattttcttatccaatcccgattggcatagttcttttcgtattggtctatcatcattcccagcttgtaatattcttctgctacttgtacaaaagtatcttgatgaagaatcggtacaagcaattcataagtaaacggattttggtttatcaattgacatgaagtaagtaatagatagatatctcgataaaaaagttctcaaaagtcctttcttgctgactccacatttttacaaaaaatgcaaaacagggatcaatcaattgtctttatgcaaaaatcatgtatatttataagaaataaagtagaaggaggcaataggaagttaatatcgtagagacaagaaacgaactcactgacaagagataattaatatcctgaaagcaggaagttaacttcctgctttcaggatattaatttcacggaacgaaactacattaaattgaaaaacagagaaagaatccaataaaaaagaaagctttttcttctggagttcatttacacacgtttattctttaaatagcattttgcaatcaaatcgattcttcgatttaacttgatcacaaaaaacagtctatatcctttcttaaagaacacaatcttttaaaaaaacaaaacgcacgaatcatgctattgcaaaatccatgcgtttttattctattccaatctttcaggccggaaaaaatcgtttctccgcattttcaaaatacaaaatgacaaatcgattacttatccgttattccactcatgattttcaatgctgcattcaataaagtttcattcgtattgccaaaaggcaaataagtactcagataagaatcttcattgtattcgtatgtaggtttgaaaccggtggcataatctgacttttcttctgcattgtatacattgcaaacaaccagattcaatataaaccgatccgttggatgaacaaaaggctttgtagcaacatattcccccgccgttttagtacctatcaatacaaccttcatataaggattaagacaattgataaccatctccgccgcccctctggtagcattggtagtcagtacataaacagtagacaggttaagattggcaccggattggataagctccggattgaatgtcaaatcctgatttgcttccacgcgtttatcactgtatctcaatagagccaacaattgattcatcttatcagccggagcaagcatcgtacagagcaactgggcacaatctaaactgcctccggtgttatagcgtaaatctaatacaaactcatttacccctcctgtctggaaatcccggaaggccctacgcaaatcatcattataagcctgactgtctgtcgtcggccctgccttaaattcattatacatcaaatagcctacctttttcccattccatggaataatctcaaaacggtgaacaggcttatccgccaaagaacgtgaagcgggcattgtcgtctctcctatcggcaccaccccaccggttacctcaccatcttcaccgacaacttctttataaacacctatctgaagttgacgggtacttccctgcagtaattccgattcaacctttttagtgatataatctccattcatcatcataatccaatgaccacgctgcaatccggcttcttcggcaggcgatccgggcaccacataagagattaaagcgttatacgctgtatcattatcaagcactttatataaagtataatcaaaaccatagctcggaatgggttcatccagcaaggagtcgatcttactaaagccattatccatggaagcgacggcttttttcagaaacgcttccggtttctggaaatagtccggagcagcaggtgatggcatatctctataccacagatactcctgacgcatcacactgtctatccaaatatcgcgtcccgtctccggataatattccggccagcggtctacaccacaggaaaaaagacttgtcagtataagagttcccagtaagggaagtatcaatcgttttcctcttttcataatttataggcaatcttaatctgcgcaaatgtagtgaatacttagctttcataccacaattacgatataaaaaagatataaaggagtttcgaaaaaagtactcttcttatcacaccagatatagaaggtactacacacaaacaaaacaaataataatccctatcttcacagatgggaattattgagactccttttccaatttctgttatacaaattttatcggtaggattaaactttcttctttttattgatacaatattcttctaaagaataaaaccaatcagtccctttaataaaaaggggctgtcccaaaagccaaatccttacttgtttagcttacaatccgtaagtattcaatgaaatatcatccaataaacttgagattattacttttcctaattaaggaacaagggtgatttcacattttttactgttaaacagtaagtagcagtaaaaggctatccgactttttggatagccccatgaaagaaacgaaatattactactatcttcacagaccatagtcaacatagtaaagtttagtatccggtactaatctatatccttgatacaacggacatgtactccataacgtgtagaatgtgtagtacgaacacgtataccagaattgtcagtctttagttccaacaagtaaggattagttcctcctgcatcttcttttatcgtactccaatatgttgtgtaagattctacttgagcaagacctgttgagttcagatctctgtatccacctttagatggcataaataagtaatcatcttgtttttctgcggtaggcaatgtcacagttccaaaccaatagcctgctacaccattctttaatccatatacatatccggcactaaccaaattatcaaaatccgcttttgatggtgttttccaaccaatcggacatggatcatttaaaggattccatccggtataaatttcttccttatcaatatccaaaggatccttacaattccaattataatagtctcctccattccaaactttacttatgtactcctgtgtagtggcaaatttaccagagcataaatttccagacgcccagattgaattgcctacccaatatccctttacccaaatagccttagccaccaaatctgaagttatgttattgaccaatcctcctaaagcatactctttaccattaatgctccagcccacatgaacccgtccagaagcttccaatctggtaccagaaagttgaacagaaccattctgctccacatgctgtcttaataatttagttcctttcggaataataatatcccttccttcctgcttattcacatcatatgaaagcgtatatatcggagttacaggttctggcgaatcatcgacaacacaccgaacagtcctaaaccaatatctacccgaattaggggaaataagaaaatctcctctcccccctactatagctacacaggcattagttgccgttgcagaagaggaattataatatgccccaaaagataaattagtcaatctaccgttactattatctctcaaaccggatacaggaaaataaatatttaataaagttgtacctgccggtacttcgtattgtccccattgatgagacttggaattatcctctccatagggacctatcgttgtaagtaaatcgtgattgttctctaaagttttcaattcatatcccgatggggtcttccacttctttccaagaggtgcccatcctcttgcagtcatatatctacaaatatctccaattcctttcgaatagtcatcaatattcaatccggataaattatcctctctattgctttgattcaatggcgggactatttcattaatagcataagggatatttctaatatcatatacttcactagtcggattaaaagtaacctccggagtggaggcatctcctcctaatgcaaataaagatccatatctaaaataaagcccctgataacgttcatgaggtgctctctgcccctcactcggggtatcatcaaaagtcagttttgttccgtcccaataaatattcgacccggcaaattgaggtaacgatgtttttaattcgatcaaacgggtattccccacactattatacgcacagatttttagatcctgatttccaatgcgtcttcgataaaacaaatataaatcagtacctccttctaaagatgtctctatctcagttcgtctatccaaagaattgaccatggtagctaaacctacgtttccattgccggattgggtatcagactgaatatatgcactaacaatatgttctccaattagtactccattattaccggattcatagttggaaagaaaaacattctgtttagtcacagatatatctttcaccaaattaccaattgtaactctaacagttccttcagccgaaacagaattagtaaagttaaccttaatatctgttgagttagagtttattgtttgtccggctaccagttccatccctcttgcgttaagcaattcgatggacgacgaaggtgccacattccctctatcataagcattcgtagtgactgtagtcactataatatcattttgttctccgtccgcataaaaacaaaactctgaattcgacaggcctaaataatattggccgttagccactaattcatgaaaatcatccagcaaagtaacccggcatacaacccctgtacccggttgataattcactaaagcctcctcaatagtagcatatcccctattctccactgactctacattgattttatagctgacattgggcttatttaattgtgcactacttttaggaccaccaagcttcacgtaaaaatatctatcaatattattaccaaaatgtcctgacaaaatgatcccatactctccacctctattatctccggtcaagaatggatatacataaaccggacggtcagaaacatccgacttagtagtatttcccacaatatcactaattatcagtcctgaaagacgagtagcagtatcatctttcgtcccataatcaacaacctcctgaggcgtcaccctatcaattggaagcatattatcaaaatatcccactgacgggacatcgacaactgtgaatcctgtcaatataaaactatttttctgattcgcttttgtcgcatcaatgtatagtttagaaactattctgctcaaattcaccacttgttccaatgacatatttttctctattttatcgacccgaatcattgaagtcattggaatcttctcattaacaaaaggaattcttccctgcggattggaaagtggagtcaatcctgcacctcccgatgaaaccggatcaccaaatgtcagcagaccggatatctcatcatatgttttcccactgaaagactcctttttactcataatcattgcatccgcattcgcaacaaaatacaacacatgcggttcattacttactgatagctgcacaatcatctgaccggctatttgtttagtcggtacagcctccacaaaaacagcatccgaagttgttgctcctccggccggcagtttaaatgataatacccatggattatcaaaatcaccatcattgtgaattgttgctttggtaaccggtttattgaaagaacccgattgaaactttacagcaatattagctttcccttcaggtgcttcaggtatacgtcctgaagcatcattaataatattttcgtccgtacatgcatataaaaacataaacagaacgaacagtatacttatatagttcatagatttctttttatacataaaacaaggacgtaattcaatttatactacggggagcccatttaggcctgacaaccagatctttattcacattagaaataacagcccctaacatatactcttttccatccacaacccaaccggtatggagtctaccgtctgaagaagttaaaacctgatcagaaagtgttatgctgttgccagcatcgacatattgttttttgataaatatatttcctgaactcacagttgtacgggcatgtgcttcatctatattataagtcaacatatataaaggcttgatcgattcaggactgtcatctaccacacaacgaacaggcatcaaattcgcatctctaagcactccagcatgaatgaatggaatatcattctgctcttgctgaaacgtatatatccgttctccgcttttaggggaactacacatatatcggatataacaacctttctgaaaatatccaccgctcacacttgcagagccactggcggggaaaaaatatcgattgtcaattctgataccttgttccaaggaagtatttccactccaatctgagttttcaccgatatcggtccaaattccttctgttttctttacatcagcagaaataatagcccgccaatcttccttggtaggcgttctccatttcattcctttctctgatccgggtgcaataccccttcttgataaaaatatacagatatcccctatatcattattaggagagaaaggcatatttgacatagactccggataatccatatcagtaagatatggaatatcactgcttactgtatatctggcacctgaagcgttccagataatctctgataattggttattacttcctcccgaacgggcaactattccaccatacttgaaatatacaccttgataatgttcatgaggtgctttttcccctttctgaggtacattatcaaatgtcaattgctgttttaattcatcccaataaacattggaacctgctattccaagcccattcactataatcgttctgcgaagtccggctgcataaatcagtaaagtatccgaagtcacggctgctgttttacgttttattgtcagaatcccatttccccttccggttgtcttatcataagaatatgtcagttttgtcttacgcatatcaaacttagaactcacatttaccactgtaccatccgatgaatacaaaccatctgataaacgaatgttttcttccgcaatattttttgttacaaaatgaacattactctctgtttcataagaataaggaacttctaccttagaaaattgaatctcaacgccggaaacatcaatgttgtcagtagcatttccccaaggcaaagcaacaatattatcaatcacgaccccactcatagtgatagtgcccattaattgataatatttattcctttgagattgaccgattgataatttatgagtttccggtacgccatcacgaagaaaagtcaccttaatataacaaggtattcctctccccagtaattctcctatcaaataattggagcgtatgacagtgtaattctccgtaccatcatcaacagataatatctctatatccctatttatcatttggtcgtatcctaaaattagtccgtcgtaattcaatggatataaataagaaaaagacggataagaataaaaggtagccgctttcaaaagaattctgtttttcgcattacttcttctcaacttcaattgaagtttagcagcaagacgctccaactcgacatcaatcacatttttccataatacaccattatcaaaagatacagttccatatgaactattgtcttctcttacctttactattactccctctctgatccaggctaatggtaaccctctctccgatttcccgtaaatactgggtatttgaactcggttaacttcgtcttttgtagaagcatcattcaattgttgtgtcatctctactgtttcattggcaacagcatacaaagtataattaccaggaataatggaaaaagtaaaattcctatctaccgggttatcgatcatctgatttatgacaaccttacctaaagcagacactgcaataaaacggaatttagaaatagtaactccaccctctacaaaagaacgtgtggaaagctctatttgaacaggattactattctgaatctgatccataaactcatctttatccgcaatacaactatatattagttgcaacagaaataataatgggagaattctttttatagcttttctcatactctctttacaaactattttataatgattagacctccggattgatagaaataatttcccaaccattaatcttcatcgagaccaaagtcaacccatcaaacttgagttcaatttcataataatcttctctatcaagatccatctgttgattatatttaggagatttcattatctcctcaataatattcaacccttcgaattctggtataatattatttccacggttatccaaaaaatgtaaagaaacccagcggtcctccattaaacgcaatatattatatgtaaatattttcccctcacttctagtattagaagacaacggaacatatattctttccaaagcatcattgggtatggcatttctgtaattataccttccgttatccgctgagagaacaggagtatactccatatgctccaagcccaatacacgaagttccacacgatttgtattctttgtaaaatcaatcatgtaattaaactcttttcccgacctcacctctacattttctaccattcccacaaacaagtcttttaaagagtccggaaacaaagtgccttgcctgacagatacaactttcagccgaaaatcatttaaggatgttatgaaaggctcaagtccggatttaaagaactcttcagccgtactatcgaatgttccgatatgataatcagccaaatccccaccgatagctacaatatcatatctgccatcaggcagattaagtttcataatatttccgcccgaaagattatatccggaatcaactttcatcgtaacaaatttcttttcggaatcgaaaacatatactgttacaacatccacagaagaagaaaataaatcttcgttggcaggattcaacacatatctgaacttcaagaaagttccctgtgaacaatcatcggtattctccgaaatacaccctgataataaaaagaaaaagagaaaacagataatctgaaactttattttcttatcttccatcgctactaatatcttgatgaattaattttagaagaaggggcattttaagataccccttcaatttagaaatggtttatacttccggtttgataaacacaagttcccaacctttcactgtaactgttacatcaacattaactgcatccggatccggatcaacagtaacaggaggtacaggaacatccataatttttttaatatcagctaaatccagttggtatacttttccattagcaaattctccaatgtatgatgaggaagtattatcttttaaagctactacgttcaaccaacctgttttcgaaagagctccaactccattcattttatattcaacttccataatcacatgaggatgatatttagcagcctcttctttagttgtcgcagcggcagataaagaggcaatatggaaatcctgtggaaaaaaattatagccatcagctttgccagaatcaaacttagtaataggagtcccgataaatgtattgtataaatttgatttagtaccaccagcagtatacgcagtcgtccaatcaggagccgaagctttggttgtttttacaacagcagcatctgctcttttctgttttacattattcaaatagattcctttaaccttaagttctgccagatttgtgaatgaacttcctaaatctcctttaacttcaacacgagccatctccggtgctacttctatagaacaggtagaagtagatcccccagtaacaattgcagcacctccaaccacacgtactgcatcagatgtcacacctccctgacgagaattgacatcatcagtctttgtggcagaaccatcaatattaccctctacttcgatataagtagctgcaccggaaatctcaaccgttttacttcctgttcctgtatccaatcctgtaaaatcagaaacttgaagtgtcaaagtattgacaactccaccatcttgagcagtcttcgcatacaactttacagttccactcatagtcaccatatctccagaattagcaatattatcaattgccctggtatgagccatagccggtaaattaagtactacagaaaccttcttagacattgaaacgggaactatttcctcgttagaacacgatgtaatcaccagagcagtacatgctactgccagcatagaattcactttcatcataaaaataaaattaaaaattactattgtttatttagttcgtaatacacttttatatatcccgcataacggagtttaggaaaaaagtgctctttgatatagcgatacggtttaccgcttttcaaatccatcagtttacgttctctaccatcttttatacttatatgatcgatgatatccaacacctctcttttataacttatatcagacttcaaaatcatcgttctcaattcactccaattttctcctccattataaagttctaactgttcatcttggatagctgtattctcttttaaaaaatcacaaagaccctggatacggttagcagctagctgcttattataatcgtatttcccctcaatagaagcaaatcctccaataagtacttttacaactttcgaatcagcagcagcattaagcttattaataatatctattattttagcacaaacctctctgttattcatgtaaccgctatccacttttgcactgttccaagggaaataaatcaaaagactattagccacttctccattagcaagtttttccttatctcggataatatccgatttagagaaaggttgtacaaatttctccttctgggaaatttcctgcgcaactgtcatcgcagctctctctgaaataatatcattttctctgatattctcggctattaagggcaaagtattatcaacgatatccaataccaattctcctcttttcaaggccaatacctttccacaaccacaatcatctccacgtaactccagtcttgcatttcgcatccattcctgagcaggtaaaacggctgaatattgtactgttctttgtttttccgggccataacctttcaatacgagaaaatattgttctttttgctctttcaaagctaccttgcgatactctttcgaagaaacgtacctttgataagctttgtattccatccgtccttttaaaagtattttgggtaactttgcaacactatcttcaccatgctcataagatataagtaccggagtatattcaactgagtgattagtacttactttgacattttcaatatctattgtcatagttaagcgtaccgaatcaccatccaattccatttggcaatcaggtacggatattcgattgtactctgcttccatagctccaatatcaaaagagctccatatgataagccctaaaacaaaatatcttttcatatatttttccatattacactctacttaattacataaatcaaagacagtcctacctttgttggtccgacaaaatgtttattacctgaatttattttctcactacaacggtaacaaggatacttgtcatattttgcataagcatatcccaagcctaccgtcacctccagattccaccgattagataaaatccactgatacccataagaaactccggttccagcaagccatccctgataacgattattcttaataaaatttgtttttattccccaaggaagagtcccgctcagattataaaaagcataatgtgtatgtaaaccaataaaatgtcctctatatctctggcaggtccagtatctgacttcaggttgcaccatccagtgctttattttatgattatcagagaatgtccacggattataattcccggataaatccaaagtccatttgggacctaatccgaattccattcccaagttgatagtagaggtcatgtcatacaatatgttggtctttgcaacgatattttgagcataaagaaggttacactgccctaacaggacactaattaaaaaagaccatattactttcttattcatgattatctgaactaatttatttatatattgatatctatctttttatttccggaaacccaatgtgaccgattcacggatatttctgggagtatctcctacataacgtttacagtaattacaaaaattcgcatatgtagaaaatccaaattcatccaatatcacttttataggaatatctctatccaatagtcgcgcttttacgtgttgtgctttttgtttcatcaaccatttgctgggtacttccgaaaaacaactgtaaaaaagccgttgaaaagtcttcaatccatacccacatttatctgcaagttcctgcacggttctggcctccaaataaactcccataactttatctttaaaagtaagcgaagcagctatcgaatgataaaaaaaattcactttttcctctttggtataataagcccgaagaatgagaaataactccttttgtttcaattcgtgcatgtgctgacagctcatacctgaatccaaatacttgactaataattttagaaaagtatccaatggaacacgaatatcaagtgatttaaactcatatttaaaatcagtgataaacgctcctaattgtgacaaagaaagtttatcacacaactgaacgggtattccataagaaagaattattaagtctgcactttccttggcgaaaattttgaaatcagcagatcttggcaaataaatcatttctcctttaccaacctcgtaaccaacacattcattaaaatcaactattaaagcaccttccaacagaaaaaaaaaatagttatttttagcagaaagttcgcaccaagtttttcccttttgcaatgttaagtgcctgaaaccgacctccggatttccattataaaaaagacaattcaaatgttcatctaaataattaaccctttttgcttgcctcatttgttgtttcattatatatatcttcataaaactgtttttagggaggggggggatgacgacgcacatatgtcgaataatcaataaaattctactctatccacaaaacacactttaacacctcatcacagactcctaaacaacagaatatatcagtaacccaatatatcctgcatttttttgcaaagaaacgcaacaataagctaccacctgttacccgaacaagaccttttattcactctataagacactctaaaaaataaaatatgcaactctctataaaacaataatttatataaaaaaagaaaagaagaaaaaatagaaatcatattttgaataataattgaaaagaaaataaatgaaaattatatcgacatcagtaaaacaaaccatttgtcagaaaataaaaaaagacactacttctcttctcaaaaacatcttttcagattagctaacataataacacaaaaaaaacactgaagtatattggtcataaggttatcatatcatctgaattcataaaaagctttgttctgcaatgactcctgcacaaattagactagactgataaccagtaaatataccgatacctcctgtaacatttgaatataatgaataaaattctttccactatcaatggtatgtttttcccaaaacaagtaatgatgatatttaatcgaagtattggcattagcattagcctcaaaagcagaatcctcagttattattttcagattcagaactttattttgaaaacgttgccggacgtaaaatatgaaaaatcctcgcacagtattatctatttcaacgttaatccatgctctcaccgattttcccgacctattttcatatcattcttatataatctccattcaccacctacatttttgcattccaaattaaaaggctcaaacaccaactgaattgctaaatctaaatcatcgaccgggaatataccggtaaagcgcaaactgtcacaatatctgttacataacacggttattccgtatacttcttggagttttttgatcacatcatttaatggtatattttcatatacacattgttttcttacccataccggttctaattctttttggatattcaaagatacttttccgagaacaacagaaatattctgattagctgttaaaatctgtccactatttagtttaccgttttccactttaatctttccttgaaaacaatatgctttaaattgaccgttcttttgactaacgctgaaacgtgtaccaagaacggaaaccttatatggatccgcattcacaacaaaatggcttcccttatacacatcaaaatatgcctctccctttaacttcacttctctgaaaaaacggaatccccaacgattatagtgaagtgaggtattcctattgagacatgcaacagagtgatctggaagttcaaccaatattccttctttttccgcagaaaaaacagtcaattgccccatagaataccatcccaagacaaccactacgacacatgcacatatagccactgcagaccaaattcttttcttttgaacttttctttttttcttcttgataatctgcgaaaaggtagaagtcatttcctgacgttcctcattactcagatgtatctcattgagtgtaacatcttccaacaattcttttaaatctgaattttgcattctggttacttgctctttttccatcatagcctgtcaattataaataatacaaacagagaaacggcttcttctattttatgttttctcattattttcaatgctgatgaaagaagattataaatagattgtttattgattccaatggtagttacaatttcttctatatccatatcacgaaaatagcgcaaataaataatttctctttgtcttggactaagtttatctaacattttctgaacaaaactactttttttcgcaatttcaatattatctgaactctgaacctgcttgactgccaataaaaactcttcttcgctaatttcctctatagacagatgaggggcttttttcagttgatccaaaagtttgtaacgtactgcccgacataaatatgcccgtacgttcatcaaatcatccaaagagttccgcttttcatatagagatataaaaacctcttgtatcacatcctttacaacacagctatcccgattaattttcattccataagaatacaaaaaatctacgtgttcagaaaacaataaactccattcttgttcatctccactttttatttttctccagtctatattttttttcataaacaaaacgtattagaatattatattccaattattttcaaaataatatattgttatagaaacaacatattacatacagaagtaacaggttagcacatcacaatatcaaaattttggttttaaacaaaagaaggcaaagaaagttctgaaagtcgagacgttatttatcccgtatccaataaatcaatctgttctcattatatccttgatcaatatgaaaaatgggaaatatgattttcatacaccatatctcccactccatatctaataattattaccttgcctattcaacaataacagcccgattcaatttaggtcccccaaaacgattattcgtatcaccctcagcttttttaataagacgattagcggatataccatatttattaatcagcaaattatacacataatctattctcttttcacttaatcactggtttagttccttactaccggtatctttatctgctgaaccaattaaaataaatgttttgttccggtctgtcttcattgcatttttcacgtagaatttcaaatttactaattcttttgagtccaaaaccgttttacctatttcgaagaataaagctacgggtgaagcaacgggccttaattctacaaccacttccagatcagcttttctggcattttctaattctgtaatcagatgttgtacctttgaatccaactcttcattctgaatacgaagttcatttatataattgttgtaacggctatagtccgcagttgcaactttactcacaggagtaaaagttgttttacccagtttaaagtttaatcctaatgtaacagaactcataccttctcccttacatccaccgacgactccatcaaaattctgattaacaaacatttgtctcgtccccagtgttaaatcaattcttttatttagacggaaagtatttaatatacccagtgcagcagcaatttcatcattatgctgattactaccataggaacgtgcccatccaaatcccacaataaggaataaaattccttgtatccggcaaaagcattcgaccagttccacataaggtctgtatgtatatttaaaattctgaatttttccttatagtaattccggtattgctttttggcatacccactttgagtagttgtcaggcctttagcctgaattccagcatattgtaaacgcactccataagcaggagttattcatttacctaccgatatgtctaatgcgggagacaaacgatttcccaaagttaccttatggtcatactctccttcataaacattaatacccccggctatatttacaaaccaattatcaaaaaaacgattagtttcgtaagtcttatgatgcaaaataccagattcttggttatccgtttttctgttgagctataccacatacagacaacagacttaaagctattgaaataatttctcttttcatttattatccatattaattaaaaacatataaaactgctattcattactctttatcagttagcttcatcttgtatcccggagtaaatttcaccacttttctagcgggaatcaccatattctccccggtagatggattcaacacatttcgtgctttacgcatttttatagaaaatgtaccaaatccaactaaagtcacactctcttcacgaagtatagcctcaaccatagcattcataacaacctctacaatagcagaagcttcttttgcattcaggttacccctcaatgccacttttttaatcaaatcatgcttattcattttaaacaaattaaatattgaccataaaaataaagatgatattataatttggctgcaaattaaaggatataaacaatatccgctattacttaattcccccaattgattcactttatgcgacacaatatgataacaagaaattttaatgtagttttatcaacgattaaagtactatgataactaaaaaaactatctttgttttcattcaataaccagatataaataaaacaccttattactatgatcgtacaggatttaaattttgatcaaacagtcgccatggcaaaagccaaagcggaaagcatgatacaaaacggactttattcacgtttcgggttatccgaaaaagagagactggacaaagcccttctaggctgtatcggagagttggcattccaaaaacacctgaaaaatctgggaatcccattcgaattggaccagacagatttccaatcccatcactccgatgaatttgacgtaaaagtaaacggtgccaaaattgatatcaaagtagcaaagaaaacaactgccaaccctccaaccgacaattggacctatggttatccacaagagcagcaccccgaaaccaaagattacgtcgttgtaggttgggtagacttcaacagaaaagaagttggcttttatggttggatcagaggaaagcaaataatggaatttaaagttgtcacccaaaattcttatgccaagtatccctatctgacacctaaccatgaattcaaatggggatgtctcaccaaggatttgaatgagattttgaagtaaaacgattaaattatccttgaaaaagactcttcattgaagttttttcatttttcttcagaaattcgtagggtattctccgtttgaacgatcttatatacagaaagcaaactattattcaccctttaaactctgaaaaagatgaaaacgcaatggataagatcaatcggatgtatactggcagttttgattctgtcgggcatcatgccactggctgcacaggacaatgcggaaagatacaccacgatcagtggagtggtcaaagacaaactcaacaaaaagaaactggagtatgtcaatgtatcgataccgggaagcagtgtcggtaccgtcaccaacgcagacggtgagtttactctaaagattcccgagtcggttcaggccaaagacattgaagcctcacatgtaggttacctcaattcccgtatccctttaaaagaagaaaatcccacagaacggattgtctggctcactccttatgccaacctgcttagtgaaatcctggtaagagccagagatccacgcagcattgtggaagaagcacttcgcaagattccggccaattatagtccccagagcaacatgctcacaggattctacagggaattggctcaaaaagggcgtcgctatatcaatatttcagaggctgtaatcgatatttataagacgccctacaatgaaactgccgaacacgatcgggttcagatttacagaggacgcagactgttgagccaaaaacagagtgacacactggctgtaaaattactcggaggccccaatatggccatttatatggatatagtaaagaacccggactgcctgttggctcaagaagacctattgttctacgaatttcgaatggaagatccgaccagcattgacgaccgatcccagtatgtcatcagcttccgtccaagagtaaaattatcctatcccttatgctatggtacactctacatcgataaagagcgactgtcattcacacgcgccgagtttaacctcagcatggatgataagaataaagccactcaagctatcttaagaaaaaaacctctcggactgcgtttcaaaccggtagaagtatcatacctgatatcatacaaaaacctgggagggatcacttacctgagttatatccggaacaatatccgctttaagtgtgactggaagcgtaaactgttttctaccaactataccatcttatcggaaatggtggttacggacaggaaagaaaacaatattacagctattccatataaagcagcattcaaacaaaatcatgtattctcagacaaagtggataactttaccagtgacaacttttggggaggctataatatcatagagcctacagagtcattggagcatgcagtaaacaaattaaaaaaacagcagaagcagtaatcactttttatagtatctttgacgaactctaactcccgatatatcccccaatatgctgaacgacgtatttatacttactcaaataaaagaaggcaatataaaggcgtttgaaacattattccgccaatattatactccgcttcgcctatacgccgccagcataacgggtgaaccggacgtagccgaagaaatcgtcgaagaattgttctatgtattctggaaggatcgggaaaaacttgagatttttcattctgtcaagaactatctctatcggtctgtacgtaaccgctctatccagtattgcgaacatcaggatgtcagaaggcgctatcaggatgcgattttatccgttccggtaaatatagcttcacccgatccgcaagagcagattgagtacaaagaactgcaacaaattataaaccgaacccttgagaaactaccggagcgccgtttgcatatcttccgactacaccacacagaaggaaaaaagtattcggaaatagcctctctcctctcactatcggtaaaaacagtagagaaagaaatgacccgggcactccggactttacgaaaagaaattgagaattatatccagatatcatgaatcgaatcgaaaaaaacaagacccaaaccgatcaggcgtggaacaaattacacaatcgcctggagacagacggactgttaccaacggtgacagaacgtcgttttgccacacgtccgaccgtatggatcggcatagcagccattgcagctattataagcctatgtgtttacctgcctacggtgttacgaaccgaccgccatctttccggcggtgaactattagtcaaagcaaacaaagaagagagcatactggtcaccacgcttgaggatggttccgttgtctatctgtcagagcagacttcactggaatatcccaaacatttttctaaaaaaagaagagaagtgagtttgaaaggaaacgccctttttgacatagcgggcaatcgtgcacgtcctttcttcatcgaaaccggaaaagtacagatcgaggtgataggtaccgcctttcatgtgagaaacagtggcaactctccattcgaattagcagttcagagaggtgaggtaaaagttactcaaaagcagaatggccaggaaatacatgtcaaggccggagaaaccgctactttattgggcgatgaatggcagttgactgtgaccgagaattccgaacagtttacccgatacatgcaaaatatgcgtttcaaagacgaacagttggatcacatcctacatgccatcaaccttcgccagacggaaatacatctgcaaagttccccggaactggggaaacatgtactgacggtttcgttctcagaggattctcctgagaaaatggccgagctaatcggccttgcactgaacctgaagtgcacacgcaatcaaaacataatcaccctctccgagtaatcccggaatcaaaacccaaaaacaatgaaagcctcgaaaagtctctgcctacaatgcctgttcacctgtctgctattattcatagcagcccgggtaaaggcggatgactccggtatactcgatcgtatcatccggttaccgaaaagtgaaatgaccgtttataaactactctctaaaataacggaagagacaggatacctgttcatctacgacagcaaactggttgacaatgaacgtacggtaaagttgaaaggtggaaaacagaccgtacgccaagccatttacagtataattggtaatgacaatcttaaactacgttcggtagacaaacacatcatcatttatcgaccggaaacggcattaagtataagtaaggaagaaggtttatgcagagacagcacactctcattcactcttgaaggaacattaatagaccaactatccagagagccgatcccctatgctaccgtaggtgccgagggttcctccatcggtagtgtcaccaatcaaaacgggagtttcaggcttcatctgcccgattccctccgaaacggccggattcgcttttcacatctgggctacgtaccgcaaaccacggatgcatccctacttgccggacgaaatggaacttttgctctggagcctaaggtaattcccctgcaagaggttattgtacgcattgtcaatccggtgcgtctattgagagagatgctgcaattcagaaaaaagaattattccaaagtccctgtctatctgacctctttctatagggagggtatcgagcaaaagaaccggtttgtcagcctgactgagggaatattcaagatatataaggcttcgtcaagtaccccggaaaagaccgaccaggtaaagttgttgaaaatgcgccgtatcactaaccaagctgtaaaggataccttaattgctaaaatgaaatcgggtattcatgccagcatcgagttagacctaatcaaaagtttgccggattttctgcttccggactccaaagaatgtgtctatgtctacacttccagcgaccttgctgttatcgataaccggcttgcccatgtagtctcctttgaacagcgtccaagtatcaagtatccctattattgcggtgaactctacatcgactcggaaaacagcgccctgctccgggcacgattcgagttgactccgcggtatatacataaagcagccaacatgctggttgagaaaagaagccgcaacatccggattattccccaaaaggtggtttataccgtatcctataaaccttggaaacagacatattacatccaccatgtacgcggagacttacactttaaaataaaacaaaagaacaaatggctcaacaataccatcctacatacatggtttgaaatggtcacctgcaagatagaaacggataatgtcagccgtttcgaccataatgagcggttgtccgtacataccatctttgcggaaattccatttgtatacgacaaaagcttttgggaagatttcaatgtaattcctcctgaaaaagagttgagtgaagccatagagaagatttcatcgaaaatcgaagagacagaaaattaaagcaattgccgacactgtttatttcttcaagttcactcccctttcggcaatatatactccgctcagaatcagtgccgatcccaataaagcaactattgtgatggtttcgtcgatcacaatggcagaggtcagcaaagtaataaggggaactacataaatataactggtggcacaaaccactcccaattgtttcactgccgtattccacataatatagcacagcatcgaagcaatcacccccagaaaaagcagatttagagcgacaacgggccggaacaggatatgtatatccgtctgtaaaggatacactaagaataggggtaaaagagtcaccaaaccataaaagaaaactttccgtgtaatgaacaatgtcggataatgagtattcatcctcctgagaagcaagcaataaaaagcccacattaatgcagctatcagggtcagaatatcaccggccggactaagctgcaaaatgaaactaccattaaacacaaccagtcccactccgataagcgccatcagagaaccgcctatcagacgtgcttttaatttatcacccttatagaaaaagggtgccaacagtgcagtcagaataggagtcgtacagataattaacgatacattggaagcaagcgtcatacccaatgccgtattttcggctacaaaatagagcgaacctccacatagtccgagtcctacaaaccgcaactcgtcctgccaactcttagccagcaacacacgaggagagaaaaaccagatgcaaatatatgccaataaaaaacggtagaataaaatatcgacaggtgacaggccatattttattaaaactttagtagcaacgaaagttgttccccatatcattactgtcaccgctgccatcacatgataccatccggccgttctctgagttgttttcatattcttctataaattttctccgcaaagataaggattgcagccggaagaaagtcgtatctttgccactcatttcttattaaataatatcatgcaaggaatcaagaatctgactcaaggtcctatcaataaacaattgtttaacctggcgatgcccattatggccacctcgtttatccaaatggcatatagcctgacagatatggcttgggtagggcgtttggggagtgaagccgtcgccgccgtcggttcggtaggtatcctgacctggatgtcgggttccatttccttactgaacaaagtaggttccgaggtcagtgtaggtcagtccatcggagcacaaaatcatgaagatgcccgtaatttcgcctcacacaacattactatcgcccttattatttcactttgctggggtggactgcttttcctgcttgcacgtcccatcatcggtatctacgaactggaagcacatatcaccgaaaatgcaatcgcttatctgcgcataatctctaccggattacctttcatttttctttcggcagcctttaccggtatttataatgccgccggaagaagtaagataccattctacatcagtggtaccggattggtattgaatatcctcctcgatccccttttcatcttcggtttcgggctgggtaccaacggagcagcctatgctacttggatttcgcaagcagcagtattcggcatttttatctatcaattacgttgcagagacgctttactgggacgattctctttctttacccggttaaagaaaaaatatacccatcgtatccttaaattaggtttaccggtagctacccttaacaccttgtttgctttcgtcaatatgttcctttgccgtacagcatccgaacaaggagggcacatcggattgatgacctttaccaccggagggcaaattgaggctatcacctggaatacatcacaaggattctctactgccttaagcgcattcattgcccagaactatgcagccggacgaacagaccgtgtgatcaaatcgtggcatacgactttgttgatgacttcaattttcggtacgctctgcaccctgttttttgtatttttcggaaacgaaatctttgctctctttgtgcccgaacaggccgcttatgaagcaggaggcgtgtttctccgcatcgacggttattcacaactctttatgatgctcgagatcacgacacaaggtgtattctacggtatcggacgcaccattccacctgccattatcagcatcacctgcaactacatgcgtattccgctcgccattctgtttgtccgcatgggcatgggaatagaaggtatctggtgggctgtttgcgtcactactgttgccaaagggcttattctggccggttggtttgcattgattaaacggaaagtgttgtcgcgcccgatactctgaaaagaaaaagcatagcttagacaacaaaagcacatatcttcttgttttttttacaaggtaaatgacaggcaaaacaaataatctgtatatttgccacgtttttataaaatggaagtatccatttaattattaactatataaaaagagcttaattatgaagaaaattaaatttatggctttgtttctaagcatggcgcttgttttcggaagttgtggaagcatgaataatacagctaagggtggtgtcatcggcggtggttcgggagcggccctgggagctattatcggtggtattgccggtaaaggaaaaggtgctgctatcggtgctgcagtaggtactgccgtaggtgccggagcaggtgttctcattggtcgtaagatggacaagaaagctgctgaggctgcaaagatcaaagacgcacaagtagaacaagttactgataacaatggtctggctgccgtaaaggtaactttcccctcaggtatactttttgcattcaactcttctgcactaagtgcagcatctaaacaatcgttggctgaatttgccaatatcctgaaagaagatccgacagtcgatgtagccattatcggtcataccgataaagtaggcagctacgaagctaaccagaaagtatcggccaaccgtgcatacgccgttgaaaattatcttcaggcatgtggcgttaaaccttaccaattcaaaaaggtggaaggtgtaggctactcacaatacaacgagtcggaaacaccggaacaaaaccgtcgtgtagaaatatttatgtacgccagtgaacagatgattaaaaacgctgaagccggtaaataacgatttcataatacacccccaggtgttttatgccatgtgccaatatactgtttactccttcatacaaaaaggatggtaagtcagtatattggcacattcgtataaccaacaagatcacacacaatgaaactccggaaaccctttcgcattctgcgcaatctgatcctttttttctttatctcctcgatcggtgccgtcattttctatcgattcgtgccggtatatgtcactccacttatgattatccgctctgtccagcaactcgtttcgggagaaaaagtggtatgcaagcatacgtgggtaccatttgataaaatctctcccagcctgcccatggcggtgattgcttcggaggataaccgctttgcctctcacaacggattcgacatgatagaaatcaaaaaagcgatgaaggaaaacgaaacccggaaaaagaaacggggtgccagtaccatcagccagcagacagcgaaaaacgtctttctttggccacaatcttcgtggatacgaaaaggatttgaggtctactttacatttctgattgaaacttgctggtcgaaagaacggattatggaagtatatctaaactccatcgagatgggtaaaggtatttacggtgctcaggcaaccgctaaatataaatttaaaacgacagctgccaaactgacccggggacagtgtgccctgatcgcagcaactttaccaaatccaatacgattcgactcggcacacccctcaccttatatcaaacgacgccaaggacaaattctgcgactgatgaatctggttccgaagttccctcctgttgataaggaaaaagcgaaaggacaagatacaaaaaaacaaaagaataagaaaaagaagaaataacaacttcgccaaaccgccccgataatgtgaggataatatagaaaaagaggccacttctgcaaaaagtagaagcagccccggagatttatgtaaaacagaaaattactgttgaggacctgtaccaaaagccggtgcctctttatcataccaaacacgttctttgcttaacgtcacaggtgaattactcatctcaccttcatacgtatagccctgtgcctgataggctgcaattgtaatgtcacggagcaaatcagaatcaagaggtttgcttaccgggaaacgtcgaggaatgacgtactggtcacccaataacggatcaaaatcctgatatggcaacaaggtactgttcttcattggcactcccgaacgacgggcggtaacaaacatgtccatcggaagcatcagatagtgaatatattgctgaatataaactttctcaaggtctttactcaaatcacctgtcagatggtatgcatcatgtgacagcatttcatcaatcatgccttctttcaggctgattgtcttatcgtgtacatcgcctgtgtaggttttatcataataaggaatatgattcttagcggaaacaaaatcataaccacgaacagacatctcgacacctgcactcaaatactgttgtgcggtcatcggcagattggcacccaataatttgaattccgccagcaggaggttggtttcacctgcagagaagtacagtccgtaccagccgtattcttctttatcctgtacgggagctacatcgggaacatcggggaatgtgtaaatcaacagacctttaatattttcggtattccggtaggcaatcggagtataggtctttttcgcaccgtctttgctcagcaaatagaacaactcgttattggggtcgaaatagtctttgtactcttcctttttattgatatccacttgacaaggaactccataatagcgtacccaaggctctccgggagctttccagctctcaaagtgtttctttccgtccgcatcgaccgtatagttcacattggcttctacataagacggtaaagctcttttttgatcaaagaaaccttgaactacattagagttgtaatcgttcttctggaaaaagtaaaacaaacgagggtcacgattgctcaccataaaatcgattaactgcttagttcccgcaccaacggaaatatcattgttccagttattgtctcttttacctttattgaaaacaaaatcatcgtcgagagttaaaataagaccggccggattctgggcagcctcattcacaatggcaattgcacgagccttgtctttattaatcaggcgtgcagcaattctgagtttcaatgagtttgccagtttagcccatttatcaagttttcctctataaataaaatcctgcgcaccaagcacgtcttgcggattattctctctcagatagttaattgtctcgtcaagctgtttcagccagagttcgaacaattcttcctgcgtatcgtatttcggagtcagagtcccaccataacgggccatttctgcctctgaatattgacgggatccatacatatccgagtcttcaagtcccaagtacaccagcatcggattacataaataagcaatatattcgtattttgctttttcatcatccgacatcagactgatctgatgctttatttcattcgtataacgaagcacctcgttgacctgatagccacagccggtctgagttaccatattcaatttgctggagtttccacctcctgaggcagttgcctgcacccaggtagacattgcatcgaaaccagcaaaccactgaagataatcggccggctgaaaactcatggcacattgagtaaataaatagcgtacgttcggttttgagactgtggagggattggtattctgtccggcaaattcgtctttacaagacgacatcaggaagcctgtacctacaacagccacagctgccatatatagatattttttcatcatttgtttcatactaaatatcacattaaaggtttagaaatctacattaatagtcatcatataattagctgtgtaaggttcataaccacggatacggaactcagaagccgtattaccacgaacactctcaggattcagatggttaggcaacgagttatacagatatcccagattacgtgcagagaagctcaatcccaatccctgggcaccaaacttacttgccactgatttcgggaagcgatacgataaggtgatctcgcgcaaagcaatatagttcaactcgtgtacccaagtgtcgaatatcgtattctgtccccaggccgcacggtttacatgataagttccggcatgtgtgggttccagtttcccttctgccaccaactgtttgtaggacataccgcttacatccattttcgttccgtctacaagtgttgcgaacgtaccattcttaaatactccgtcggggataacaccatcgccataagagattcctttactgtcaccgtactggctggtccaagacaaaccaccatgttcaggatcacgccattttaaagaactcttgatccatccggcctgtgtaccatacaagttagagtaagaagctaccaatcctccaaaacgcatgtcagtagcaatatgcaggctcaaatttttccaagacagagtagtagataaagagcctaaaaagtcgggagtcattttacccacttcctgtacttttccgctacgtgcttcgtaagctccccgccaactgtcgtcccactccaacaatgtttctcctttttcatttttagccggaagaatgtcggacatcaataatccgtagtcgccacctactttggcaaccgaaccgatatggtaatcgtaatcattagcatagccgctcaatgcgatgtagtctgctacattttcatgtaatgagataatagtatttttattctttgtatatgtcattgcgacatcccactgccagtctttatttttgtacggagtggcgtttacagcaatttcaatacctttattctgaatattaccagcatttatcaactgagtgttcacacccgaaatagcaggaacttcaatcgacatgatctggtctctcgtattttctttataataagtaaagtcaaagttcaaacggctgtcaaacaaacgtaaatccaaaccaacttcccaggcattcttacgctccggtttcagcttcaaactcttcattgtcttatcgagagtgttcacatagatattgccatcatacatttctttagtttcaaagccatataccgagttcacataatagggatcggtatcgttaccgacctgtgcccacgatccgcgtactttagcaaatgtaatccaatgcggcaaatcgaatgtttcattgagcagccatgaaccggatactgacgggtagaagtaagaatatgtacccatcccgttttgatataccagagaagacgaccagtcattacgtcctgttacatctaaataaacctgatttttccatcccagattcaaagcaaagacagcagacatcattctctttgtatttgaaatgctcgcttccgactttttagggttctttgagttgtcgacaaaccattgtcccggtactaccataccgccatctgtatatactttatatgcttccgaacgacttgtatagtattcatatcgcgcgaaaccacctacgctgaaatcttgtatctgcttattgacagtaaatgttccgccaaaggtagcctgctcttttgtggtttgccccattgtatacttaccgccttcatttgcatatccactacccagttgtttttcttcaaacttagtgtaatagtaattcatattggcatcggctttaaatctcagccaatccagaatctgcacattcacttccatttggggacgaaccacagtctctttctgggaataatcgtatttatcgatcataaaaaacaaatcacgtcccggaactgaaccatacttgtcaccataacttgtagatgccagtccaccatgctcacccagatatttatcgcggaaataattcacatccagcatcggagtcataatggttccgttcggattgacgaaacgctctcctactgttcgcggagaattcttcggatttgagttggtgaaactcatagcagccgaaacttccacccgatcactgattttatgcgaacccttcaataaaaacgaataacgctcaaatgtattcttttcgctggtagatcttgctttcttataagaaagagaagtgtaatacgatgttttatcattgccaccgcgaatagccacattcgtattggagttcagccccaattgatacaaatccagcatgttgtttttatggggcgaataattggtccaggtaccatcatagttgcggatcggctgaccatcgtatttaggtccccatccataactgcctgcgcctattagtgtccggtctcctttatcatcgagtttgaactgaaaaggatcccatacagaaccattgttgtccgtgtctttccagccaggcatcaaccccaccccatattcagtctggatatccggtgtccggtacgcatgatcgataccaaatgtttgtgatacagaaactccgaagcctttgaagccttttcccgatttggtggtaatcaccacagctccgtttaggccacgtgaaccgtaaagggcagtcgcagcagcacctttcaggaccgaaactgtctcaaagtcatccggattgaggttcttcagttcattaccatagtcattggcattattgtttccggcatcccagtccatcgtggtatttcccgaagtcgagttatcgagaataactccgtcgatcacataaatcggctgattgtttcctttcaaagtagaagcaccacgaatctgaatcttcgtcgctccgaacatacctccgtctgactgacggatctcgacacccgctacttttccttgtaaggcggctactggagaaatcgtattggcagctttcaggtcatcgcctttgacctcggtcactgcataccctaaagctttctgttcacgctttaaccctaaggctgtcaccactacctcgtccagtatctgggtatcttcttgaagcacaacattaataacagttttaccgcttacttttacatcctgtttcttcatgccgatgtaagaaaactccagaactccgtctgcaggaacattagataaagtgtaattgccatcaacatctgtcactgtaccgatcgatgaacctttaacaagtacactccctccgattatcggttcaccggttccatcttttacaattcctttcactgttatattctgcgcaaaagcagtaacagacaaaaaagatagaacaagcactaacacctttttcatcaatctcacattgataattttcgagttattcattcatttttcttttttagttaaacaatatgtgttaatttaggttataataatggctatagttctcttagaactcagttctaaaacgcattacaagcacttttaaagggattctgagaggtggtgaatagcgaagaaaaaaaagtagaaattagcatttaaaaatattatagtatatttattgtattttgatactttatatctatctttactccgcgaaataggattggcaactccttattttaaaatatacaactaaatctgattgacaaatgtaaaattacagcgtaataaagtgtttaatattgtatataatttacatttttcaagaataactaagttctaagagaacttggttaatctgtttatatatccattccaaagggatttgaaagatatgtgtcatttctcaaattaactatatacacgaggtttgatcactatttacaagtaaaagttccatccagatttagaaaaccagaaacaatttcttatccttttctgaatataaaaccaatatttatttactatctacgaaaaagagtcggtagatttctaccgaaacaagatattacaaatgtcatatacaaaccaagccttatatgataactgcggtggcagtcgaaataaaaagaaaagcaaataagacggggaacgaagcaccgggctccggacatcgaaacaccgggataaaaatagcggaaagccgggcttcaggaagcagagaaccggactttggaatggcgctaaaaaacaaagaccgctccggtttacaccggaaacggcctttatccactctataacaatacaacttttaaaacgttatgccggttcttcacatctttctacataagccaaagcatcacctttattgaccaaagcaccttgcttggcacatacctcaatgatgcgtccactaaaattagccaatactctatcataagtgttccatggagtggcaatataacaaaatacatcatccggttcatatttatgccctacttccggaggcatggagggcgattcaacatctatttcccagataatcctacccttttccatcgcagtgattggctctgccttggcacgcttcatccttttcacatcttcttctgagaaaccttgtttggccaatgccgcatccttggcacgttgcaggtcttcttcaaacctcttcttggctactcccgatttataatcacgatactgcctgtcatgcatggccagttcaaacagttcttcatcatcgggtccggactcccaaccattctcctgcatctctttacgatattcatcaagctggtcgggatagttcttctgtggatcttcatctgtaaattcgtaccccttctctttggccaatgctacaatttccggatccaacggaccgggtaaacgaccgcttttacccagaatcatcccccaggtattattgtctatcatgctccagcgttcctcaccttttacacgtgccattacattcattaatgctacatttttcacatactggctgaatggagttaccagtggaggataacctaacttaggccatacatattccacttcatcgaacaacatcacaagcagatcgtcaatgctgagttcaggctgattattactctttaatatcatattaataccggcatgcacacctttcaaatcggccatcatagaccccatcattcctccgggcaagccacatttcagcaataaagaagacatatgtttgttggtcgggtccataaagtaaccaaggaaatcatcgatgaactcctgtgtcatggcacgcgccttcatataggctttcatattaatatcaggtacacgaaaaccggcatctttcaacatggcctgtacagaaatcacgtccggatgaacttttccccaggacataggttccatggctacatcaataatatcagcaccattctcacaaacttcaagaatggaagccattgacaatccgggcccgctatggccatgatattgaatcaacacttcgggatgacgttccttaatggcttttgtcaattgtcctaacatggcaggacgtccgacacctgccatatccttcagacaaatctcgggagcaccggcctcaatcagcttatcagcaatagccgtataatattctactgtatgtaccggtgaaaaggtgatgcacaaagttgcctgcggaatcattcctccttcaagtgcatagtgtatggaaggaataatattccttacttcattcagcccacaaaagatacgggtgatatctactccctgggcatgcttgactttgtacatcaaccgacggacatcggcaggaacgggatacatccgtaaaccattcagtccccggtcaagcatgtgggtttgtattccggcatcattgaaaggtttggtaaaagcccgcactgctttattggggttttcaccatacaataaattgacttgctcgaacgctccgccattggtctccacacgggcaaagcatcccatttcaataatcaaaggggcaattcgcactaactggtcgacacggggttgatacttaccggacgactgccacatatcccgatatacgagactgaatttaatttcctttttcattgccgtaagttataagtgatttcacattcataggttaacttgctatattacaaatatagtgagatatttgacataaagacaaatcagaccatcaaaaagttcccataaaagatatgttatatatcatattgtcacaaaagtaaaggagcaaggagggggtccctcacttactccttcttttgcacaactaaaaaattacactaaatcactacctaaaatcaatctttttattaatgaaaaatacctaatcaaacaaagtccttcagttcctgttgcaatctctgacgggtaaaaaagatacggctcttgacagtgccgagtggcaattctaatttttcggctatttcacggtatttaaatccggaaacatgcattgaaaatggaactttatattctttgggcaacgcatttactacacggtgcatttctttcaggtcataggctccttcggtactttcaaaaccggagtcctgcggaagattcagatggaaaagattatcggtttggtctacataagtttgatcacgcacaattttacggtaattattaataaagatgttgcgcatgatagtatacatccagcccttaaaattagtgtctggcataaatttatcttcattatctaatgcttttaatgaggtctcttgtaacaggtcatttgcttcttcgcgattagcagtcaatttataagcgaagcggagcaactcttcttgcactcctattaaatcttttctaaaacttaaacttttcatacgttgcggtttttaagcggttaatatttcgtttctttctcgatattgcaagtttaaggcttattttagatttcagtagggtaattttcaccaatctttggggtaaaaactatcaaatgatagtttttgggtgctatttgatagtttttgggtgttatttcttaaagagttagacagcttttgataggtttgtttgataattaatgttttttattatgtgctttttgtaaatagagactgaatcacatacctttggatcaagtttaataacgttaagaatcaaaagaattatgaacttacttatcatcctggggattataatcatcctcgtcattatcattgcttccatgtataactcattggtaaaattgagaaataatcgcgaaaacgcatttgccgacattgatgtacaactgaagcagcgtcacgaccttattccacaattggtagatacagtaaaaggatatgcagctcacgaaaaagaaacacttgagcgcgtcatccaagcccgcaacggagctgtcagtgcccggacaatcgatgaaaaaattacagctgaaaatcaacttagttccgccctcgcaggattgaagattacattggaagcttatccggacctgaaggccaaccaaaacttccttcagctacaggaagagatttcggacgtagaaaataagctggctgccgtacgccgctactttaattcggccacaaaggaactgaacaatgctgtacagacattcccttctaacctgattgccaacatgtttggctttcataaagaaatgatgttcgacttgggcacagaacaacgtgccaatttagaagaggctccgaaaataaaattttaatcctcaggaaagtaaagacacatgcaatacgtcggaatacagacacaacagagccggaacaatctccgttccggtatcttactcattctctttccatgcctggtggcggtattgacttacctgttctgctatctgcttatcacttttaccgtggaagacgattatgggcagtacaatacactggcaatgaccaatcaaatgtttatcaacctgattccttatattataggaggtgttctggtttggtttatcatagcttactttaccaattccagtattatcaaagctgccacaggcgcgcgtccgcttgaacgtaaagagaataaacgtatctacaatttggtagagaatctctgtatgtcgcaaggtatgaaaatgcccaaaatcaacattatcgatgatgattcactaaacgcatacgccagtggaatcaatgaacagacctatacagttaccctatccaaaggtatcattgaaaagcttaacgatgaagaactcgaaggagtcatcgcacatgaactgacacatatccgcaatcatgatgtccggttattgattatctcgattgtatttgtcggtatcttctctatgctggcacaaatagcattgcgttccgtctattactcttcgtggacacgcagtagaaatgataagaataatggagccatacttattctggttttggcaatgattgtagctgccatcggttatttcttcgccactttgatgcgtttcgccatctcacgaaaacgtgaatatatggctgatgcaggtgcagcagaaatgacaaagaacccgttggcgctggccagtgctctaagaaaaatatccgcagatcccgatatagaagctgtagaacgcgaggatgtggcacagttattcattcagcatccgggcaaacaagccaaaagtgccctgagcggattaagcggattattcgccacccatcctcctatcgaaaagcgaatagctatcctggaacaattctaatagtgcatggcctttgctgtacaagaaagaacaccaaaggcctgtcaccgcaaaatacacagggctacactgcatcaaaagtaaacaaccgactatctataaaaatgagttgtataaatctgtgcaatctatagtaaaaaagagttttgaaactctctcttttattctttgtgaaatctgctccgacaaacacgaaataatattaaatcatttgtacgctttgtacattttatctcttccgatcgttatctttatgtaaatattctcctaaataatcattgatatgaaaacaaatagacgtatcatgcttctgatattgttcattgcaggaacaggtatcttcacacttcaggctcaaaaccgggaagaaaggaaagagctgaaggaacagactgtaaaagagaagattgaatcggaaaactatcggatcgacataaatacggcatacccgcgtaggggacgtatgattccattgacatcaatctattccgtaacaattcggaatgattctgtcttttcacaactaccttacttcggacgcgcttactctatcccttacggaggaggacagggattgatgttcaatgccccaatcgatcaatacaccatggccatgggaaaacgcggagctgcaaaaatcaactttaccgccaaaagtcccgaagatcagttcagattcaggataacaatctattccaacggttcatccagcatagatgtcgatatgcaaaaccgtgaatcgatcagtttttcaggtgacttgatattgccggaataaagtcgtaccgactttattcccccttcaagataggcaggcaaatttggtattttacagccaaagcgcgtactacaaaaatgcagcagccactaatgacctgcgtcaaggcggcatctacccccaaacgatcgagcccccaataaatgactccaccgataacacatgccatggcataaatctccttacgaaagatcaacggaatctcgttgataaatacatcacggataactccaccggccgcaccggtcatggttcccataataatggctacccaaaaggcatatcccaaatcgatcgtcttgctgataccaactactgtaaacaacgcaagaccaatgctatcgaaaataaaaaacgtattgtgcatgtggatcaaatgcttccgaaaaaagataacccacagcaaggccagcgccgagcaaattaaataaataggattcgtcatccagaatggagtgacatccaataaaacatcacgtatggtaccaccgccaatggctacagccacaccggctacataagcgccaaaccaatcgaattgtttggcagatgcaagacgaataccactaatggcaaaagcgaatgttccgataaactccagaatctggataaaagtcggaatctgaaagatagttggcatatattaagttttttgtgtgcaaagaaacaaataattccgcaagaaagtgtaaatttgttccttgaaaattgtaagaatacaaagatgaagataacgattgttgccggggctcgccctaattttatgaaaatcgcccctatcacccgggctatcgatgccgcaaaggcacagggtaaacgtatttcttatcgcctggtatacacgggagtagagaatgataacagtttggacgcctccttatttgcagatctgcacatgaaagctcccgatgcctatttgggagtaaacggcaataacccgacagaactgactgcgggaatcatgatcgctttcgaacgtgaattgacagaaaaccctacgcatgtagtcctggtggtcgatgacctcacagcaaccatgagttgtgccatcgtagccaagaaacaaaacataaaagtagcacatctcgtagccggtacccgttcattcgacatgtctatgcccaaagagatcaaccgtatgattacagatggcttgtccgactacctcttcacagccggcatggtagccaaccgtaacctaaaccagacaggtacggaaaacgaaacagtctattatgtagggaatatcctgatcgatacgatacgttataatcgcaatcgactgataaaaccggtatggttctctgtgctggggctgaaagaacatgaatacattctgctgaccctcaatcgtcacgtactgttaaacaataaggagaacttacaggaattgatggaaacattgcttaaaaaagcaaatggcatgcccattgtcgcaccgctgcatacttatgtacgcgacgcaatcaaagcattggggatcaccgctcccaacctgcacatcatgcctacacagagttatctctctttcggttatctgatgaatcaggcaaaagccatcgtgactgactcgggcaatgtagccgaagaagccactttcctgggaattccctgcatcacgctcaatacgtttgccgaacatccggagacctggcgaacaggcactaatgaactggtcggtgaagacccggccgcattgggagcctgtatggacaaactgatgaacggagagtggaaacaaggaactttacccgaacgttgggacggacgaaccgcagagcgaattgtacaaatattattgggggaataataccatattccccctccttacaggagtcaaaagatacacaaaaaaggttatatagtcctttcaatcaaaaggaatttattacctttgcagtctcacgatgagatgaagtgtgtatgaaacaacaatattctaaactattattagtaatcttccttctactctctgcgccacaggctttcgcacagttaaagggagtaatcaccgattctatttcacatgaaccattaatgtacatttccgttttctatgaagggaaaggagtaggtggcatatccaacgctaacggagaatacaaggtggaaacccgcaaaggctggaatgagctgactttttctgcggtgggatatatcaccaagaaagtgaagattccggcgggtgccaaagaactcaatgtagtactctcaccggatgatgtaatgctggaagaagtggttgtaaaacctaaaaaggagaaatattcccgaaaaaacaatccggcagtagagtttatgcggaaggtaatcgaccataaaaaagctcagaagctggaaaccaatgactattaccaatacagcaaatatcagaaaatgaagatgtcactcaatgacgtgacacccgaaagtcttgagaaagggatctataaaaagttttctttcctaaaagaccaggtcgaggtttcgcccgagactaacaaactgattttgcccatctccgtacaggaaacatcttcaaaaaccatctacagaaaagatccggaaagtaaaaagaccatcatcgaaggtatgaactcaaatggcgtagaggaattcttctctaccggtgatatgttgggtactatccttaacgatgtatttgccgatatcaatatctacgatgatgatatccgtctgttgcaacgccgttttgtaagtcccatcggaagcggggccatctctttctataagttctacctgatggataccgtgatggtagacaaaaacaaatgtgtacacctcacgtttgttccacagaaccctcaggacttcggattcaccggacacctgtatgtgctggatgattcaacctacgctgtaaaaaagtgcaccatgaatttgcctaaaaaaacaggggtaaactttgtggagaatctggatgtcgtgcagcagtacgaacaactccccaatggcaactgggtactgactgatgatgatatgaccgtagatcttttagtaatgaaagctatccaggggattcaggtaaagcggactacgaaatatagcaactatgtcttcgaacccatcgagccacgactcttccgactaaaaggcaatgttatcaaagaagcggacatgctcaccaaaagtgacgaatactgggccggagtgcgccaagtaccgttaacaaaaaccgagagtagcatggatcttttcatgaaccggctggagcaaattcccggattcaaatatgtcatattcggcgcaaaagcattgatagaaaattatgtggaaaccggaaccaaaaaacatccgagcaaattcgatttcggtccgatcaataccatgatatcgagtaactatgtggacggcacccgattccgcctcagtggtatgactacagccaaactgaatcctcattggttctttaatggatatggagcctacggacttaaagacaaaaaatggaaatatgagggcaatgtaacctactctttccgtaaatgtgaattcttcccctgggagttcccgaaacactatatctccgcttcttaccgttatgatgtcatgtcaccgatggataaatttctcgacacggataaggataacgtattcgtggcctggaaaaccactactgtcgaccagatgtcgtacgtacgggatgctacattgagatatgaaatggaaactctttcaggcttctcggtcgcagctatggcacgacaccggaaagacactccggccggtaaacttcaatacatccgtaacgatgctgccaaaacaattgttccggacattaccaccgccgaattgggattgaccttgcgttatgctccgggtgagacttttgtaaacacgaaacagcgtcggcgtccggtgtcgctggatgctcccatcttcaccctttctcacaccactggattcaaaggtgtattgggaggagagtataatttcaatttgacggaagcaagtatctggaaacgcttctggctttcgtcttggggcaaagtagacgtcaccctgaaaggtggggcgcaatggaataccgttccattcccgttactcattctgccggctgccaacctttcatatattacccaaaaagaaactttcaacctgatcaacaatatggagttcctcaacgaccgctatgcatcgttggcactgacatatgacatgaatggcaaacttttcaatcgtattccactaatcaaaaaattgaagtggagagaagtgttccgtttccgtgctctgtatggtaacctgaccgaaaagaataacccgtttaagagcaataatccggaactgttcgattttccgcaacgggacggtagttacaccagttatgtaatggacccgaaagtaccctatctggaagccagtgtaggtatctacaacatctttaagttgttacatattgaatacgtacgccgtctgacctatctgaatcaccccggaatcaacaagcaaggtatccggtttatgattcaagtggtattttgatctgatatcatttacacaaataaaagctaaatacgatgaatttcactttacataccctcaatggcataaagctgtggttggtacttcttttacttagtggcgcaatcaatgtttgccgggcagattctccacgacaaaccatcaactttaaccggggatggaaatattgtcagggggatttcgatcatgctgcccgaccggggttcgacgattcagaatgggagaaaataggacttccccactctttcagtactccatatttcatgtcgaaggacttttatgtaggctacggatggtaccgtaaagcttttccggtaaaaaaagagattcttggcaagaaaagttttcttgaattcgatggcgtatttcaagaagcagagattttcgtcaacggacacttggcaggcactcacaaaggaggatataccggattttccatcgacatatcagcttacctgaaagaagggaaaaacctggtagccgtccgagtaaacaactgttggcgccctgaccttgccccgcgtgcaggcgaacatgtatttagcggaggtatctaccggaacgtacgtctggtaataaagccccccacttacatcgattggtatggcacctgggtcacaactccgaacctggcagagaacaaaggtaaatcgggaagcgtccacatacggacagacgtatgtaatgcttcaggaaaaacagacacttaccgactcctgaccaccgtcgtcgatgcacaaggcaaagaagtgtcttcggtttccacatcccaagtactgccggacaatgcaacttacacatttgaacaacaaaccaaagaaattcaggcacctcaactgtggcatcccaatcatccggcactatataaagtgataagctcactctatcacggacaagaattgatagaccgttacgaaacagcattcggatttcgctggttcgaatggactgcagaccggggatttttcctgaatggggagcacctttattttaaaggagccaatgttcaccaggatcatgccggatggggagacgctgtaaccgagaccggaatgcgaagagatatccggttagtgaaagaagccggcttcgatttaataagaggctcgcactacccccattcaccggctttttcacaagcatgcgatgaaataggaatgttattctgggcagaaaacgcattttggggaatcggaggacacaaaggagacggttattggaatgccagtgcataccctgtaaacgaatccgacagggcagaattcgaaaacagcgtaaaagcccaactgaaagagctgattcgcatccaccgcaaccatccttccatcatcgtatggagcatgagtaacgagccttttttcacagcacccgagacaatcgatccgatgcgtaaactactggaagaaaccgtcaaactttccaaacaacttgatcctacccgcccggcagctgtcggtggtgcgcagcgtccgctgggagagaaacgaatcgataagttaggcgacatagccggatataacggtgacggcagctacattccggagtttcagcaaccgggcatgccaacagtagtttcggaatatggcagtactacagccgatcgtccgggagaatatgatccgggatggggagacctggctaagaataatgcacagaacggttttccatggcgtagcggacaagccatctggtgcgcattcgaccacggaagcattgccggcagtgcccttggcaaaatgggcatcatcgattacttccggattcccaagcgtgcctggtactggtaccggaatgcctacaaagggattacccctccggaatggccgcaagaaggaacacctgcccgcatcagcctggttgccgaccggactgataacataaaagcggacggaacggacgatgttatgttatcaataaccatcctggatgcaagcggaaagccggtcagcaattctccggcagttaagctcgacattctatccggcccgggagagtttcccaccggaacctcaatcctgtttgaaaaagagagtgatatccgtatactcgacggaaaagcggctattgaattccggtcatattatgccggagaaactgttatccgtgctacttcaccgggactggaaccggccgaagtaaaaatccgattcaccggaagcactccctatacagaggccttcaaagtaaaagaacgtccctatacacgcttcgaaactccgacaaaaacggataatctgcaaaccttcggacctaacaacccgactttctgcagttcgtctgtcaacggacattcatccgcttttgcagccgacggagacgaatctacatactggcaagcttcagagaacgacccggaacgttcctggacactggataccgaaaaaggattgtcaatacgtcacatccgaatcgcatttccggatttaaccccttatcaatacaaagtagaggtatccatggacagagaacactggtcgctcataccggatcaaaccaataataagcagaacgagaacattcggatgattcaggttgttcccggtatacaaggacgtttcgtacgtatcagtttcacaggagagaaagctgctattacagacgtacaggtcatcggaacggtaattgactaaaataacagatttattacaaatatatgcaaccattagcggaaagacttcgcccaaagacattagatgattatatcggtcagaaacaccttgtgggaccgggtgctatcctgcgcaaaatgattgacgcagggcgtatctcttcatttattctttggggacctccgggagtgggtaagaccacactggcccagatcattgccaataagctggaaactcccttctacaccttgagtgctgtcacctccggggtgaaagatgtgcgcgaagtgatagatcgcgccaagagcaataagtttttcactcaatccagccctatcctgtttatcgatgaaatacacaggttcagcaaatcccaacaagattcgttactgggagccgtcgaacatggcacagtcacgctgataggtgccaccaccgaaaatccgtctttcgaagttatccgtccgctcctttcccgctgtcagctctacacactgaaatctctggaaaaagaagatttactggaattgctgcaacgtgccattactaccgacgtagtgctgaaagaacggaaaatcgaattgaaagagaccggtgccatgcttcgcttttcgggaggcgatgcccgcaaattactgaacatactggaactcgtggtagaatcggaaacagaagaaaccgtaatcatcactgatgacctggtaacagaacgcttgcagcaaaacccgctcgcatacgataaagacggtgaaatgcattatgacattatttcggcgtttatcaaatcgatacggggaagtgaccctgatggcgccatctattggctggcccgtatggtagaagggggcgaagatccggcattcatcgccaggcgcttggtcatctctgccgcagaagatatcggcctggccaatccgaacgcattgttattggctaatgcctgttttgacacattgatgaaaatcggctggccggaaggaagaattccactggcagaaacaacgatttatctggcaacaagccctaaaagcaattcggcctacaatgccatcaacgatgcactggcactggtacgcgaaaccggtaatctgcctgttcccctacacttgcgcaacgctcccaccaagctgatgaagcagttgggatatggccaggagtacaaatatgcacataattacgaaggcaattttgtaaaacaacagttcttaccggatgaaatcaaggccaaacaactatggcaaccccaacacaatccggcagaacaaaaacatgccgagcgaatgaagcaactatggggaaatgaaaagaactattaaccatctgcaattgttttatcagataaaaagttattcattcagtattcaagtatctaaactgaatacttaacacctaataatttatgaagatagtagttttagacggttatgccgccaaccccggagatctgaactgggacgaattgagaactttgggtgagtgtgaaatctatgaccgcacggctcccgacgaggtacttgaacgctcgaaggatgcagaagcgattcttaccaacaaggtgatgatcacggcagaacacatggcatccttgcccaacctgaagtatattggcgtaatagccaccggatataacatcatcgatgttgccgcagccaaagagcgtggcattaccgtaaccaatatccccgcctacagcactccctccgtcggacaaatggtttttgcccatatcctgaacatcactcagcgagtacagcattatgccgacgaggttcgtcaaggacgctggactcagagtcaggatttttgttactgggatactccgcttatcgagctgttgggaaagaagataggtcttatcggcctgggacaaaccggatacaacacagcccgtatcgctatcggatttggtatgaaagtgtgggcttatacatctaaatcacgcctccaactgcctcctgaaatccgaaaagcagaactcgaccagattttccgcgaatgtgatattgtcagcctgcattgcccgctgacggaatcaacacgtgacctggttaacacccgtcgcctggaactgatgaagcccaatgccattttaatcaataccagccgtggtccgctggtcaacgagcatgacctggcagaagctctgaataattacaaaatctatgccgccggactggatgtgctctccaccgagccaccccgtgccgacaatcctttgctgactgccagaaactgcttcatcaccccacatatagcctgggctacttcggctgcccgcgagcgcctgatggctatcctggtcgacaacctgaaagcctatatcggcggcaagcctgtgaacaacgtggccaaataaagtcagatatcaaaaaatacaggaatactatcggggttcagaacatatcccgatagtttcctcaacttttcttccgcatccatcacggcacaagaatagccggctacggacatcatcggccaatcatgcatcgtattgcctactaccaaaacctccctaagagaaatccccaatcgagcacacagagtaatcagaccgttcttcttaccggctttactgtctaccaccgtcagcaatcgtccctcctgatacaattgatacgcctcttcatccaattcggtcagccaccggacagcttcccgggtattcggtgcaagcacagcatatttaaagactttcccctcccgggtataacgggtcaccctgcaacccggaaaaccggcagtcacaggatttgcaatcggaacacattcgatagtttccccgtagcataacagacctccgtccgcaaaaactccgcccgagaacaggccgaacacattgccaagccgttttttagcatgcgacaccggtaaagcagtactcagatataaaggcaaacgcttagccatatactccaataccgaaaccgtacggtccggaatccgtccctgagcatccgtcagcgtaccatccacatcaaagaagacagcttccaccttcttcctttccggtatgcgccacaaagccccatcccccatcattctcctcaagggcgtatcgcacaaattactgaaagcaatgtaacaatcacaaactttacgaaggcagaagggctcaaaatccgaagtggggtcatcgtaaaagtttcccatccgtatcccacttctcgggcaagcatacatatcccctttccggtcgataaaaagtgtttccctacctcccacacagccgtccaagcacgcctttgcatttctccggtcataatcgaacagattgtctatttcaccaaagaaacggatatcctcttccgacagcggcttccgcaatccctgcatggcattcacaaacaggtaaaccgacggatccaacagctgtctcagtttccggatttgttcctttgccgaaggatcaccgactgcccctgcacataccccgatgcctgccgcacgaagcatctctactttggatgcaaactcccctaccccaaccatctccgggtgatagctcgcccaaaacctgaacttagacacatctgcctgctccgcctcagcctcatctaaaaaacgggataccgaaaaggacaaattggtctggcaagagactccaatcacatggggcatagcgaccaggcgcatgatgccctctctatagtagcgatgtatcatcgcttccccgtaaggaataatcaggatgcgtaatgaaccgtatttccacccgccgatacgggaaataaagcgatccaatgcttcctgatcttctctcgtatcggcagacacagactttctgccgaacggacaatacgaacacgtataattgcaatgctccagactacctctataatagatactccggacagtactcaaagaggacatcattctattcggatcagggatatacatattcggacatcagtttcctcacggcaggtgaaataaatgcctgtccgatgtaatcggaataagccattccttcctccgtgagacgcactatccggccagtctcttcaatccatccacgatctgtgaactcccggaaaagattccggtccggcttctcaccaaaacgtttttcatactccgccaagtccactccccggtgatacatcaggttctttataatgaatctgatttgcatctcttctgtggaaagcaagaaaccattagcggcagtcataaaatcggtagtccggatataatggtctatttcatcggctattgcctgctgacgtacagcatagggagtggcatagtgtaagtttcccaaataactccggcctcccgccccgcaggaaagcatcacttcgtcaccacacgaaaattccgtttccgttgtttcgcgcctgacaaaacggcgcatggacgtttgtacaaatccttgccctaccagtaactcacgggcagatttgtagatagcgtaacctatgtcatccgtcgaacgtacattgatgcgtgtacctggccggacataaagaggataaataaacagctcattgggccgataagtaagtgcagtgttcagagagcgcataaagctctctaccgtctgtccctcgataccataaatcaggtcgaggttaaactgcggaaaacctgcctccacaatattttcgagtgcaccgactactgtaccgagtccgggtcttcttttcagtttcttcaactccgtctcattgaaactctgcacccccatgctcaaccgctccactcccctcgcccgcaactgcctcaaaacactcttttgcgtatattccggtgaagtctcgacagaagtaaacacccgggaaggatgcacaccgaacagttcggccaggcagaacaactcttccaactgtccttcatccagaataagcggagtaccccctccgacggcaaacgaagtaaacttcaggccttgtgccgccacagacagctgttcggcctggcggcgcatcgtgtggagatacaatgaaatgcgctccgcatcgcaacactgctgtgaaaaaagattgcaatagccacacttatgggcacagaaaggtatgtggaaatataaactagcctcccttccttccagccgttcaagataaggagaaagagagaccggaggagtcaacgtacggtaagccgtcttatgcggataactgtacatatagctgacatatcgtgaaatctgctgttgttcgttcattttctgagaataaagtgtttataaggcaccgtatatactttttcgtgagagatgcaatgatactcgtaaccatcttcaccgtaacaggtcccgtgatcggacagggcaatgaccaacgtgtccgagcgcctcctgaaagcctcgaacaggcggggcagctgactgtcgacataccgcagggctgccgcatgcgactctttatcatctttctttttcccctccacgtagtggcagttcggataatgaatcgccgaaaaattgatatacataaatactttccggtccgccggatacttttccagtttgtcgacggcaaggtccacctgattggcagcactgttcttatccgtgcaaccgaaagtcggcagccaataactcttattgaaatagccgggaaatacccttcctatatcattccgcttactgaaaaagttgactcctccgatgcagattgtttcataacctacctgagccagactctgtacgaacgtagcctctttgaaagcatagctgccttcgggaggtatacgtcccgtaccggcctgaaagggaaaaaagagccaccttcggttacgcaacatatgcggctcggcgggtgacggcaagaatcctgcgaaaatagcgaagtgagacggataagtgaaattaccgggagcatgccgtttctcccaaccgttgccacagctattcagtacaggagtccccccggaggcttcttcggccacgctgacgtcataacgcaaagtatcgaaacagagcatcagtatatcatgcgtacctacaatttcattcatatctatgtccggcttctgatcctgcgtgccggagggtaattcatctatttccattgaaaagtgattctatcgtttttatctgattggcatatatcttattttccgtatacatatcctgatagatatggtctccctgcccattgacctctataatataaggtgtgtccgtattccgggctatcagcacgtctatgcccgcatatcgcagccccaaggccttcatggcagtgatgctccggcagaaaagctcttcacgaacggaaggagccaacgaaagttcttcgaacagcctcgctttattgttcaggtgaagattagttatggcaccgtcactgcaacgcaccactacataatcgacttcatcccccctgcagacaacacgcaagtcataattctcaccttccagcttttcctttgccatccattcttcaaggacagccccacaccgtatgacctcttccgccaatgtggcaatctctttccggttcgtcagcctgcagatacgtttcgcattacaaacgcgccctccttcccaggacatcgtcgtataagccacccattcatcccggcgatgattatacctgacagccataatcccaccggccccggaaccataacggggtttcagaaatcctcccctcttctgccggcaaagtatggcggccaaatcatcaaatgtgctaagcgcatccgaaagcaacggagttgttttcaggccggccccggtcagtttccgctgagtatacactttatcgagtgcacaaagaattgcagccggttcattcagaaagtgtacactttccgacttatccatatcggccagtcgggacaacagacttctatactcctcgcagagcaaattgtatttccgaaagtccgcctcccgaaacaccggaggctccagctttacaaccgtatcgcgacaatcgggaagaacggccgacaactcgtcataagtgacaaagcaggtgtccgccccgaggcttctacccgctttgataaaatagtccgtacgcttggaagtcgagttactggcaacaagtattctcatccgctcactccgtaatcatcgggtaactgtaatcgtcatcgtattcctgtgagtcggaaacatctatcttcatgggcagcgatttctgcaactctttcttcatctcgtcgctcagataattgtatttcatattgataaacttcagatgcttgattttatccacatgatccagcaatagccgtgccccttcatccgtcaacacaccggcggaaatatccattgtttccagttgcggcaggatatccgattcaagaaacatctctacaaccgcattctgctcttcggcatcgacaatgcccagccatttcaggttagggaaacggtctttagagaacagaggtctgaatacattcatatcgccatcaaacccataatcctccactcctacatagagaaccagcttttcaagattcggcagatcggaacccaggatatcttccaccaccgaatcgggcaggccgccactgataatttcaagtgacttcaagttcggacgcggtttcttaccaatgctcagattattcgttcctttgattttaaggttattcagcagaggcatcgcatccagcaccggactcaaatcgacttgctcaatccaggaaatctcctgttcctcaaaatctatatccccccaaaacagaccttcgaaatgggcgaacttctctttattctccacaatgccatcggcaatgtccgagcagtcttccccttcatatccccagcagcctatcgtgatctgcttgagtgacggcagttttttgtctttcaatatcttgtccatcaagtttacgccctcttccgcttcgtcatagctcaacgcatactttttggcttccactttcatttctttggcaacctcttccaaggtctccacatatccttttttcgttttttccgctatcagcttaccggcagctttttcggcttcccctgccgacgaaaaattcttcacctgtgtttgtccatccgtccccaacttaccgtaattcactattacgtcagtgccccggacatcgatgctccaaaatttctgggacttaaagtcctgaaatacaaatactcgtttcatagtatgtctgtttaattactgatataaaaaatgcttatctgcctttgtttctccaaaaacagataagcattactgcaaaaataataaaattctgataccttatacctttatccgacaagaatctcaataagcatgtccgccttcgtccatttccttggcatcgatcttccggttgtcgatgctgcgccaagcatagaaaatgtaggcgatgacaaacggaacgaggatagaaacataggccatggtcttgagcgtgaactggctggaacaactattggcaagggtcagcgaactttgtatgtccgtattcgacggataataagccgtattgttatatccggctgtcagcagcagtgccagaacagtcagcaccgtaccgatacccacaaaccagattcctttatcaaacgtttttttcagcagggttttgccaatgccaaacaacaccagcacgactcccacaaggaacacgataagcaccaccggcatttcaataaaattattgaagtatttataaggctccatgtagatctcttttgtttccggattgacggcatatccatcggccagcaaagtgcgaatcacgaatgccaggaagaacaccaggaacaggaccgtattggctatcaacgaacgacgacatttggcgaccaactctttatcagcgatattattgataaagtaaagagctcccaaaacacgcgccaggaagaacacggccaatcccagaatcacattccagatattggtcagcgcatccagtccgtgccaaccgttgccccaatgactgatcacaggcatcacttcgttcaccatattccccttattgatatagaaatccgaaccggtaaagaaagtggccacagcgcctcccaagagcaagggtcccaccacaccgttaatcaccagaaaagtctggtaggtcttctttcccaacaagttgcccgctttgctctgaaattcataactgacagcttgcaacacaaaactgaaaagaataatcatccacagccagtaggcccccccgaaactggtactataaaacagaggaaacgaagcaaagaaagcgccaccgaaagtgaccagcgtagtaaatgtaaattcccatttgcgtccggtagagtttaccatcatcttacgatgctcttcggttttgcccaaacaaaacagcagagagttgccaccctgcacaaacagtaaaaatacgagtatggccccgagtagtgagactaccagccaccaatattgttgtagaaaaatgtatgtacccatagtttaaataattattggttcgtgactaatgattaaccgtcggtcctttcttgatctcacggaccataatgccaatttcagcaatcaacatcacggtaaacaaaacgaggaaaataaagaaagtggtctgcacagagcccacatcgagcttagagatagacacagacgtaggaagcatatcccgtatcgcccacggctgacgaccacattcggccaccacccaaccggcttgtccggcaatataagccaacggaatggtccacagagcaacgtactgcatccatcttatcttcgacaaatctttcttataggcaaagaaaagcaccaggatgaaaaacagaatgaaatatccgcccaggatcaccatcacgcgaaaagcataaaagttaagcggaacattaggtaccaactgatttacatctttaatatagccataaccaaaataaggcacattttcctgcaaagtggtataagcctccttggcggcagcttcatcaccttcttttttagccgtacgataagtggccagggcagcaatcgctttcttgcctttttctatcttctcggcagccgaaagagcttttgtaccgtctttcagttcatatcctccctcaataatattttttatacccggcacaaaggcatccaccttacgttcggccagcagcgaaagcattttcggaatctcgatacggaagaggaacgggtcctgaccgtcatcataggttttcttctccgggttcaaaagtccgacagccaccagtccggcaccattttgtccttcgtaatagccctccacagcagccagtttcatcggctgtgtctgtgcgatggcataaccggaaccatcaccggtccacaccgtcagcaaagaagccaccagcccgaagactgcacctatcttgatgctcgccaccgcaaattccttatcacgcttcttcagcaggaaccagcaactgatgccaatcacaaaaacagctccgagcacccaacttgaaagtaccgtatgaaagaacttattaacagccaccggcgaaaacgcaacagccataaagtcgaccatctcgttgcgtacggtgtcaggattgaactgcatgcctaccggatgctgcatccacgcattggcaaccagaatccaccaggcagaaatcgtagctcccaagcccgtgagccaggttgaaatgaggtggaatctcttgctcaccttgtcccatccaaagaacatgacagcaataaacgtggcctccataaagaaagccaaaataccttcaattgcaagaggtgcaccgaaaatatcgcctacaaaccaggaatagttactccaattggttccgaactcaaactccaggatcagcccggtggccactcccacggcaaaattgataccgaaaagtttcatccagaatttagccgttcgtttccagaattcattgcctgttttataataaagggtctccataatggccataacaaccgccaaaccaagcgtgagaggcacgaagatccagtgatacatggctgtcagagcaaattgggctctcgaccagtcaatcagtgaagtgtcaatactttcaatcatatcattagtagttagagttaaacgtcagtcgtctattgcccgcgttctataagttcgcccgcaacgtattctcccttgtccttatcggtgggctggctgctcagaaagttggggaagaaaaacaggcggagaatgaagaacatgataaagagtttcacaagtataatgagccacagggtacgtcccagggtcatgcttcgaaagccttctacatagaaattccagatgtggagcagtgtattcttcataatacagggtttataacatctcaaaattagcgtttatgtaataaataacaaagatagtcttaaaaatgttgatgaaacgaataaaataaactattcttatgcccccgaagcttgcttacaccctttataccttatatatataaattaaaatatgaaactgccataatacactctttgcataggtatatccaccaatcggattttaagtatgggaaggtgtagccacggagaccttagggtgtagccttaaggagcaaagggcgtagccatccggccgggatagctacaccctattttcgtccgatcgttcagttcataggcaatatcggcaactccacttatcgacataaaacctgcctttagcgacaaaacctcccctcccgtctatcgcttttgcacatctttctattgcagcgtacttttgtttctataaaataaaaagaagcaagagtatgacgaacgtaaaaagaatcaccctaataacagtctgcctggcagctatcttgcccggcaacggattgtgggcacaacagacggaagctaccggaacaacgcaaaccgccgactcggtatccatgcccgcgcaatgggatctgcagagctgcatcgactatgccttgcagcaaaacatcagcatccgtcgtaaccggatcaatgcgcagagcacacaggtggacgtaaagacagccaaagcggccctcttccccagcctctcgttctccagcagccaaaatctggtgaaccgtccctaccaagagtccagcagcattatcagtggctcggaagtactgaagagcagcaacaagaccacctacaacggaaactacggactgaacgcgcaatggaccgtatataacggcagtaaacgcctgaaaacaatcgaacaggagaagctgaacaaccgtgtggcagacctcgatgtagccacttcggaaaatgatatcgagcaatcgatcgcccaggtatatattcagattctctatgccgccgaatcagtcaaggtgaacgaaaacaccctgcaagtatccgaagcccaacgggaccgtggcaaacaactgctggatgcgggaagcattgcccggagcgactatgcccagttggaagcccaagtcagcaccgaccgttatcaactggtgaccgcacaggccacacttcaggactataagttgcaactgaagcaactcctcgaactggacggcgaacaggaaatgcaggtctatctgcctgcattgggtgacgaaaatgtactgtcgcccctccccaccaaaacggatgtctttcgttccgctgtagccctccgcccggaaatagaggcaagcaagctcagtgtagaggcatcggaactggggatcggaatcgccaaatcgggatatctgcccagcgtcagcctgacagccggtatcggtaccaaccataccagcggaagcgacttcaccttcggcgagcaagtgaaaaacggatggaacaactccatcggactcagcatcagtgtcccaatctttaacaaccgacagaccaaaagtgccgtagaaaaagccaaacttcagtatcagaccagtcaactgactctgctcgacgaacagaaaacattgtataaaaccatcgaaggactatggctcgacgccaacagcgcccagcagcgatatgcggcagccatagagaaattgcacagcacacagaccagctatgaactggtcagcgagcaatttaatgccggaatgaaaaataccgtggagcttctgaccgaaaaaaacaatctgctacaggcacagcaagagctgttacagtctaagtacatggctattctgaatacacaattgctgaagttctaccagggagataagataacactgtagacaataaaggaataaaacatttaacgttataacgatatgaagaagaaaaagatcattcttattgccgtaagcctcgccatactggcaggcggaggggtttggctctttggcggttctacggccaagcacaaagtgacctatgccacggcaaccgtaagcaaaggcgagatatcggagtcggtaaccgccacaggaactatcgaaccggtaacagaagtagaagtcggtacacaggtatccggaattatcgacaaaatttatgtggactataacgcagcagtgaccaagggacaacttatcgctgagatggaccgtgtgacactgcaaagtgaactcgcctctcaacgtgccacctacagtggtgcaaaggcggaatacgaataccaaaagaagaactatgagcgcaacaaagggttgcacgaaaaggggctgatcagcgataccgattacgagcaatcgctctacaactacgagaaggccaaaagctcgttcgaaagcagccaggcctcactggccaaggcagaacgcaacctgtcctatgccaccattacttctccgatcgatggcgttgtcatcagccgggatgtggaagaaggacaaacggtggcttccggattcgagacaccgactttgttcaccatcgcagccgacctgacccagatgcaggtagtggccgacgtagatgaagccgatataggcggcgtggaagaaggacaacgggccacatttaccgtagatgcctatccgaacgatgttttcgaaggaatagtgacccaaatccgcctgggagacgcaagcagtaccagcaccagcagctcgtctactaccgtagtcacatacgaagtagtgatctccgcccataacccggacctgaaactgaaaccccgcctgacggctaatgtcacgatctacacactggacagaaaggacgtgctctctgtaccggcacgtgcactccgcttcacaccggaaaaacccctgatcggcgataatgacatagtgaaggactgtgagggcgaacataaaatatggacacgtgaaggaaatactttcacggcacaccccgtgcagatagggatcactaacggcatcaatacggaaatcacccaaggtgcttccgaaggcatggtagttgtcaccgaagccaccattggaaatatgccgggcggcaatgtatcgcctgaaggcggacaggaaggcggaggagaacaaagtccgtttatgcctagccatccgggcagcaagaagaaaggaaaataagtatgaacaaaacagtcatcgaacttcagaatatcaaacgtaacttccaggtgggagacgaaaccgttcacgcattgcgcggggtttcgttcaccatcaccgaaggagagtttgtcaccattatgggtacgtccggttcgggcaaatcaacgctactgaatacgctgggttgcctcgacacacctaccagcggagaatatctgctggatggaatctcggtacgtaccatgagcaaacctcagcgtgccatattgcgcaaccgaaagataggctttgtcttccaaagttacaatctgctgccaaagacgactgctgtggaaaatgtagaactcccgctgatgtataattcgggagtcagcgcttccgaacggcggcggcgcgccattgaggcgctgcaagccgtaggactgggcgaacggttggaacacaaatccaatcagatgtccggcggacagatgcaacgtgtagccatcgcccgtgcgttggtcaataatccggcagtcatccttgcggacgaggcaaccggtaacctggatacacgcacttcgttcgagatcctggtactgtttcagaaactgcatgccgaaggccgtacaatcatatttgtaacgcacaatccggaaatagcccaatacagcagccgtaacatcgtgttgcgcgacggacaagtcaaggaagacagcactaacccggacattctttccgcagccgaagcactggccgctctgccggtacaagaagaataacagacagattattatgaacggaaccaatttatttaaaatagctttgcgcgccttgaataacaacaagttgcgcgcgttccttacgatgctggggatcatcatcggtgtggcatccgtcatcaccatgctcgccatcggccagggatcaaagaaaagtatccaggcacaaatctccgagatgggctccaatatgattatgattcatccgggagcagacatgcgcggaggtgttcgccaggaccccagtgccatgcagacactgaaactgaccgactacgaaacattgcgggatgaaaccagctttctggctgcggtcagtcctaatgtttccagttccgggcagttgattgcaggcaacaacaactatccgtcgtccgtgaatggcgtgggaacggagtatctggaaattcgacagctctcgatagacaatggagagatgttcagcgaagccgatatccagtcgagcgccaaggtatgcgtgataggaaaaaccattgtagacaatcttttccccgatggagaagatcctgtaggacgcattgtccggttcagcaaaataccgttccgtgtagtaggcgtactgaaatccaagggatacaactctatgggtatggaccaggacgacatcgtactggcaccctacaccaccgtgatgaaacgtctgctggcacagacctatctgcaaggtatctacgcttctgccctttcggaagacatgacggacaatgctacggaagagattaccgaacttctccgccgcaatcacaagctgaaagaggcggatgacgatgacttcaccatccggagccagcaggaattgagcaacatgctcaactctaccaccgacctgatgaccacactgctcgcctgcattgccggcatatcgctcgtagtaggcggcatcggcatcatgaatatcatgtacgtcagcgtcacagagcgtacccgtgagatcggtctgcgcatgtcggtcggtgcacgtggcgtcgacatcctgagccaattcctgatagaagccatcctgatcagcatcaccggaggccttatcggagtaatcatcggctgcggtgccagctgggttgtgaaaagtgtcgcccattggcccatcttcatccaaccctggagcgtattcctgtcgtttgcggtttgtaccgtcaccggagtattcttcggatggtatccggccaagaaagccgccgacctcgatccgatcgaggcaatccgatacgaataagccatcatcagtttacttgttcgccacagagagcacagaggcagaaagaattccttgatgtataccggataggatgacagaaactctgtctctgtgcccttgtggtaaactaaaattattatctttgttcccatgaaacaatctctgacatcagcccgccgtcctctggaaatcctgatacacatcatcagttgggggattgtgttcggtttcccgttcttcttcatcgatcgtacaggagacagtatcaattggcatgcctatctgcgtcattctgccgtacccctctcttttgtcaccgtattctatttaaactatttcctcctcgttcctcatctcctcttccgggaacagaagaataaatacatcatctacaacatcttattggtctgcctcatcggactgctgctgcatatctggcaaagcctgaatgccccggctcccactcttaagaagccgcacatgcctcccggatggatttttttcgtaagagacattctaagcctcatcttcaccatcggactgagtgcggccatccgcatgagtgcccgttggggacaagctgaagccgcccgtcgtgaagcggagaaaagtcgcaccgaagcagagttgaagaacttgcgaaaccaacttaacccgcatttcctgctcaacacgctgaataatatttatgcactcatcgcctttgacagcgacaaggcgcagcaggccgtgcaggagctcagcaagttgctacgctatgtgctctatgacaatcagcagaactatgtacccctttgtaaagaggtagacttcattcgcaactacatcgaactgatgcgcatccgtctttcgggaaatgtagaggtaattacacaattcgacatacagccggacagccggacggagattgctccactgatcttcatctcactgatagagaatgcctttaaacacggcatctcccccaccgaactgagtttcatccacatcctcatctctgaaaacaaagaggagatccggtgtgagatacgcaatagttatcatcccaaaaccaacacggataaaagcgggtcgggtatcgggctcgaacaggtaaggaagcgcctcgaactctcttatcccggacgttatcaatgggataaagccatctccccggatggcaaagaatatatatcgaaattattaatatttaatcatccatagccgtgaaattacgttgcgccatagtcgacgacgaacctctggcactcagtctgctggagagttatgtcaacaaaacaccttttctcgaactggcgggaaagtattccagtgccgtacaggccatgaaagaacttcccgggaaccagatcgacctgttgttccttgacattcagatgccggaactcaacggtctggaattctctaaaatggtagcccctcgtacccgtattgtgttcactactgctttcggtcaatatgccatcgacggataccgggtcaacgcactcgactacctactcaaacccatctcgtatgttgacttcctgcaggcagccaacaaggcgttgcaatggttcgaactggtccagaagcccgaagaagtagacagtatttttgtcaaaagtgactataaactggtgcaggtagaactcaaaaagatattatatatagagggtttgaaggattacatcaaaatctacaccgaagatgcccccaaacccattttgtcacttatgagcatgaagtccatggaagagttgcttccccccgcccgctttatgcgtgtacatcgttctttcatcgtccagaaagacaaaatacgcatcatcgaccgcgggcgtatcgtatttgataagacctatatccccgtcagcgatagctacaagcagactttccaaacattcctcgatgagcgaagttgaaaggatttgtagctgatttatcggtaaaatgtgagtatttgtcgattattatttatacataaacaaaaaatatctatctttgtaacaaacagaacggaagttgtgaaacttccaagaatagaatagtttagttaagtctagtttagtttttgtgttgagtcggaagcctgcaagcgagcatgagcttccggctttctttttactgtaattcagcaagttacattcacaatcgaactttttttatatctattagtagcccatattagagaattaaaacaaatcataatgtcacttttgacgctatataatggtcgaaaaatggtcggattatggtcggaaaacatgatacgatcgaaaacagaataaagtatggctacattttcattggtaattgtcccagctaaaaaactatcagacgggacacataaaataagaatcagagtagcacataactctgatacaagattcatcacaacagaaatcgtcgttcgtgaaaacgaatttaagaacggaaagatagtccaacgcccagacaaagatttc

SEQ ID NO: 4983 - DNA, 18318 bp, Unknown
  gut microbiota DNA sequence
ataatcggcatcatcttgaatcgccctaatgctcctatttagcgtttttttccgcaagagtggatacggagcttaaagaatcaaatctgagcagcattaaaatacaaaatgacaaaatgactaattagcctttattacttttcttcacctctgattccccgaaattatctttcctaaaataccgcattcccctttttattccctacatttgtagtacgaataaaaaatcaagatagtaaaatgaaaaaatttatcaaaggagtccggtttactccttccaattatccggatgaaatagaagataaaatacagaaatacagaaaacaaggttacaaacttcctccacgcaaggtattgcgcacaccggaacaaattgaaggtatccgtgaaagtgcaaagatcaacacagctctgctgaaccacattgcagaaaatattcgtgaaggaatgtccaccgaagagatcgatcgtttggtctacgatttcaccacatcccatggggctattccggctcctctaaactatgaaggatttcccaaaagcgtctgcaccagcatcaacgatgtagtgtgccacggaatccccagttcaaccgaaattctaaaaagcggagatattatcaacgtagatgtttctaccatttacaatggttatttctctgacgcatcacgcatgtttatgatcggcgaagtcagccctgaaaaacagagattggtacaggtcactaaagaatgtatggaaatcggcatagctgccgcacagccttgggcccgtttaggtgacgtaggtgcggctattcaggaacatgccgaaaagaacggttatagtgtggtgcgcgacttatgcggacatggagtgggaatcaaattccatgaggaacccgacgtagaacacttcggacgccgcggtaccggtatgttgattcttccgggaatgacttttaccatcgaaccgatgatcaacatgggaacgtatgaggtctttgtcgactctgctgatgactggacagtctgcacagacgacggattgccgtctgcacaatgggaaaatatgattctgattactgaaaccggaaacgaaatattgacttattaaatggaactgactctcctcttgattattgcagccttactggttgccctgcttgtattgacacttacccgcaacaatcgcgcacaaagcgaagagatgcaacgggcattgcgccaacaaatgcaggaaaaccgggaagagttgaatcgcagtattcgcgagttacgcatggaaatgacgcaaaccctgaatcagggtttgcaacagctgcaagatgccatgcataagaacatgatgaccaccggagaactgcaacgccaaaagttcgacgcaatggcacgccagcaggaaacgctgatacagtccaccgagaagcgtctggacgacatgcgcgtgatggttgaagagaaattacaaaagactctcaacgaacgcattggacaatctttcgagatagtccgttcgcaacttgaaaatgtgcaaaagggcctgggcgaaatgaagtcgctcgcacaagacgtaggcggcctcaagaaggttctgagtaacgtgaaaatgcgcggaacgttcggtgaggtccagctaggcgcacttctggaacagatgatgagtccggaacagtatgaagcgaatgtcaagaccaagaaaagcggaaccgaatttgtggagttcgccatcaaacttccgggaaaagatgatgccaacagcactgtttatctgccaatcgacgccaaattccccaaagatgtttacgaacaatactacgatgctttcgaagccggagatgccgcattgatggaatcgtgcggacgccaactggagacaaccatcaaaaaaatggcgaaggatatccacgacaagtatgtcgatcctccgtttacaacggacttcgctatcttatttctccccttcgaaagcatctatgcagaagtgattcgccggacaagcttagttgaaacactacaaaaggattacaagattgtagtaaccggaccgactactttgggagctatcctgaacagtttgcaaatgggattccggacactcgccatacagaaacgcacaggcgaggtatggaccgtactgggagctgtaaaaaccgaattcggaaaattcggaggactgcttgagaaggtccagaagaatctgcaaagcgcaggtgaccagttggaagaagtgatgggaaaacgtacgcgcgccatcgaacgcaaactccgtcaggtcgaagaactccctcacgaggaaagccggagaatattaccgatagacgatggcggagaagatgactgaccgataaaaacaaagaaacatacagccatggaaataacacttaaaaatcagttcattactttgtggaatacttattttccacaagccggacttccgataacattccaatactcggcagatacacaaaatctcccgatagtggaagctccgaaaggacatcggtgcatcattgcacagttgacccaggtacagcgtggaaaaactctctgcatgcaggcggattctgtgggatgccgaggtggaaaacggtacacaaacttcacggacaagatgtttcccggattcgaatgtttcctttcacacaatgaacagggcgaaggagaacgatacaagcagactccggagctggcagctgccgctctggcacagttgcctgcacttcctgtcaagggagaaaacctgatcttcaaacgttgggataagctggaagcggaagacatgccggaagttgttatcttttttgtatctgccgacatcctctccggtctgttcacattggcttgttttgacaatgtagctcctgatgcagtgatcgctccctttggtgcaggctgtgcttctattatctatcatccgtaccgggaacaactggacggaaccaatcgggcggtattgggatcattcgatccttctgcacgcaaatgtatgaaacccgatctcttgtcttttgccattccgtttaacaagttcaagagtatggtgtcacaaatggaagaaagtttcctaaagacagcaacgtgggatgtaatcaaaaagagaatgggttcgtcataatactccggaagttcgcggacaaacatcgcaccttccttccagaatatcgcatgatttctattaaaaggttcgggataccgcaaaaacaataaatcattcagaacaaacaactaacactattagttattcgactaacagcataaattatttacctaatcttagcaggagattagaaaacggaccttattacaggtgaaagttatcttctttggggcaagacccaatgcaaaaccaggtatcccaagatacccgccattaccgtaccggataaaacaccgagtttggcctggttcaataatacaggatgggcggagccgaacgaaagattggcgataaaaagcgataccgtaaagcctattccacccagtaacgccactccggatatattcttccagttcatccccaaaggcatcggagtaagaccgcttttgacagccagccaggtaaaagaataaatccccagaaatttgcctgccaataatcccaaagcaaccgcaagggtaaccccgccaataacttcaccttcgccactaaacataacacctgcattgacaaaagcgaacaacggaaggacaagataattcactgcaccatgcaggttatcctcaagcgactgaaggggactgatgacacggtcggaagccgactcaacctctttcagcttggctatctgttgattggtcagtacgatgttgtttgctcccatttcggggaatgtactgataatgcgccggatacgctcaatatatgtaccgacgttcaactgtggtttggccggaatgacaaaggccagaataacaccggaaatcgtactatggatacccgattgcaggaaaagataccagataaccacaccgacaactaaaaagaaaatcttattggtagctcccttcttacctataaaatataacagaacgtaaagcagcgccgcccataacaaatattcataagctacgtgtgaactgtagaaaatggcaatcaccaatataccgcctatatcatcgactaccgcaaacgctgtaaggaagattttcagactcaacggaacacgcttgcccaacaggctgagcactcccaaagaaaaggcaatatcggttgccatagggatagccagtccttgcccgccttcagtgcccggagcacaaaccatggaatagatgacaacaggcactaccattccgccacatgcggcaatgaatggcagtgcagctttacggaacgaggaaagctcgcctaccagtaactctcgcttaatctccagtccgaccattaagaagaaaatcgtcatcagaccgtcattaatgaactcaatcatcgtcagattgtgtcccgcatgcgaaagtaaattaaagcctccgatgcgaaaatgaagttcatgcgacaaaaactcctgatacaccgatgctgccggagagttagcgattaccgcagcagcaatcgctgtgacaaacaatagaatactcgccgtaatattcatcgacgagaaatccttcatcgaacgtaaaactgtcataataggtatatataatattagatttaagcaattctatgacacggctaagttgtatagcttcgcaatgccaacttcttcacccatagtacaaagataccggtcagaatcaaattcaatacaatggtcagcactgaaataaccaatgcaggaccacccaagttgtatccgagggcaataaagatgactccggctcctacttcaccacgggtaaacataccgatagaaagcgccaggcgttcgctgaacttcctatcgcggtaaaagaacacaggaaacagcttaccgatatttgaaagcagtgaaacaatcaatacgtgaagtgctatcattccccacgacatcatttcctgcgaacctgtcaccgaatgggttccggcatgtgtctcggcaaagttcaccccaatgaaatgcggcatgctcatacctaccaagaacataaacaggaacgaaacccctgttgaaactttatgctcgacaggagtatctatttctttgtgtttcatgatcatacccagcacgaaagccggcaacaacacctcgatgtgaatactcccctcttcgccatagagctgcttgctaaaatagtaaacggcttgggtagcaacaaacacaagcaccgaatagcccattatcgctttccagtcctgacgccagttataccttcccaactgtttccaacccaatgaaagcaatacgaaaacaataaagacaaccacgatcagctgccagcgcaaaccaatcatcattatctgcaggggaatcattaacaaaatggtatcgaggtcatcaaaaattgccaggacctgaatctttttataaatccagcttgatttaagtccgatagcggcaagcatcgtgaaaagaataccggccgatgtaggagctgcgaaacggcttaacagcagattctctttccaagcctcccaactgttccagaattctggcggcaaaagcacaaatacataatagatagcaatcaggaaccaaggcatggcggcagtagccatcgcaatgaagtagtctccggcataacttcgccaacgggtcttatcaacttcaaattcacgccctacgttaatcataataaaactcaggcagatgtaaagaagaatgttagatacaatttttacggtagcatatccttcacctgccaataacggcaagtattgtgatagcaaaaggccaataatcaaaaaggccgaaaaagacagaacttttctcatttttattgtttatcgttgttttaaaggcaattgccagggaaagctctgcggacagatgacaattgcctggtatattagaaactggctgcaacaaaatttgttcagaaagattcctgtttttttattacgttgcagcctttatttcctaatccagtttaagcacggcaaggaatgccttctgcggcacttccacattaccgatctgcttcatacgtttttttccttttttctgcttctcaagcagcttacgtttacggctgatatcacctccgtaacattttgccgtaacgtctttacgcaccgctttgatcgtttcacgagctataatcttagcaccgatagcggcctgaatagctatttcaaactgttgtctcggaatgagttctttcaacttctcacacatccgacgccccatatcgtaagcattatcgaagtgagtcagggtagaaagcgcatcaaccgattcaccgtttaacaaaatatccagtttcaccaatttggacgtacggaaaccatccggatgataatcgaacgaagcataacctttcgaaatactcttcagtctgtcgtagaagtcgatcacaatttcacccaacggcatattgtagaacaactcgacgcggtttcccgagatatattcctgcttcaacaattcgccccgcttaccgagacaaagcgtcatgataggtccgatataatcggtcgttgtaataatagaagctttgatataaggctcttctatatggtcgatcatagtcggatcgggcataccgccggggttatgcacctccgtcatattaccttgtttgtcgtaaatatgataagatacgttaggaactgtggtgatgacattcatatcgaactcacgatccagacgctcctgtacaatttccatgtgaagcaatcccaggaagccacaacggaaaccgaagcctaaggccaacgatgattccggttggaacgtcagtgaggcatcattcagctgcaacttctcaagtgaagctcgcagatcttcaaattcttcggcttcgataggataaactccggcaaacaccatcggcttcacctcttcgaatcccgcaatcgctttatcgcaagggcgggctacgtgagtgatcgtatctcccactttcacctctttcgaagtcttaattcccgaaatgatatagcctacatctcccgtccggagttccttgcgtggaaccatttccatcttcaacactccgatttcgtctgcaacatactctttcccggtattgaagaacttaaccttatcaccagcacggatgactccgttcgttatcttaaaataagcgatgattccacggaatgagttgaatacggagtcgaatatcaaagcttgcaacggcgcactttcatcaccttgaggatgaggtatacgctcgatgaccgctgccagtatctcttccacacccataccggtcttaccggacgcacggataatttcatcccgcttacatcccaacagctctacgatctcgtcttccacctcttcgggcatggcacttgccatatcgcacttgttaatgatcggaatgatttcaagatcgtgctcaatagccatataaagattcgagatggtctgtgcctggactccttgcgacgcatccacaatgagtaacgcaccttcgcaggcagctatcgagcgggatacttcgtatgaaaagtcaacatgccccggagtatcgatcaggttcagaatatacttctcccccttataagtgtactccatctgtatggcatgacttttaatcgtaatccccctctccttttccaggtccatatcatcaagcatctgcccttctgtcacctgaatggtattagtgaactccaacaaacggtccgccaatgttgatttaccatggtcaatatgagcaatgatgcaaaaatttctgattttatccatctgatactattatcttaatttaatttggtgcgcaaatatacacaaatgccagaacataaaaaaatgcgctgataacatatcataatgtatcaacgcatttttttattggggaagtaattcactccttagttcaatgtaacgaagagttcaccttcgatttcctgagtagagatcttatcttctctcaacagccatccgaggccaaggaacaaatctttatccaccaatttagttgctttcttaatctgcttggcagtcagtccttctgttccattcagtgcattccagattttacctgcaatttcacctgctttttctttcaacatttgctttagaaatttaagttagacatgagttaaaacccgaacaattcaggttttatttcgactgcaaatatagttataattatgttatataacagattattagtaacttttttctcttttttgtaatgaaaacatcaatttgaagactatttcttctctttttcgagatattctgcccaaattctggctgcctcctctaccattttcgaacaaggtcttttggcataatactgttctgtccgggcttccggctcggacgacaccggtgctttcttctttaaaccaagcagttcgccacaattcaacgaaccatttcgtttcttgaattcggccgcaagctcttgcaccaaagcataattggcagcctttccctcacgatcggctccgtcaattgcccccttctccagtccggcaagtagaaacatgccacaggcagcgccacacgtttcacgcatgcgcccgatacctccgccaaacgaagctgccatacgcagcgcctgctcttcagtaaatccatacatatcggcaaatgcagctactacagactgcgaacaattatagccgctcttgaaaagctcagtagcacggcttatcctttcttcctttgtcattttatatttttttatttcttgcaaaaatattaaaaaagtatctttgtcggcaactaatcaatgatttttatggcaacaacctttgacatacaattgccacactatccacgtggcttccatctgatcacccgtgacatcctttctctccttccggacctgccggaaaacggactgctggttgtgttcatcaagcatacctcagcaggcatcactatcaacgaaaatgccgatccggacgtgcgtcatgacttcaatacgtttttcaacaaactcgtacctgacggtgccccttatttcgtccacacccttgaaggcccggacgatatgagcgcacacattaaggcttcactaatcggaacctcagtcagtatccccatccggaatcaccgtctgaacctcggaacctggcaagggatctacttgtgtgaattccgggacgggggcgacaaacgcaaactgagtattaccattttggagtaaatcagccgatctccaacgccatcggacaatgatcggagtgaacggcgttgttcagaataacggcttctttcagcaaagagcgtaccggctcgctgaccatacaataatcgattctccaccctttgttcttggcacgcgaattgaaacggtaactccaccaagtatactcttgcttttgaggataaagcgtacggaaagaatcaatgaagcccgccgacaggaaacgggtcatccattcccgttcttcgggcaagaaaccactgttggtagcattacgaaccggatcgtgaatatcgatcggttcatggcaaatgttataatccccacaaagaatcagattgggacgtgatttacgcaattccgtcacatacttctggaatgcttccagccagaccatcttaaaagcctggcgttcgtctccgctagtgcccgaaggatggtaaacgctcaccacagacaaatcaccaaaatccgcacgaataaaacgcccttcgttatcatattcttcaattcccatgccatattctatgtgatcgggctctactttggtcaagatggctactccgctatatccttttttctgtgctgaatagagatatgctttatatccaagtgcctcaaaagcctctgccggatattgttcgggttgcagtttggtttcctgcagacaaagcacatcgggattttcttcggccaaccactcgggcagccccttgtttactgcggcacgaagtccgttcacattataagttataattttcatcttttatattttacgagaacaacaacattatattcaacactgtcactatcacggcaatggtataaagcacaaacgtgctccatttactattgacataatcgcccatcaccttacgcgaggaggtcagaccgacctgcaaaaaaaccgtaaacggcaactggatactcagcaccatctgagagatgatcagacccttaaacggatcgccgataaagaaaatcagtagcaatgcaatgcccaacgacaggataacccctacctgagagtggctatccttaatgtggtatgattcgccaaagataccggcgaaaatagatccggccgccatcccgctggtaatcgtagacgagatacccgccataagcagggctaaagcaaaaacaatagccgcattacttcccaacaggggttcgagcaatgatttcgcctgctgcagctcttcaacctgaatgccacttttaaagaaggtagcggctgccaacagaatcatggcactgttgatggcccatcctataatcattgaaaagagcgtatcaaacaattcgtacttcaacactttctttatggacgctgtatcctgcttattgtattcgtggctctgaatcacctccgaatgcaggaaaagattgtgaggcatcaccacagcacccagcacactcataataatgagcatgctccccttaggtatagccggcgtcacccacccttctactgccataggccagtcaatatccaccaaaaagagttcatagatgaacgacaagccgatcaccgacacaaaagcaatgatggagcgctctattttcttatatgaatttgtaaaaagcatgatggaaacaaaaacggtagtcagaacggccccccagacaataggaatgtcgagcaacatttccagtgctatggcccctcccagaatctcggccagtgatgtagagatggaagcaagtacggccgtccccagtatgggacgcgatacccatttgggcgtatactgcgttgccgcctccgaaaggcaaagccctgtcacgattcccaagtgagcaacattgtgttgcaatatgatcagcatgatggtggacagcgtaaccacccataacagtgagtaaccaaattctgaacctgccgcaaaattagaagcccaattgcccggatcaataaaacctacagtaaccaataaaccgggaccaatatatctgaagacgtccaaacctcccagatagcgtttgtggtctttactttttaaatctttaaaaatatttttcataaggatgtcatgtctcttgtttttcttctaattcataaaatctatctacaaagatagttattaataacaagcgagaaccttgttcggttcacttttaacaactatctttgcccaatattcacacattaaaaagattaagcaaatgaaaaaaattattctcggagcatgcgctgttcttttcacgcttgcttcttgccaacaggccaaacaaaaagttttcgaactggctgccgaacaagtaaacaaacaatgccccatcactgtcgatgaaatgacaagaatggacagcaccacttattcaggtaaggacaatacatttacctatttctataccttaagcggccaggctgacgatcctaccatgtcagaacaactgaagaaatcattggaagaaaccctgccggaaacaataaagaacactgaagagatgaaagtgtacagagaatcggatgtgaccattaaatacatctatctgtcaggcaaaacaaaggaagagctgattcaagtaacagttactcctgatatgtataaataagaaatcggtttatataaaaataagagaggcggtcaactttgagttgccgcctctcttatttttatatacagcctctaaatgatgtttacagaagctttgttactccgtaacagagtctgcgttgacatcaaatacagcctttatttttcttagaaacccatctcgtgcaaagcacggcatagttggtcgggacatgaagtagagcgagccccacaccggatcccttcaagcttcgtaatgacatctgacacaggcattccggtcaccagacgtgaaattccttgcagattaccgttacatccaccccaaaaagctacttccttcacaatattattctccacctccaattcgatgtttgtgctgcaagtaccctgggttttataaacgtatttcattactcttcgccttcgttatctgcaggcttcatgttagtgtacacattctgtacatcctcgtcttcttccaggcgttctaccatcttatcaatggtggcacgttgttccggtgtcagatctttttcgtcattcggaatacgggtaaactcagcacctttcacctcgaagccattctcttcaagatatttctgaatctgggcaaacgacttcggatcaccgtaaagcgtgatttcatcttcgtcttcatcatactcttcctctaccccgtaatcgatcagttccagaatcagatcgtccatatccacgccttctttctttgtaatggtgaacattgacttccagctgaacataaaatcaagactgcctgaagtacccagtgttccgccaaacttattgaaaacgctacgaacattggcaacagtacgggttgtgttatctgtagccgtttctacaaataccgcaataccgaaaggaccataaccttcataattcatttccttatagtccttctggtctttacccatggcattcttgatagcgcgttccacgttatccttcggcatgttctcacgttttgcagtagcgacaactgcacgcagatgcgggttgttttcgggatcaggaccaccggcttttacagcgatagcaatttgtttaccgattctcgtaaatgtacgggccatgttgccccatcttttcagcttggtagcttttctatattcgaacgctcttcccattggtttaaaatatttgcctcaccccgcttctaattcagagaagaagcgggcatgagttttattaattatttaattgttgtttctatattatatgtttatctgagtttggctcccagtttgtcttccaggttcttcaccagtttcgacatgatcttatcaatcatcttatcgtttagagtctggctttcatcctgaagcaagaagctgacagcataagatttctttccggcttcaagattcttgccttcgtaaacatcaaacaaagaaacctctttcaagagtttcttctctgtttcataagcgatcttttcaatctcggcaaactgtaccttcttatccagcaacagagccaagtcacgtttcacagccgggaacttagaaatctctttatagcttacttttactgaacgaatcgctttcatcagctctttccagtttaagtcagcgtaatagacttcattatcaacatcaaaagctttcagcatcttcttggtaacgacaccgaatgtagccagtctcttgccacctttagtatttaccgtcaaggccgtagaataaatatcatcactcaggttgcccactaccagagagtgcaaatccaatcctaaacgtttgaaaatattctccacataagccttcaattcgtagacagaagtgttttcatctgcgtgtgcccatgaatttgataccattttaccggtcacccacagtcccaaatgataatcctctgagtaaggagccaaaaccttctcaggattcttcttctccgcgtcaaagtgataacagttaccgaattcaaagaatttcaaatccgcgttcttacggttagcattatgggcaatgctttccaatccaccgaacaacagtgtctgtcgcatacaattcaaatctgcacttagcggattcagcaacataaccagattcttggaaggatagctttccaaaccatcgtaataagcggcacgagtcaaagagttattcagaatctcgttgaaaccacaacctaccaactgttcagccaccaggttctgcaacttattcgacttgtcacaatctccttttgtagtcaggctcgacttcagtgtcgatggaatttccacattattatatccgtaaatacgcaggatatcttcaatcacgtcgcagtcacgctgtacatccacacggtatggaggtacggccaatgtcagcccttcggccgtctcgtccataattttcatttcaagactggtaacaatgctctttatcgtctctaccggaatcactttaccaatcaggctgtgtaccttctcgtaagtcaactcgacaataaaatcctgtgcaggagcagcacagacatctttaatctccgaagaaatggtacctccggcaagttcctttaccatcatagccgccaatttcaggcagtagatcgtgatattaggatcaatacctctctcaaaacggaaagaagcatctgtattcaagccatgacgacgggccgtcttacgcacccatgtcggatggaaatatgcactttcgagaaacacatccgttgtggcctctgtagaaccggaatcaagacctccgaaaacaccggcaatacacatagcgtcttctttgttacagatcatcagatcacgttcattcaacttacgttcaacgccatccagcgtgacaaacgttgtgccttccggcattgttttcacaatcacctcgcccccttttattttgtttgcgtcaaagcaatgaagcggttgcccgaaagcatgcacaatgtaatttgtgatatccactacattattaataggacgcaaaccgatgatgcgaagtttattttgcaaccattccggactctctttaacagtaacccctttcacagcaacacctgcataacgtggacatgcctcactgttttctacagttaccttgatgtccagatcatgattttcgacagcaaaagcatcgacagacggtctggtcagtgcagcctgtttgccattctgtaccagataagcatacaagtcgcgtgccaccccatagtgtgaacaagcgtcagcacggttcggagtaatatctacttcaagtacatagtcgctctttacattataataatctttcgcaagagtacccggtacggcatcttccggcaatacgatgatgccgtcatgtgaagttccgatcccgatttcatcttcagcacatatcataccgatcgactccacgccgcgaatctttgatttcttaatagtaaaacattcgtcaccatcatagagcttcgtgcccaaagtggcaacaacgactttctgtccggcagctacgtttggagctccgcacacaatctgagtaggttcgccgttacccaaatttacggttgtgatgtgtaaatggtctgaattgggatgttccacgcaagtcagcacctcaccaatcacgaggccttccaacccgcctttaatcgtttgaacttcttctactccacctgtttccagtccgatagaagtcagcgcagccgccacttcatcgggcgtcagatcgaaattgacatactctttcagccaattataagagatattcatatcattaagttttttatgttttcaaaagtgacccgcaaagttaataagattttttggttgatggggaatgaatggttataaaaaaactcccggtcagctttaaaaaagatggccgggaggcattttctatcagagtcgatatcgtgatatcatttcatagccggatgcaaatggaaatatttcttcataaataagatatacaccatacttagtatgacaattgtgcccaataaataacaataatcccaaccgggagttaacagataaccaacaataattatggcttgtgatgtcatgtaaatcagtgaaaccaccacatgcgggatctccagttcatttgccatcaactgatataagtgtttccgatgtggcaaaccaatattttcatgtagcataagccgatggataatagtcagcacactatctactccataaaccacaagcaaaacaatccaactgaaattctctgttcgaattattagtttacctatcaggaaaagaatcacaaaggcaatactgaccgatcccacatccccggcaaagcatttggccttcttgcgaaaattgaaaaaattaaataccaacacagcacaaagcatagtgtatatcagatcctcctccacaaaacggacaatttgcacattgataaaagctaaagcaagtaatacaacccaagaataccctcccgtaatgccattaatcccatccataaagttataagcattgataatgcctgtacatacaattaaggcaacaaggatagtccaccaaggcagattgaataatccccattgataaaacatcaaggccattgcagtaaaatgaaaaactaaacgcaatccctgagaggtagagcgaatgtcgtccacaaaactaataaaggttatcaaagtcagagccagcatgaaccaaggatactcaaactgatttgtcagaaaataagccaatgcacccaagtagaaaataatacctccaccccgtagcgtgatccgggtatgcgaactccgttcgttcggtttatcgatgatattgcatttatcagcaatacggaaataaaaaaattctgccaggaatagcagaactaagattatcagatagtacataagttattcattcttgtctattaaatgaaaccaaaactgaagccctaaaaaggctaaagctgccaatccggtcaaaatgcccataatccaaagaaaagtttccatccacactttcttctattctataagaaaagtctccagcacattcatgggcttccacttgagttctcgtacagccttttcattactaaaggtcaaagagcttgtgattttacgaagtttcaatgaattgatcggagcttttttacccaggcaatctccaatgacagccatacttttagctaaccaataaggaatagatattggtctttttttattcaattgcttacatatcaccatctccagttcacgaaaactcggctggtaactgtcacaaacattatatatcccacccttttctattaacataggaagaagatttgcaatatcctgaaccatcagaacacttttccgggcttttcccccggcaatacttaagtacttaccatttttaataccatgaatcatcgctcctaaatttccaggaggattaggtccggcaatcaatgaaggacgaagtatacttaactttacattatgcatagcacaccacccttccaagtatttctcagccttaatcttactcaaagcataaggagtagttccatttaaaggatgctcttccgtgatattctcacccgaatcacaaccataaacggcaacggtactaataaaaatgaaagctttaggaataccactattctctaaagcagtgcataagttcttggtaccctgaagatttacatcaaaaaagagttgtttctcttcttctgttttaggaatagaatgcgctttacctgcagcatgcagcacaacatcgtacttgatattcagtttaggaacatccgacactaaatttatagtataattatcccgaggagtcagccccacagtcctaatttgatatttatctttcagtagagaataaagattgctgcctaaaaagccagaagcaccagtaaaaagaagattcattgattatattattgaaaatattgcctgattttgggtaataaacgatataaagtatataacatactcacttttattccgttctttttaaaagcatttatacattcaagatttcctttcctaatattagatagattcttacttgtagttccccctaatcgcatcctgactaaaggttcaggaagataatataatttaatatgctctttatcaatcaaacgaagcattaactcaaaatctgctgcgaacttaaaatccagatcgaacaacccatatctctgatatacttccttcttcacataaaatgtaggatgagccggatgccaccctttacagaaaggacgttgtccccctgatttccaataccgaactattttagatatatcgttctgagcaacataatataaatcagcataaacagcatcaatagaagtatctgattcaaagcattttatcactttttcaattgcattaggatcagatattaaatcgtcagaattaataatcccaatcacatctcctgttgccatttgaaaacctttattcatcgcatcatacaagccattgtccttttcactaatccacttcaggcgcccattaaacaatggctcatactcttttataatcgccacagtgttatctttcgaaaaaccatctattattatgtactctatagcttgatgagtttgtgataatacagaagttatagtatcacgtagtgtctgtgcgctattgtaagttactgtaactaaagagaaactcatttattcaaatat

SEQ ID NO: 4984 - DNA, 93236 bp, Unknown
  gut microbiota DNA sequence
cctgtgacgggtaatgaaatctatgatcgctttacttttctccttgggttgatagcctctttttacagacagactcaggttggggcggtcgaacgatgaaataaatatttgcggttgtctcaattgcaactggcggacgatatcctccctggtaattttatctgccgtagcagtcagggcgatcataggcacattggggaactggttgcgtaagaatcccatccgggcatattccgggcggaagtcgtgcccccattgtgaaatacagtgggcctcgtccactgcaaacagtgagagggtcatgtctctcagcagatagtcggcttcagatagtaatttctcgggcgagatgtagaggagcttaagttgtcctgagatgcaggctctgcgtaagttggcattttcggtttcgtcattgctgctgtttagtgcacctgctggtattccgttggcacgtagagtttctacctgatccttcatcagtgaaataaggggcgaaataacaatggctgtgccttccagaagcagagccggaagctgatagcagattgatttgcctccccccgtaggcatcaataccagtgagtcttttttacttatcaggttgttgatgatctcttcctgcaaaggacggaagctatcataaccgaaataagttttgagggtctgtatcatttgatatttttcgttcatctttcaggcaaaggtacgctttatttttgggttattaaaagttaaatattcttattaacggccctttttacctacttttcgacgattttgattgtttttatatcaaaaatatatacgaaaaagttgtgtatatcaaaataatgtatgaaatttgtgacatctaaagttacaaattaatagtgatatttaaaaacaaaccctaaccagttaattcaatgagtgatttagaaaacaaaacccaggaagaaactcctaaaaaacgcccttacaatttaagggagaaaaaagaaaagaaagctgcttaccggtctttgatcagacccgaattggcagatgaattgtacgacagaatcctgaacatcattgttgtacagaagaagtacagagacccggactattcagctaaggatttggctaaggaactgaaaaccaatacccgttatctttcagctgtagttaattctcgctttggtatgaactattcttgcctgctgaacgagtacagagtaaaagatgctttgcacttgttgacggataaaagatatgccgacaagaatgtagaggaaatcagtgcgatggttggtttcgctaaccgtcagtctttttacgctgcattttataaaaacgtaggtgaaacacccaacggatatcgtaaaaaacacgcagaaaaaaagaaataattgcatttcttgaaacggaataaaaaggaattatctcaggctatgtctttgagatatttccttttttgttttataaccataatgtctaaagtatgaagaaacatttaatttcaatggctgcaaccgtaatcttgttgactgcttgcggcggcgccaaaaaaacaaacactgctgaggcagataattttaaatatacagtggaacaatttgcagacttacagatattacgctatcgcgtacccggatttgagaatttaactctcaaacaaaaagagctggtatactatctgactcaagctgcgctcgaaggaagggatatcctgttcgatcagaacggaaaatacaatcttaccatccggaggatgcttgagacgatctatacggattatgcgggtgacagaaacagcccggactttgtgaatctgaccacctatctgaagcgtgtgtggttctcgaacggtattcatcaccattatggctcggagaagtttgttccgggctttacaccggagtttctgaagcaggcattgcttagtgttgacacttcgaagctccctttggctcaagggcagacggtagaacaactttttgaagaactgtctcccgtgatcttcgatccgaaggtaatgccgaaacgtgtgaatcaggccgatggtgaagacttggtgctgacttcggccagcaattactatgacggggtgactcagcaggaggctgaggctttttataatgcgttgaagaatcctaaagacgaaactcctgtctcttacgggctgaacagccgtttggtgaaagaagacggaaaaataatagagaaggtctggaaagtagggggactctatactcaggctatcgagaagattgtgtattggctgaagaaagctgaaggagtggccgaagacgatgctcagaaagcggctatcggcaagttgattgaatattatgagaccggtgatctgaagacgtttgacgaatatgccattctttgggtgaaggatctgaattcccgtgttgacttcacaaacggatttaccgaaagttatggtgatccgcttggcatgaaagccagttgggagtcgattgtgaattttaaagatctggaggccacccgtcggacagaactgataagcagtaatgcccaatggttcgaagatcactcacctgtggacaaacagtttaaaaaggaaaaggtgaaaggagtaactgccaaagtaatcactgccgctatcttgggaggagatttatatccctcgactgccattggcatcaacttgcccaattctaactggattcgcagtcatcacggttccaagtcggtgactatcgggaatattaccgatgcttataataaggcggcccacggaaacgggttcaacgaggagtttgtgtacagtgacacagaaaagcagctgattgataaatatgccgatctgacgggtgaactgcataccgacctgcacgaatgcctgggacacggttccggaaagttgcttccgggagtcgatccggatgcattgaaagcctatggctctacaatagaagaggcacgtgccgatctgttcggtctttattatgtagctgatcccaaactgctggagttgggactggtgccgagtgaagatgcttataaggccgaatattatacttatctgatgaatggactcatgacccagttggtgcgtatcgagccgggcaacagtgttgaagaggcgcatatgcgtaatcgtcagcttattgcccgttgggtatttgagaaaggaaaggctgataaagtggtggaaatggtacagaaagatggaaagacttatgtcgtagtaaacgattatcagaagcttcgtcatctgttcggcgaactgctgaccgagatacaacgtatcaagtctaccggagactttgacgcagcccgctcattggtggagacctatgccgtgaaagtagacccgggacttcattccgaagtattgactcgttataaaaaattgaacctggcaccttataagggatttgtgaatccgagatacgatgcggtcattgacgagcagggaaatatagtggatgtacaagtaacctatgatgaaggctatgccgagcagatgttgcgttatagcagggactattcgccgctgccttctataaatgattaacttatggacgtaaaagaacaactgaaagatataaaaacacaactccgcctctctatgaacggagtcgtgtctcaaagcatgcgtgaaaaggggctggactataaactgaactttggtgttgaattgccccgtatcaaaagcattgctgccgcttacgagaagagtcatgatctggcacaagccttgtggaaagagaatatccgtgaatgtaagattctggcaggcttattacagccgatagatactttctttcccgagatagccgatatttgggtagaggatattcggaatatcgagatcgctgaactgacatgtatgaatctgtttcagaatttgccttatgctccggcgaaaactttccaatggattgcggatgaggcggaatatacacaagtgtgtggctatctcaccatagcccggttgctgatgaaaaagggagatatggcccagcgtcctgccggtgagttgctcgatcaggcgatttgtgccgtacagtcagggagttatcatgttcgcaatgcggcaatgcttgccatccgtaagtatatgcagcatagtgaggaacatgcttttcaagtttgccgtctggtagaaggcatggagaactctgaaaaagaggcggaacagatgctgtatgcgatggtgaaagacgagataaacgattgattataaatgacggatggtgaacaataaacgggtggtattgattacgaatataccctttattgttcaccattcatcgtttttatatactgtcttctggttattgttcctttatcggttctacaattgtcacattgctgataaatacgctgtcatatcttttatgtccttttgcccagcggttgttgtcataacaatcaataaaacggaggttcaggtcctttcggatagaatccggaatcagcagttccgccggcttttgtgagataaggacgaacggcagcgcttttatgatctcctctttattgcttaaatccatgtccccgatctttttatgtgcttcgtataccagttcgatgcgcaacacttcgtctttactgtggtaaaacggtaaaggttgcagttccggattctttcgggtagcactgatacttttgggatccgagttgctcacaaaacttcctatataaggcatcacaaatagttcggcaacagcaaataacgccacgattcccatcaggaaggaaaagggctgaagtttgaaagcagatcggaatagccatactgctactgtcaggaacaatacgaccaaccatacgaacattcccgttcccatccgtccttcccggtacatgaatagataaagcgctatgggtagagccaatgcggctactacaatcaagtaagcattgatgcggtagagtaccctatccttaagttgtggcattttttgttttgcctgccgaatccaatatacaaatagatgtcccattgtcagggctgcgggcaacaatatcgggagtagatagcgtgttttcttttccggaagcagggacagaaagaaaaggatcagtaacatccagctcagacagaacagatattctttggatgattctactcgcttcttccagaagggtactaaaagagtggtcagtgtcagcagtgaccatacacccgtctccaaaaagaattgccagtaataataccaggaacgtacgttgtgattactccaggaagaagactctttgtggaacacgtaggaagccatctcttgatgatagatataaatataggcataccaccaagtgctgagtacgatgccgatgagaatcatgacagcgagtgcaatccactttcctttcatttgagtctctttgcggtaatataagatgtaggcacatacgaacgggagaagcagggcatagaaagatacgggacccttgccgagaaaagataatcccataaaaatacctgcaccaataaaataagtccacttgcatggattctgccttaaagcaagataaagataataaatggctcccatcatgaacgcatggcagtagatatcccaggtagccgtacgtcccatcagaataatgttatacgaagtacataagacgagcgaagataccagggcataggttcggttgtcggttagcttggtggcgaatttataaaaaaagagtactaacatgacagcggcaaatccggccatggcgcgttgtaaaggaaggttgtctggcgaaatcatttcggttatggcagcaatccaggtggggagaggaggcttttccaatcttaattctccgttcatggttggcaccagccaattatgatcgtataccatctcacgtgcagtgatgatatttctcgactccatgatatctgcaaagatagctccattgttaatgaagaaagaacagcagaaaacgagaaggaggagaggcaagtgccagcgatagttttgtgtaaaggggactcttgtcataaaacatttttttagtggttggctgcaaatttacagatatatttttgctttccgcaaaaaacaattaactttgttggcgctaaaacggcgccgatatggaaactcaaaatgtgaaagatacggtacggcagatattcacagaatatctaaatgcgaacggacatcgcaagactcctgaacgttatgcgatactggacaccatatactccattgacgggcatttcgatatcgatatgctgtattcacagatgatgaatcaggagaatttcagggtgagcagagctacgctttataacaccatcatcttacttatcaatgcccggctggttatcaaacatcagttcggtacttcctcccaatacgaaaaatcatataatcgcgagacgcatcatcaccagatatgtacacaatgcggcaaggtcaccgagtttcagaacgaggctttgcagaacgcgattgaaaacaccaaattaagtaaattccaactttcgcattactccttatatatatatggtatatgtagtaaatgcgacagggcaaataagagaaaaagagtaaataacaacaataaaaaagaaaaatgaaagtagatgttctattaggattacaatggggcgacgaaggtaaaggaaaagttgtcgacgtcttaactccgaaatacgatgtggttgcacgtttccagggtggcccgaatgccggtcatacacttgaattcgaaggacagaaatatgtgcttcgttccattccttcaggtatcttccagggggacaaggtaaatatcatcggtaacggtgttgtgctcgatccggctttgttcaaagctgaggcagaagcgctggaggcatcgggacataacctcaaggagagactgcatatttcgaagaaagcgcacctcattttgcctacacaccgtattctggatgcggcttatgaagctgccaaaggcgatgctaaggtaggaactaccggaaaaggtatcggtccgacttatacggataaagtgagccgtaatggcgttcgtgtaggtgatatcctgcataactttgaacagaaatatgctgcggcaaaagctcgccacgaacagatcctgaaaggtttgaactatgaatatgatttgacagaacttgaaaaagcctggttcgaaggaatcgaatacctgaaacaattccagttggtggatagtgaacatgaaataaacggtttgctcgataacggcaaatccattctttgcgaaggtgctcagggtactatgctggatattgattttggctcttatccgttcgtaacttcttcgaacacagtttgtgcaggtgcatgcacaggtttgggggttgctccgaataagatcggtgatgtatatggtatctttaaagcttattgcacacgtgtaggttcggggccgttcccgacagagttgttcgataagacaggggatcagatttgtacacttggccacgagtttggttcggtaaccggacgtaaacgccgctgcggatgggtggatctggttgcactgaagtattctattatggttaacggtgtcactaagctgatcatgatgaagagcgacgtactcgatacgttcgaaacgatcaaagcttgtgttgcttacaagatgaatggtgaagagatcgattacttcccttacgacataaccgatgaggtagagccgatctatgtggaacttccgggatggcagactgatatgacaaaaatgcagagtgaagatgaattccctgaagaattcaatgcttatctttcgttccttgaagaacagttgggcgtacagatcaagattgtgtcggtaggccctgaccgcgaacaaactatcattagatatacagaagaataagaaagcctcacctttctcccttttttgtggagaaggaaaagcagactttataaaaagcattgatttaaaatgaggcctttcttcctccctctctttccggagaggcccgaagtgaggcctttttatttataatacttatgaagaaacattttattacgtttttgctattagtgggaatgacagcttccctgacagcacagcaaaagtatcaaccgacagaggctaacctgaaagcccggagtgaatttcaggacaataagtttggaatcttccttcattggggactctatgccatgctcgctaccggagagtggacgatgacaaacaataacctgaattataaagagtatgccaaactggccgggggattctatccttcgaagtttgatgcagacaaatgggtagcagccatcaaggcttccggagctaaatatatttgcttcactactcgccatcacgagggattctcgatgttcgataccaagtactctgattataacattgtaaaagcgactcctttcaaacgtgatgtggtgaaggagctggccgatgcatgtgccaaacatggcatcaaacttcacttctattattcacatatagactggtatcgtgaagatgctcctcagggaagaaccggacgtagaaccggacgtcccaatccgaaaggagattggaagagctattatcagtttatgaataatcagctgacagagctgctgactaattatggtccgatcggcgctatctggtttgacggttggtgggatcaggacatcaatcccgatttcgattgggaacttcccgagcaatatgcacttattcatcgtttgcagccggcttgcctggtaggtaacaaccaccatcagacaccttttgccggagaagatattcaaatcttcgagcgtgatttgccgggagagaatactgcaggactttcgggacaaagcgtcagccatctgcctcttgaaacatgtgagacgatgaatggtatgtggggatacaagattacagatcagaattataaatcgactaaaactttgattcactatctggtgaaagctgccggtaaagatgcaaatctgttgatgaacatcggtccgcaacctgatggtgaacttccggaagtggccgttcagcgcttgaaggaagtgggagagtggatgtcgaaatatggtgaaactatttatggaaccagaggcggtctggttgctccgcatgattggggagtaacgactcaaaaaggcaataaactttatgtacacattcttaatttacaggataaggcactcttcttgcctattgtcgataagaaagtgaaaaaggcggtggtctttgctgacaaaacaccggtacgtttcacaaagaataaggaaggaattgtactggaacttgctaaagttccaacggatgtagactacgtggtagaacttacaattgactaatttttagctaattcttcataaaagcgatgtacggtaaactccctgtacgtcgcttttgtttatttttggcaagctatttgtatgataacacatatataacaattaaataagaaagaatatggtaataggatttcaatggattatttttattggcattgctctcgttagctggctggtgcagatgaatctgcagaacaagttcaaaaaatactccaagataccgacaggaaatggaatgacaggacgcgacgtagctattaaaatgttacaagataacggaatatacgatgttcaggtgactcatactcccggacagttgaccgatcattataatcctgccaataagacagtgaatctgagtgaaggagtatatgacagtaacagtatcatggccgctgccgtagctgctcacgagtgtggacatgcggtgcagcatgcgcgggcttatgcacccttgacactgcgcagcaagctggtaccggtcgtttcgttcgcttctcagtggatgacatggttgttgcttgccggtattttgctgttagagcctttcccgcagttgttgtttgccggcattatcttgtttgctatgactacgttattcagttttatcacccttccggtggagatcgatgcaagtaagcgtgcattggtatggctgagtgcttcaggtataacgaattcatataatcatagacaggcagaagatgcccttcgttcagccgcttatacttatgtagttgctgcccttggttcgttggctacactgatttactacattatgatatttatgggacgtagagagtgatctttcatctatacacaataaaagaggctccgtagatttttctgcggagcctcttttattgtgtatagggaagtgttttttatgttctaaatgttgatagtctctttttatatatatctttgtaaatgccgatggtggagatcgggtatatagtaaaaaatcaaataccaatcaatatggtccttatcttataaccctgagaggacaaaacgtttttgcatatcgcgtggtaacagaaacatcctgttttggagttagagtgataaactgtacatcaggtataaccgaaagttgggttccggtagattgagaagtatgaaaattagaacagccttttttatattttgcatttctttattgttgggggcctgtagtcatgttgctacagagtctcgggtgcagccggtttcttttgaagtcggttcttctatgatagctgatacgtttttcttagatagcttatctctttttatgcccgaaacaaatgaagaagctttaataaataacattgatagagtctatgaatctaacggacgatattttattctggataagcggatgaagcaggtgctttgttatactctttccgggaaacatttatttacgatacgtgctgtggggaatgggaagggagagtatgttgacctgttcgatatcgctattgatgtagcagaaaataaattgttgcttttaacctatccttcgcaaattctttactatgatttggagggtacatagctgtcttcttatccattagacgatatgtatcaatcttttgccgtggataaaggatttatctatttgcagaatgatacttatgctaatggagtggtatcagattattctctgatagtgattaataaggaaacgggtaaacaaacttctttattagaacctttatacgaaacagcaccgttttgttcttctggtaattaccaaattacgaatactgcctcagtgttatttacccgtaagtttgacaatcatatatatcggataacgggagaatcgattgaaccactttatatggtagattggaaagataaggcttttccggagagtgataagtagcgtcagttccaatgtaatgatttgaatcagttctgttatcaaggaaaatatgtatatactatgactgatttatgtgatactccttcctatttgttgtttagaaccaaccaacccggcatgtgtttgctttcaaaagccactagtacagtgaacaattatcaggtaattatcaatacggattatcagttgcctttgcccaattatatgtcggtagagggaaaacaaagtcggattttcttcatttattcatctgaagtactatgcgagcaaaagaaattgtctgctgaagaagatattaatgaaaaaatgtccagtttgctagggcagataaaggagggagacaatccggttatttttacatatcatgtgaaataagtcgtttaaaggttgccccaaacatcatggattctacaaataacgtttagaattggtgttgtctatgatgtttggggataatatagtttgatcttttaggcttattcctgataaggtgattgccagaagtaagagtcattatgtgagtcgtaggcggtggcaccgggctttccattgctactgtatccttccggaactaacgagatatacatcggccactttttgcccggatagtttgtttctgcgttatattcgctttgcagagggcaagttacgtaatacaggttcttggccatatagtaatccagataatactctttggtctgcttattcttattattccagtttgcgtcttcgtttagtacaacgggttgattgttgcggaggcgttcgcgcacttcaccaatgcccagaaggtttcctttttcatctgttacataagcgttgaatgtcgggtccatccataaccatttgtcgagggtgttggagtagaccgcattgatgacgtggcaatcgttgatcatcactttgggcatacaggtgatgaaacgggatttgaatcccatagccagatagcactcgttcagcatttgtgccatcatccggcagtttacgccccggttctcctttttgcaaagttctaccatggctattgtgttccgctcttccggattacgtgaattgccatcatgcggaactatgttgtgaacccagtagagaaggtttttgattttagagatctcgtctccgcttccggcgatactatccaggttgaaatgtttccgtaactgtaccagattactgtcgttaggattcatgtaggtgaagcggggtagagtgtcagttactgattcattataacatatcggttttgtttcagttctgttgtatccttcggcttgttgcagaatatacagatagtcactgtccagacgcattttagccattatttccagatacttcttctctttacgtaaattgtcgatgtcactgtcacctttagcatggttgtaatcattccatccggagttgaaagccttctcaaagttttttagggctgcctttttctttccctgaagtgcctgatagcaagcaaggtcgtaataaaccaatcctgttatattttttgcattttcctgaagttgttgaggcaatccttgatacaacttcagtttctcccaatttaatttctcggcctttttgtaatctttctgtttgcgggcgtttgctacttcctgagtgagtgcgctgtactttctctcaaattcttttttttcgttgttttgtgccattcccgatagtccaaggcataacattgtaatgatcaaaaaaactgttttcatatgatttctgttagataatgtgatttctttgtctttcagaaagcaaatagtataccaaattaataaatatctcttattgagcagaatggcattaaaaagtattgtccgaaaatgaacagtcttaacggaaccggacaccggatacatttgcttacagattcacagaaagtctgtggtttctgtttcaataatcaattatttcatataactttgcaactcaattcaataaaacagttagaacaatggcagcaaaaccaggtatacctaaaggaacacgtgatttttcgcccgtagagatggcgaagcgtaactacatattcaataccattcgtgacgtttatcatctgtatggtttccagcagatagaaactccttctatggagatgctttctaccctgatggggaaatatggtgaagaaggtgacaaactactttttaagattcagaattccggtgattatttttcaggcattactgacgaagagctgttgagtcgcaatgcggctaagctggcaagtaaattctgtgaaaaaggtttgcgttatgacctcacagtgcctttcgcccgttatgtagtgatgcaccgtgacgaaattactttccctttcaaacgttatcagattcagcccgtatggcgtgccgaccgtcctcagaaaggacgttaccgtgagttttaccaatgtgatgctgatgtcgtaggcagtgattcattgctgaacgaagttgaattgatgcagattgttgatacggtgtttacccgtttcggtatccgcgtttgcattaaaatcaataatcgtaagattctgaccggtattgccgaaatcataggagaggcggataaaatagtagatattacagtagcaatcgataaactggataaaatcggtttggacaatgtcaataaagagctggccgagaagggtatcagtgaagaggctattgccaaactgcaacctatcattcttctgagtggaaccaatgctgagaagttggctacactgaagactgtactttccgatagcgaaacaggtttgaagggagtggaagagagtgagtttattttgaatacccttcaaacgatgggactgaaaaacgaaatagagcttgacttgacattggcacgtggattgaattactatacaggtgctatttttgaggtgaaggcgcttgatgtgcagattggcagtatcaccggtggaggtcgttacgataacctgactggtgtattcggtatggcaggggtatcgggcgtaggtatttcgttcggtgccgaccgtattttcgatgtgctcaaccagttggaactgtatccgaaggaggccgttaatggaactcagcttctgtttattaacttcggtgagaaagaagctgctttttctatgggtattctgtctaaggcccgcgcagccggtattcgtgccgagatattccccgacgctgcgaaaatgaagaaacagatgagttatgcaaatgttaagaacattcctttcgttgctatcgtaggtgagaatgaaatgaatgaaggaaaagctatgctgaaaaacatggaaagcggtgaacagcaattggttactgctgaagaactgattggcgctttaacaaaataaggaaaatgcccttacctttttaaaaccggggactgttggtgtaaaaaaggtaaggagataaaaggaacgggaccttggtttaaaaccaaaggccccgttcttttttataagtcttttcaacgccaatactgattggattgatgattgctgttttcatcggattccaccgccataaagatcacagagttttaactgttttcagattatcttcgtaataaatcagtgctctccctgtctttttcagtggaatgtgttttataaatgacgttccggatacatatcttcccaccactgaggactatcctgcaaccagcgggcaaaccatgccataatactgttatgccattgcacgcgtttcggatagtcggcaataaagtggttttctccatctacagtgatgaactctactgttttacccaatattttcagagcattgaatagctggatgctttcaccgataggtacgttggtatctacggtgccgtgcaacaacagaagtggggtgtttattttatcggcgttgaagagcgaaccttgtttggtgaacagttccggattgttccaaggataactgtcggctgccgctatggcattataaccgtatccccaatagccttcaccccaataactggtcacattgctgataccggcatgtgaaactgcggcggcgaaaatatccgtctgagtctggaggtattgtgtcatgaatccaccgtaagatgcaccgagacaaccgatttttttatcattcacgaacgggtgttccttgcagaactgtttggtaccttcaatgatgtcgtccgcagtacgtttgccccaggcattgacatggcgtgctgaaaactcctgtccgaatccgattgttccgctcggctggataacatataccacgtagtcgcgtgaagcaaacaactgtgcgcagtatggattactgataccccgttctgtgggagtcgttcctccgtaatagtacacaatcagaggatatttcttgttcgggtcgaatgaaggcggcagacacatcatccctttgatctctgtcccgtctgaagctgtgaagttccagggtttcatttcgcccagttcaattttctccagagtcggtttcatcgggtcggctatcagtcgagaggttttctttttcaggtcgtatacataagcaactcctgcattgtagcatccctgtccgatataagcagccaatgacggattgttttccgacatggcaaatgcactggtgacatcagtctccaggttcagcttttcaaacttacgatctttgggtgaatagcgatagatattccggcaatcttcatcattggtgctgaagtagatacaaccgtcacccttgttccattgcaggaagttgacagacggattgaattctttggtgatcggatcgattttacgggtagccagatccatgataaatgcctgagagtcgaagtcattggcgatagggtggttgccgcaattcttaccgataccgtcaaaagcttccgggcttgccgtcaatagcaattgcttaccgtccggtgagtagctggctcctccgaggaatcggtcttcgaagaacagtgtgtcgacggccaatgtttcaagatttacctggaacaaagagctcaaagagaaaggacgttgcgtgatattctcctttgaactgctgtaaagcagatatttaccatccggtgagatgtcctgcatataagtgctgtgattaccgtaagtgagccgttctgatgttccgctggcgatgtcatatctggccaggaagctgcgtccgcgtgtattggggatacggtctgccgggttgacaatacgtttcaacggaccttcatcttttacaccttcttcacggggatagtatatcaggaagtcctcgttgggcgaccaactgaatccttgctcggggatacctcgcaaaagaacttcttctttcagtgtgacaggatcgagagtgataacgtcatttccttccggagccactactgtataatacagtttattacttttcggcatccatcgcataccatctctcagattagtgagcagcacttttcctgttttcagttcggtcagttcacaataagtgcgcgaacgtttcagcgaatggttatcccaataacgggttagcagatattttccgtccggtgatacggaaacagctatggcacggttaccgtatactgtgttatcgagtgagaaacgatgtttctgttcaggatcggtgctgcatgccacttctttgaatttgtcatcttttaccagttcgcatttcagtgaaggcgcggttttgtcgtccggagtcgaaagcagtttgatagctatttcataatccatttcgggttcgagacgtaaagcgacctctttggttgctgctttagagatgctgtcttccgaagcatcctttaccatcttcgattcaccattaatgaaaagctcccatctgaccggagaggtcactttcagtttacttttcataaagcgttcggcacgcagttgggttttgatcaggtaaagcagattgtctttatcagctttcgtgaaggtgaccagaccggctgtatcggcagctgtcatttgagtcggtgcattggcaaggtcgagtactaccggtgtttgtagcaatgctttggctgtgtgtttttctcctttcgggttgatgctatcgttcatgatcggagtacgcaccgtaatggcgttcctcacctgatagcgggtcagcttctcctgtgcatgtgtggcaagtcctgttgtcatcaacagcgccatcatcagtaactttttgtccattgtagttttgagtttataattggttatttcattttgtacaccagtgtacctcccttcacgatatcttcatgtgaaatgtagtttttagtatagggttcaccattcagtgtgatactgtcgatatatttatgttctttcgataaattttcggcaatgaccgtaaacgttttaccatccggcagatggagaacaattttcggcatctgcggagcaccgaacacataatgtccgctcaccggatcgaccggatagaatcccatggcattgaacatataccaagccgacatctgtccgcagtcgtcattgccgcagagcccgtcaggtttgtttttgtattgggtatcgaagatttcacggatcagctcttgagtgcgttccggctttccggccagtgcgtacaagaaagtgacgtgatgacttggttcgttaccgtgagcatattgaccgatcagtccggttacgtcggccagtccgcttcctttcagttcgatagtaaacaatgaatccagtttgttgaggaaagcttctttaccgccaaacagttcgatcaatcccggtatatcgtgctggacatgccaggtatattgccaggcatttccttctgtataatcgcccccacggctttctgcatgtgccagatcactggggttgaaaggagtcttccaacgtccgttggcataacgtgggcgcataaactgtgtttctttatcgaataggttcttgtagaattccgaacgtttcccgaagtattccgcatcttcttttttacccattaacccggccatggtagctgcggcataatcatcgtaaaccgattcaagggtacgtgataccgattcagcatctactttgtctgtcgggtagtagccgtatttcatataagtttcccagtccgatttcggatgtgaaacggtcagtgtctgtttgatggcatcgaatgctttctcggcatcaaagccacggaagccttttttgtaggcttcggcaataaccgaaaccgagtggttaccgatcatcgtattagtttctttaccccataaggtccagatgggtaaatagccttgtgcctgattttgttcgatcatcgaattgataaagccgtctactcgttcgggtacggccagagtatagaaaggatgggcggctcggtaggtatcccaaattgaaaaagtagagtaataaacgcctgatgaggattttactatcgaatctttggcattgcggtatcttccgtccacgtcagcaatattattaggttgtatcagtgcatggtagaaactggtatagaaattctccaattcatccggagtacctgttacctcgatgcggctcaggtaactgttccagctgtcttttgctttttgtcttgtcccgtcgaagtcccagtcagccaattctttctccatattcttatgggcaccgtctacaccgactgtggagatagcgactttcatcagcaactgttcgtccggtttcatgtcgaagctcatgatcaggcgttttcctttttccgtctcttccattggcagatagatggagtcggtcaccggtttattgaatttcatgacaaaatacaaatcttggtttacccatacactgctacgtacgtgtccggtcagtgtttgtgcatcttcccagttgatttcacaggctttgacatgcgatttgtattgttggggattccataccaagccgtgttgtaagtcaagtagcaatgaagccgagtcggcattctgataagtgtaacgatgcagggctacatgatccgtagcggtcagttctgcttttaccttatatttatcgagttctacggtatagtagcccggagtagcgctttctgtctttttagaaaatccgcttttatagtcgtcccgaactctctgcccggtgacaggcattaccagtagatcacccagatccatgcaaccggtgccgttgaggtgagtctgtgagaatccccagatcagcgaatcctgataattgtatccggagcaatattgccatccgatggcgttggtttccggacttgcctggatcagcccgaaaggcaggcaagcacccgggaaggtgtgaccgttgtcggctgctccgataaaggtgtttacgtactgagtgtagtcttggggtgctgtcggagtttcgggagtgcaggaggtgcaaagaccgatccccagacatgcagtcataaaggttgatttgaacttcatagcaatgaccttgataaattatttttgtgacaaagataagcaaactgagggcagaataaaatgaactcgttcattttttatgccaaagtgcggcttatcttcacttttcgggcaaaaataaggaaaaaactgacagtatcgtacagaataaaggaagaaggctgtaagcaaggaatttagaagacggacggatcagaggagatgggaacccgttatctcttgcagaagaacactctcgtcatacttccgtcaaacaattgtaatacgtaagctgtttctttgcaaacagataatggaatacaatgataggtctttttaatgattgtttccctccgatcatggatggggtatcacttactacacagaactatgcctactggctgcataggaaggcggggaatgtttgtgtggtgactcctaagtcacctgatgcgagagatgcggaagaatatccggtttaccgctattcatctgttcccattcctatgagaaagccttacagactgggttttccgcgcatcgattggccttttcacgagcgtatcagccggctttcattcgagctggtacatgcccattgtcccttttcttcgggagcactggccatgcagattgccaaagaacagcatgttccgattgtagctacgtttcactccaagtaccgggcggattttgagagggccattccttcccgtctgttggtgaactatctgataaaaaaggtgattcgtttttacgaagctgcggatgaagtgtggattccccaggcagctgtcgaagagacgttgcgggagtatgggtataagggcaggatagaagtggtggataacggaaatgattttgcaggtacgccttttctccaatctgtccggcaggaggctcggaggactttaggtatccgttccggggagtttatgtttctttttgtcggtcaacatatttgggagaaaaatctcggttttttgctcgattcgcttgtccgtttgtctgatgtaccttttcggatgtactttgtcggttcaggctatgcaagccatgaattgaaacaaaaggtggtggaactgggattggcttccaaagtgtcttttgtaggtagtattgtggaacgcgagatcttgaaacgttattatgttgctgccgatctgtttctgtttccttctttgtacgataacgctccgttggtgatacgtgaagcggctgcattgggcactccttcggtattgatcagggattctaccgcttcggaaataatctccgattcggtaaatggttttctgagtcccaatagcacagaggcttattccaatcgcatacgtgaaatattatgcagtactgctataatacaacaggtgggagaggaggcatcacgaactattgcccggtcatgggaagacgtggccggtgaagtgtacgatcgttataaccggttgataaagcgaaacggaaataaataagattatcattgaaactctcttcctccattatgtcagattctattaaaacctttaaaaccggctatatcctgcttcctgtcctgatagggctgtcggtggtggggtggttgttctaccgggagttcaatccggaacttttcagtggcattcgtttctcttggcgtctggtaggcggattgctacttgccgtactttttatgtttggacgagacggtgggctgatgtggcgtttccgctttattactgaccgggaattaacttggcgtcaggcattccgggtaaatatgctttgtgaatttacatcggcagtgactccttctgcagtgggagggagtagcctgatcgtgttatttttgaataaagaaggcattaatgccggacgcagtacagctttgactatctcctgcctgtttctggatgagctatttcttgtattggcctgcccgtttgctttacttctattttcattcgatgatctgtttggtaatgtggcgattctatcttcgggaatagaggtactgttttttctggtctatggagtcgttacgatttggactttcctgttatatcttgcattgttccgccgtccggaatgggtaaaacgtttgttgctcactattttccgcttgccactgcttcgccgttggcacaaggccatcgaaacacttacggacaatctggtattaagttccagagagatgagtcagaagtcttttaccttttggttgaaagcttttgggattacttgcttggcttggacttcacgttatctggtagtcaatgctttgctgatagcctttaccacttcgggcagccaactgttggcttttgtgcgtcagctgattctatgggtagtgatgactatcagccctactcccggtggaagcggagtaagcgaatatatgtttcgtgaatattatgccgatttttttgatgtggcaggtatggctttggtcgttgctttcgtttggcggattattacttattatatgtatttgctgataggtgctatcattattcccggttgggtgaagaagttgagagattaaacaacgttgtcacaagcctgtaaaaagaacgtaaattcttgccgctatctttgtcatacccaaattaaaagagtatccccctatgagtagagaagaattacagcagaaaagtcgtttcgccatgataggaacattgatgaccattgtcagtctggtgtttttgttttatgtaggcagttcgttggtcaatactactaagaaatataaagagcaggccattgagatagcttgtataaacaagtagcctgattatcttgtatccggagaaatgatttgaccaatttccgggaaatgtgtgatgctttaagtatccgtaggagaaatattgtctttataaaacatacttctcctacgaaaaatggttcttcaaatttggtggtaagttttcttttacttatggaatctaattcagttttcggaagtgtaagccctcgtttatagttgacaaaaaagcaggtatcccggctttcgcccgaagagtccatccgtgaggtgaagaagctaatattagactaaaccgtctgaaaatcaatgtctttaaaaagtaagatctctgtcctcaaaagctttgttttaacacagtgttaaagcttgttctttggatgtgaataaaaagttctttaaatgcaaaagacttgttatttacgcataagaacttgacaacctgcaaaaggcgttaacaatgttaattgaaaaaaggtataaggatgaaaatatcggttcagacggcgtaaactcatttccgaaacttgagctatcttattcagccggtgtctgttttttcttattaaagcaagcaaaaaggataattatcaacttgaaaataaagaaataaagaatttaccactaaatttgaagaagaacccgaaaaatgattttcgatcttccatctttcaggatgtatgttgttgattacaagatgcctatcctggcggaagatgctgttttgaggccatttatattccacctttatcttccactttaatttatttcttttttgctgaaactattttctggttttatcgactaatggattaaaagagacaaaaaacatggaaatagaaaaagattttatagacctactgactgaatacaaagcgctgatatataaagtctgttttatgtatgcctccaatcaggaagatttgaacgatctttatcaggaagtagtagtcaacttatggtgttcttatcctaaatttaggtatgaaagtaaattgtctacctggatatatcgcgtagctttaaatacttgtatctcggatttacggaaaaagaaagtactggattatgtaccattgagcgtggatatcggagtgtatgatgactgtttgcgcaatgattctttaaaagagatgtatcagttgatatgtcaactcgaccgatatgaacggatgcttgtcctgctatggctggatgaaaatagttatgacgaaatagcatccattaccggaagtaaccgaaatacagtagctgtcaagttgcatcggatcaaagataaattaaaaaagatgtcgaaccaatagaataaaggaacatggaactggatgaattaaaacaaaaatggacagaactgtccgagcaggtagaaaaaaatgaattgcttaaccgtcagataattattgatatgatacagtcaaagaaagaaacccacctgcagcaacaattgcgtgtggaaaagatggctttcggtgtcttaggtatctttctgggaatagtgtgttacactttttggagaaatgtagctccaggttggatttcatggtatttgctgggaatggtgatatggcttttgctcatgcagactcttatgtttcggattatatataccttaaagacagtaactgaacatgtagagcaacaatataaaaggttacaatcttataaggtattgatgaatctgacctatattttttcgtatgtgataatcactcccgttataatcgcttttttctatatatggcacaatcctctttttagaacagtattgtgcgtgatgatactggccggctttttaggggattattttatttatcataagaccggtgaccggttaaaagggtttagagatgctgtccgtgcgttgcaggatttaaagtcgggaaagcaggaatagaatttaagcctcctttgctttaattagctaatcggatgaaacttttctgcccgattttttgtatctttattaccggataataacaggtgttcctgtaaagagaggcaccttaaaaagaaaggatcagaaatggatacaaacgagttaaaacaaagacagcatttcattctaatcaggacgttactggttgttacggctcttgctctgttggtctatattgctttttctatggcctattcatccagaagatttcaagaaagtacttcaattatcgaatgggtaaacgattagaaaaagaagatgtgaggataattaactgatttgcggaatgaaaaaggaaatcttgaagagactgttggccaagcccggtgaggaacatagcgtttcggagtttgatgctcgctataccggtgatttgaccaaatcggaggccgaggcattgctggctgaaaacataggaaaactttcctctttgcaggataagttgtatgcgcaggaccgttatgctgtcctcgttatttttcaggcaatggatgctgccggaaaggacgggacgatcaagcatgtgatgtccggcatcaatccgcaaggttgtcaggtatattcttttaaacagccatcggctgaagaactcgatcatgattatctttggcgcatcaacagatgcctgccggagagaggacgcatcggtatattcaatcgctcacattatgaagatgtattggttgcaaaagtgcatcctgaaattgttttatccgctaagttaccgggtattatgggaccgggtgatattactccgaaattttggaaaaagcgttatcgtcagattaatgattacgaacgctacctgacggagaatggtacagtcattattaaattcttcttgaatgtttcgaaagaagagcagaagaggcgctttctgtcaaggctggaagatgaggctaagaattggaaattttccgtatccgacctgaaagagcgcagctattgggacgactatatgaaggcttattcggatatgttgacccatacttcgacggaagaagcaccttggtatgtgattcctgccgataataagtggttcatgcgttatgcagtaggacagattttatgtgaccgcatgaatgaacttgatttacattatccggaaatgcctgttgaggcgcggcatcagattgaggatttcaaaagagcattgttgaatgaataagcataaaagaggggattttataacttaccactgattacacagataaatattattggttatcagtagattaaatatcattctgtgtaaatctgtgtaatctgtggtgaatacgagctttgattcatccgcttgctttttaacataaaattttttagtgaactatgaaattgctgatgaaaagtatttgctatttgagtatatagatcaggctgactccgagtttggttaatccaaaatagttggaatggtctttcccaaggaatagtccgcatttgggacgttcatatttatcgtagttcatagatgcatatcctattcccgcagatacttcaatgttccatcgtcttttccatatccattggtaaccataagataaaccgataccgtacaagtctccctgataacgatatttactgaatccaccgttatattgtccatagtgggcatgaaggcccataaagtgcttatagaaagggatgcaaaaccaatacttagcttcgggttgaactaagaatccgcccattttgcggttatcggataaaaaactccatcctttatacatgatatctgccccggctgtcagtcggggtgatattttgaattctgctcctaggtttatggtcgtggttgcccaggagaggacatttgtttttaatgctatctcttgggaaagtatggaagtcaacggaatcagcaataacaaaagcaggaagaatgctctctttttcataccttatttcttatctaaatctaataaatccagtaaatctaacacatctccatctttttgtgctatttcctttaaagatggtttttgagtgatggcatttcgtaggtgaatgacggcttcattgacgttattcagcctgtttgcggcaatcgctttcacatattcggtgtccggagaggtatcttctatctttttcaggacttcccaggcttttgagttttgcttcatactcagcaataagattgcttgattgattcccccttgtttttcgaatattgggtaggcttcctgatatttcccgtccatggcggcagcaagtgctttcactatttcagtatctttattgtcaggcaggagttctgcaaaatgattcgcccttttgaagtcgcgcttttgcagataggctacagtttggttgacaagtatggctgagggagcatcttgtgtgataaaaggtttcaggagagtggtatcggcacgattttgttttattaagagcgatgccaggttgttggctgcgatcattaaatcgggatgtatcgagagagcctctctgtaaagtgcttcccgtttttcgtccgtagcatctttctgactcatgatataactccaaaactcgctggctgtcagtttttggggatcttttttataaagagcgtcgatttcgtctttattgagcgtacgtagttcggaatattcatagaaatattctactcttcggagtcggggcagataacggtcccggatgagcgggtaaatctttattcgtctggctccccaggatatttcattatggtttccgcgggcacgtttgatcagttctttgagctgtgatacttcttgaatgctgtccttttccatgagttcacaaaccgttgtccatgactctactacggcatcgttatctactttggcttttcggatggtttcttcggaaatgttctcgaatacttttccttctgcatttttcattctttttttggccagctttaggttatattcatatgttccttccggcgaagtgtatcctatgatctgaaaggtggtcagtgtctttgttcgatctttgtctatgtcgtccaatgcctttttcatttttctgagttcttcggcgttttttccttcattttcatagatgttcgcgtcttcagggcgaaaacgaagatgcatttctcctttttcattgaagttgagcggagtctgcttggggatgtagctgttgtccaagtccattgcactcagattatagttaaagaaccgcatcgggtagataatgccgttggtgatacgaatcgtatcccgatattcatcctggcagaaagtgcttattttgatgcgtacttcggttgtatataggtcgttgatgtcgtccaccgtacacgagtccgcataagtcaacgtctggttacaaatggagtcagggtctatgacctgtgcaaagcgtgaataatattctttttcagcccggtcgccgcagacgtttcctcgccggagtaaaatatcataattcttgccatcgtacacaatgggagagaagtttttttgagttccccggctattgtttgacagaatgggttgaatgatgacccgggaatcactttgaaagcgtttggaggggattttatatctcgttttaaggtagagcatgtctttgatcagctccaggtcggacggagcgaaaacaaatttcatgctgttttttaatgtggaagtaactgttatttcgggcaacaggctttgagattctttgagagtgatttctatccatttcttctcaccggaatggatggtgaccggctcataaccaacagaggaaaaggtgatggtggagttttgaggaatttccaatgtaaacttaccttcttttccggtggaggctttccatttctgcccttctactcggatattgactcccgaaatgggaactgatgccctgtctttaacgataccgctgatggtatgtggagtttgggcggaaagagggacaaacatcaaagcatataatatgacaattatcaggatttgtattctctttttcataattagttgtgttaaataaccggagttaaggtatgattgtttcatcatcgtcatgtataccgtcccagtcgggattgattgctatggagaatcccgagttgccgaggatactgtgattaaagtctgtactaatacgggtcagttgattgcgtagaatggatatgttgttcagtgttttttgatagataggggagccggaatgatcatcggcatataattttaaggtaatactggcattttccggtccggacgtcgggaaagtacctatgctgaagtcggcaacttcttcggcgttagtgacttctgcaactgtagtgtggtattcggctatcgtttcacctttgtatagagtatcgatttgacaggttgctgctactttgtgtatctctattccaattccggtaatgttttcgggtaactgtttcagctggaattgagtgacgccctgtgtacgtcgtagaattacgaaatcctggtaaccgcattcgcaatcgacggtgaaatcataacaagacgtgaagtagtctttggtctgttcaattcccggatagtttaggttgagagcttcaggagtagtcgtatcaggcaactcttcttctgaaacattggtagcaagtgccagacaataatctccaaatgctaatttaggaaaggtcagtttgtaagcatctgtattcaggtcggtaacgttatcgatgattccggaatggataagcacgttgtctttatagagataataacgtatactgttgattctggtagacaagttctcttccagttttccttcatcagtggcgggttgctggaatttttctgcgacaattgtcaaggtgacatcgcccatccagcagtttttcaagtcttctttccagcaactactaagaagaaagactaaagacagaaggtataaaatgtattttgttttcattataaaaaattgagttctaaatgtccccatggaatattatcaggatcccaatcgataggtgtgcctataataggaggttgattccagtctaaaactgattctgtcttatcaaggataagggttgtcacttgattgggtttcgcttgggttgttgtttcgataggaggtgtttgcttttctttttggaaaatggttacagtaatatctttaccgtcagaaggagttaatatgttttgcaattgcttggcttcgtcttcatctccaaaataactgaaaaaaagtttcttatctccgagttgacattcaaaattctttctgatgcttgccgttaaagttccgaaagatagctcggtgtctttacttacgatctgtcctaatagatttattccatttatactttgttcttttatactataagagatatctgttgctctttcaaggcttccccaaaaaccgtctcctgttgcacacagtctgattagagaagaataccgcttaagaaccaatggggtgggaagcgggtgatactgtccggactcttctaacctatctgttttcttaatggtgacgatgcccgatgtagcgaaaaagatttcatatccggaatagtctttctcagtatccgttagccatggtacatcctcttccgaaaaattttgatataggtgcaatgcttcgtttttcggaccgttaacgagtagcatgaatttgtagtttcccggacgaagtgttgtctgcatggtatacttacatgcatcggaggatttgatatatccctgaggaataacattatcctctattttttctatgctccaggcagattgccctgtctctttaataattaccaaccggctgtcatatattgccgttacgtagtagtctgttgatcgggtgcttcgggttttcataggtatgatttcattgtcagttgaaaacccttggccgtcgatggtagtggttagttgaatggtcacctgttcattggggctgtcgatgaattccatttccttgctacaagaggtatatgaacataatacactcccacatcctatccaaatagatagtaatttgtttttcatcatattcttattgttgtttttcaatcccatttccaatctattccgaagtcacccgaaacggaaagatctatgatacggttgttccgcaaacgtatattggtcactgtataatggtcttttacaatcgtcaatggcttgtcggtaagagaaagaataagttttttcgtgctatagctcccgttcggaagaggagtggtatcgtagtacgaaaagttgagtatggtcttgataccttcttccggatccgttgcttcttcgtccggatgatctaatgtcattttagagaagagataggggccgcagatgcgtgtcgcaccttttacggctttttcattcgtatctaatggagcattagtaagtggctctatgacttctgtgttgtttgcaaaatcaggggtatagtcacttttgagaactatttctttagaaaaacagatgttgatccgttcgggattcttggtttcgttggttaatgaaactttggggatcacgccattgatttctatatcgatccgaaacactctgtctaaagttgaagaacattctgtgtcaatgtcaatcgggttgtggcttttttcatcgcatttcattacgtcaaataccaattctcccacagcccgctttaatttgaattcgatagacgttttcccttgcgctatatcctcgggagtgagttgttgaatggcgtaatagttatcttttgaaagcgggacatagttgttatcgttttcttttatcatgctgatttctgactcactgaaagtcattccttctttgcttatgatctcagattccggcttttctttaggggtggcgtgaactagcagcagataagaccgatctgtagattcactggggatggataaagtgtattcccggatttgctttagggtgagatctccggtatgcctccaaaaagtgtaattggagccgtcattatcgggggaaggattggcagtattggaacggaaaataaaaagatggtataccagtttttgcaataccgcattgtcgttatcggtggagggctctccgtcaggagatgtcaggttgagactgaaagcgggcgtctcgggagtttcattgagtggctcgcatgcggagaatccgagcaataggattcctaaagtcagaaaaagtgtatgtggtttcattgactatatattattagttccagaatccgtcattcccggtgatttgattattgaatttgagttcttccaagtccaaatcggcgtcgggagagatggaaatgtcaacatcttcatttagaagccaaagagtgaacagatacatcttgttgcgctccaaggggatgttttctagcgtaaaggttttgtttttcaacgttcctgtgtaatcgatgtcaatggttacacggattgtctgatcaagaggagcggggaatagcaacggaccttcacaataagcggctccctcatatctttgataatctgttttctctataatcgggctgaacaaggatacgaactggtctgcatcaaatcttttaaaagaatagtccccattctggagctgtaccaaacagtgatatgacattgggcttttaaatatcagtccggtttcacttaaatagcaacattggctgctgccttctattgtgagatttatggcactgatttttttcaatgcattatcgaagctgttttcgggtgaatctattaatgtgtattgtccgttttcttttttagctctttgaatgatgaaacacaattgtccctgtaaatggctgatttttcgggcaatcagtgtcctgttcgtttgggataagtcatattctgtctgactattttgtgccgattcttcatttttgtcagtgaatagagcggttgtacagtgattgagttccgtttgtccgtttaaggttcgggtaggatattgaaaataatagttccgatcatacgaagtggaaactaagtttcccggattattgtctgtcacaaatgatattttcccagagtttcccggggagtttgagaatccttttgccaacagaaatcgatagatccctgttggcaataagatattcttctgcaattgttcttgttcgaaaagccatggactctcttggatactttctactttggtaaattggtctttctcttttctaaatataagaacagaaatttcgtcgtcattttctcctttggtagaaggtagttgccgggttttaaacacgacactgacagaagtatcttcttcgataacttcctggtgattggtacaggcactccccagcaaaagtgttcccaaaagtatttgtcggatgtagcgtttcattgtcatagggtttggcagaaaaattctaatggatttttattcgacgtctacattcgtattgtgaatgccatcataggtcttttctatttctacgataaaagtagatttaggattaaataagtgttcgtcgtcattaccgttgttattgtctccggcatcagtcgaagacttcagcctgacagtaattatagaaacataatttgaggtaacagtgaaaccgggaactttgatggttcgttcttgattagccttgttgagttgaatgttggcattcagtgtttgcgatgatgagggaaatggaagtaaatacgatcccatgaagtaagctccacccttggctatgccttttttaatattagtttccatattgttgttaatggcatcggcatttttggggaatggctggtaatcaagtgccttgactgcatctgcattggcttctccgtattgaaatgatggagcagcgtaagtgacttggcattgaactcctgtaacataatccggattttctccattaagattatatttaagaggtacgttggacgatgtgaagattaacgaagtcaacgaagtagtacctgttccaccgaaaatattgccggtagcataaggtacttctatatggtcgtcatccgatgccactttgataaacttaatgtcgatgcgtgatacaatgcgttccagagttaatttgatttttatttcattgtcatctccgcccactccactggagatatcgattgcatcttttgttttgccacagaatatttcattcatatcttcatggtattgatcggtggcggaaggaaaatgggtaataacaatactcttcaatatgttttcccaagtttggttactgatacctgttatggtcgtgttgagagcggcttggttcttctcgtccaggttataaaatgcgatgaatttgtaggtgcctaccgggaaagctgcattgtatttccaaactccgccatcaatgacacttgtttcatgtttggcttcttcataactaaagttaccttcaccgttttttttgaatgcataaagcacgaaatcgttttcattcaaggttgttggtgccgctcctctggtttgagcagatgaatgagtgactaattgggtgctacaactaatgtttttcaattctgtttcaggaatttctgtcgtcgttttctcgctacaactcagagtcattacggataataccgtgatgagcatgattttaaatgatttcataatgttaagtatttgttgtttctttagtgaatgatcgggtcgtgggcgatctcctccttccgaggaagtgggtatgagtttaaaatagctatgctgagcttgcagagcttctggaaaataattagaaaataatttgttgattaggtatgctacgctcttacctcttacagaggcaatgtgagataatgtaatataaagactggaaaaaagacttttctcatacttaataggtaagagaataattttaatgaatatatggctatgcaaatgattctgacctgaaaccgtatctttaattaggaatgaatatctagatatgaattattttataataaagaattatatttactttaaaaaatatgcatagataacaatttaattaaaagagttgagataatagtcgcatattaaatagtttcattataaaaaaagaaatgaaatattttggttacattaaaaagaatccatacatttgcagcaacaaaaggactgatttatcattctcttacctattaagtaagcgtctttttttctcaaaggccatcagtcattttgtcagtccttctctgacaaacaatcattctttctttttggcacgcttttcgcaataggttattcgtccggctaaaaggacaaaatattactataataagtataacatataaaaaataaaaagtaactatgaacattaaaccattagcagacagagtgctgatactccctgcacctgcagaagaaaaaacaattggtggtatcattattcctgatacagcaaaagaaaaacctttgaagggtgaagttgtggcagttggtcacggtacgaaagacgaagaaatggtattaaaggcaggcgatactgttctttatggaaagtatgctggaacggaacttgaagtagaaggtacaaaatacctcattatgcgtcagagcgatgttctcgctgttttgggttaataaacgtagtgtctaatcaattaattaaatagtaaaatcgttatggcaaaagaaatattattcaatatcgaagctcgcgatcaattgaaaaaaggtgttgatgctttggctaatgcagtaaaagtaacactaggcccgaaaggacgtaatgtgattattgaaaagaaattcggtgctcctcacattactaaagatggtgtgactgtagcaaaagaaattgaactgacagatgcttaccagaataccggtgcacagttggtgaaagaagtggcttcaaaaacaggtgatgatgccggtgacggtacaactactgcaactgttttggctcaggctattattgctgagggtctgaagaatgtaactgccggtgcaagccctatggatattaaacgtggtatcgataaggcagttgccaaagtggttgattctattaaacaccaggcagagaaagtgggtgacaactatgacaagattgagcaggttgctactgtttctgctaacaatgatccggttatcggtaaactgattgccgatgctatgcgtaaggtttctaaagacggtgtgattactatcgaagaagctaaaggtactgacactacaatcggtgtggtggaaggtatgcagttcgatcgtggttatctgtcagcttactttgtgactaacacagagaaaatggagtgtgagatggagaaaccgtatatcctgatttacgataagaaaatttctaatctgaaagacttcttgcctatccttgaaccggccgttcagtctggtcgtcctctgttggttattgcagaagatgtagacagtgaagcgttgactacactggtagtgaaccgtctgcgttctcagttgaagatctgtgcagtgaaagctccgggattcggtgaccgtagaaaagagatgttggaagacattgccgtattgacaggtggtgtagtgatcagtgaagagaaaggtctgaaactggaacaggctactatcgaaatgttgggtactgctgacaaagtgactgtttctaaagacaacactacaattgtaaacggtgccggtgctaaagaaaacatcaaagaacgttgcgatcagattaaagctcagattgctgctactaaatcagactacgatcgtgaaaaattgcaggaacgtctggctaaattatcaggtggtgtagctgttctgtatgtaggtgctgcttcagaagtagaaatgaaagagaaaaaagaccgtgtggacgatgctcttcgtgctactcgtgctgctatcgaagaaggtattgtagccggtggtggtgtagcttacattcgtgctattgaatcacttgacggattgaagggtgagaatgatgatgagactaccggtattgctatcatcaagcgtgcgattgaagaaccgcttcgccagattgttgccaatgcaggtaaagaaggtgcagtcgttgttcagaaggtgagtgaaggtaaaggtgactttggttacaatgcccgtaccgatgtttacgaaaatatgcatgctgcaggtgtggtagatcctgctaaagtaacacgtgttgctttggaaaatgccgcttctatcgcaggtatgttcctgactactgaatgtgtgattgtagaaaagaaagaagataaacccgaaatgccgatgggcgctcctggaatgggaggaatgggtggaatgatgtaatttattcccaagattgaaaaaagaagctgctttcggaaacggaagcagcttttttgttggctactgcggatattgcgtggaacgctttgtcgagattatataattgtgtacattcgtatatccaaagcaaaacaaacttatatatgaagacacatcttatattcttatggttcatcacttttggggtgatggcttgtacttctcagccggggggtaataccggtgagaacaaagtagaaggagatactataccggtattggattttgcttcggcaatccataaacaagttcctgatacgtttatgtggaatagtgtggccagaaagattacctatataccattggcctcttcccatctgatggatggtcatcctgtaatagaatatctcgatgatgatatgtgcattattatggaagggaaaagccaatggataaattgtgtcgattataaaggtaatttcttaaatactttccggcatgtaggcaatgggccaggagaatatgttaatttatcttcgattgtatatcattcaaaagattccactattcgtatttttgataatggcagttataagcatattatctataataagcaggggaaatttctccgggaggtcagtttggccgattccgagtttaattatttattgcacatgcagggcgatacttatttctttcgtggcagtttcagtaaaggcaaatcagaaattattgtgacggatacgacgctgtgggtgaagtttcccattttgccttttgattcgacggccgattatattacacggggagccattatgttgaataccactggagaagagtgcgcccctgacatttgtttgtttaatcacatttatagcgatagtgtttttctcctgactcctgatggattgaaacttgactttattctgcgtaagggcaaatatgcgccgtctttggaagatgtaaagcaattcatgaaatggaatcaatatgatccattcattaaaggattgtttattaaaacttttccgggatattattatttgcagtatacatacaaggagcaagtcctgggtgaaatatggagtcggaaaacgaatcaaatcgtatcgagaagtatcttgacccgtcccaatcaatttacaacgctccgtggaatccggtttcgttttccttcgggtactgtcatcagattattaccagattatataagtggaaataaaattgctttctttattcctgcggatgaagctatgggtgaaattcccggggtaaagataagggaggatgataatccgatattgatggtgatggagttgtagttcatcttttttggggggggagcgatatgttgacaaagtacttgcgcgtgattctatttctatgtgttctcctttggggggacatcggttgttgatgcccagactaagggaatcgttgtcgatggtgtgaagggccggtctttatccgatgtgaatatttacttgcagaaagattccgttgaaatcggatcgacagaccgaaatggagaatttatgtttagccgtgatcagataacgataagtgataccattgtcttttcgcatgtcggttactttccgttgaagtgtacattatccgaattacagcatcttggatataaagtggttctacatgagcatccccaattgctgcatgaggtagtggttagtggagagcgtccaccattcttcctggaatggacttcactgtctcctttacccaagcctttatactctttcggaggatttctgcatgcaggaaaaatttatgtggttgccggtgacgaaacactggtccgaatggttactgataaacacaggcggtcgacttcacttctttcatttacgatgactgcttgtatgcgatgggaggagctataagggaaaaagcttattctaataaaaaacacacgcttgatttgaaacgaggtgtctggtatgaattggaaggtactcttcctgccgggcggtgcggcagaatgaatggcatcctggtgggagataaggtgtatttctggggtggttatcatacagcacctatgtggacagcagcgagctacgatttgcggacgggagaatggcggtgattgtgtgacttgaaagacggggtttcctatcccgggctggcttctgatggcagctacatttatatttttgagaatcgcaacttacaggtctaccatattgaaacagatacaatgcgcatatacgaactggctgctttggatgtggaaaatacaggacttttctactggaggaatacgctttacatagtgggtgggtgtaatcgtcaagggatatatgtagctcctcatcgagatgtaattgccattgacgtaagtcagattaatccttaacgggtcaagggtattgggccgctctgttttcttttcattccccctcttattaatatattgattacggtaaatagtgttaaaataagagtacgcatcaataataaaacaaaatagaaggctcggaaacaatattactttaaccatcgcatatttaactgattatatttgtattttaaacctataaaagaacagacaaaatgaagattgtggcgtttaatggaagccctcgtaagggtggcaacacagagcttttaattaaagaagtttttaaaccgatacaggaagccggtatagagaccgaattagtacagttgggtggaaaactattgcgcggttgtgcctcatgttatacctgtttcaagacaaaggacgggaaatgtgcgattaagaccgatccaatgaatgagttcatccaaaaggcccaggaagcagacggtattattctggcttcgcctacttattacggcagtgtgagtgccgaaatgaaggcatttatggatcggttgggactgaccacgatcggtcagggacgtacactgacacgtaaggtgggggcggctgtaattagtgtccgtaggggcggtgctgtaacagtgtatgatgaactgaaccgttttatgctcggaagcggaatgattgttcccggatctacctactggaatttcggtattggtgaaatgccgggagaggtttttgatgacgcagaagggttgagaaacatgaaagacctgggagtgcagttggcatggcttctgaaggcgatacataattaacgcgaatgaaaggtttgaggatgtgtcgaaactcgtattcacgacagattacatagatttacacagacgaatatgattagttatcaatagattaagttcactctgtgataatctgtgtaatctgtggtgaattatgcctacctccttcggtgcgtttccctgctcagttttgaaatgcagttggtggatgtctgtcaatcacatatccatccgtccgtcattaaaatacctctctgatatgtttgaaattcgaattaatcgtatcgataacttcttgtgaccgaccattgatcagcagtttatacatagactgggcaaagcctaccatctgccccaattcgattttcggaggcatagccaaagcattcggatcagtcatgacatttattaatactggaccttccagctcgaaagcgttacataatgtatttaatacttcttccggatctgatacgttgaaccctgtcatccccattgcttcggctacttgtgcgaaattcggatttagcatatcggtctgccagtccggcaatccgtctacttccatttccagttttaccatacctagcgaacggttattgaatacgatgatttttatgggaagtttatattgcactactgtttccaggtcacccagtgtcatggacagtcctccgtcaccacaaagtgcgatcacttgcctgtccggacaagccaatgccgctccgatggcctgtggcaatgcgtttgccatagaaccatgattgaaggatcccagcatgtgacgctttccggttgcttgcagatagcgggcaccccatacacacgtcatgcccgtatctaccgtatagatggcgtcgtcggaggaaatattattaatttcggacattacatattccggatggatctggtccattttgcctttgtcttccgtatatgccgccaggtccttcttaaccccttcataacgtttcagttgtttccgtaagaaagagtcattcttcttttgttgcaacataggcagcagggcacggagtgtagaacgtacatctccgcaaagcccgagatccactttggcgcgtcgtcccagtctttcgggcttaatgtctacctggacgattttgatatcgtcgggtagaaaagcagagtaagggaaatcggtgcccaacatgacaagtacttccgcttcatgcatgctgtaatagcccgagggcatgcccagcaggccagtcatccctacttcataaggattgtcatattgtacttccatttttcctttaaaagtgtatgctacaggagcatttaaggtttcagacatccggatgatttcttcatgtgcccctttgcagcctatgccgcaaaacaaagtgatacgttcgtaatgattgagcatccctgccagccgtatcaggtcttcttctgccggacagacagacgaggcaagcggataaatctgttccgaggactctaccttgactgccggtttctttgccaggtcgccgggaagtccgactacggctactcctttccgggtggttgccgtctggagggccgattgcagcatacggggaaactgctcgggagtagtagccacttcattgtaaaagctacaatcgttgaatagcttgacggtattggtttcctggaaatattcggttccgaactctcctgtcggaatagtggaagcgatggctatcacaggtgctcccgagcgatgcgcatcgtaaagtccgttaattaagtggacatgccccggaccactgctacccgcacaacatcccggtagtccggtcagttgcgcttctgcacctgcggcatacgcaccggtttcttcgtggcggacatgaatccacttcattgcctcattttgcctcacggcctcgtttacttcgttcaggctgtcgcctgtcactgcataaattcttctgacgcctgcctcaatcagcgtatcgacaagctgttctgctaccttttttgccatatttatcgttaagtttaggtgatttgatgttgcaataacaggtagttgtgataaaaagttgtatatttaacgtatgctaatatccttgatagatgggtatataagacgaattttatgttaaaaatatcgtatgtgatatgtttttagtgtctttgtaataacaatgcgtgcataattttgttaactttcaccgcgtaaatagtaactttatgtgttttaacctttaaacttttgtatcaaatggataaaaatgaaatcggcttgaatgccggaaaagtttggcaattgttgagtaacaatgacaaatggagttatggtaacttgaaaaagaaatccggactgaaggacaaggatttgggggcagctttgggttggttggccagagaagataagattgagtttgaacaggaagaggaagaactctatgtttacctctgtgtaaatgtttatattgggtagatgatgctgcttattatgacaaagaaatccccggaacagtccatttgaagtgtaccccaaaagtcagatacgaatattgggggacacatcaattgccggcattacattccggggattattttttatttctctttctttttcgctgcaaagttctgttctatcaggaaagaggccactaatcctgctcctccgaaaagaagggtacacgaaccgtagatgaccccaaccatctcgcgggtataccctctgtcgagtctgtcgagatcgtagggagaaaaactgacatagctcaagataaatccgaccagtagccctaagcctactcccagcaataagcaaccgcctttcagggctccgaatgatagttggggacgattaaagtcgggcagacagatttttccgtttagctcaagatcggtttgagacattttctctcctaacttttcaataagcgtgatgcgttcgcgtctgcacgcaaagagttcgaacaatttgtaaatacctaaagtaatgatgcctacaattaaaggggctgtaataaaatccatcatgatcgtatgtttttaagtgaataatttcgttctttgcactgtttgacgcaacaggctgcggaaaggttacaaagaaaaaaatatttttgggctgtaacctttcagatttgtcagcgtctaaccggatatcatggtacagaacgacgaaacacaatatatagcacggatactggatggagatacagaatgtttttctgcatttctcgatcgttacagccgtccgctttatgtgttgattgtacaaatagtcggttgttccgaagatgcggaagagttggtccaggatgtattcctgaaagctttccggtgtctgggcagttatagaggggagtgccgtttctctacctggctttatcggattgcttataccacggccgtatctgccacacgcaagaaaaagcaggagttcctttatatagaagagaacacaatcaacaacgtgcccgatgaaaaagctgacgatatactttatcctactgatgatgaagagcggacagcgaggttgattcaggctatcgatttactgaatgtcgaggaaaaagccttgattacacttttctattatgaagaaaagtcgatagaagagataggagaggtgctgaaactttcgccgggaaatgtgaaggtaaagttgcatcgtacccgcaaaaagatttatgtattgatgaacggaaaggagtgatgatggaaacaaataagaagcatacggaaaatgcgttgaaacaggccctccaaaggaggcagcccggcagattgccgtccaattttaattatcggatgatggagcagatccgtctggaagcggaaaaacaacagaagcggaaggagagggtcatgctgtgcggcatgattgcgggtatattgctattgttgggagtgggagtatatacgcttgttttcaaattggaattcaatttcaaggagtacttgtccggtatggatttttctcatgctgattcttccctgttggctttctatagctatattgcaacgttggtcctgttgttgctcggattggattactggcttcgtaagaagaagtttcattcctgaacagtctttgggggcactctgtggtgaaatcctttctttttctgcgaataattttcttcctttgcagaataatttatctttaacacactatgagaagttttgcctctgataataattcgggtgtgcatcctgccattatggaagccctgacacgggctaaccgggatcatgccttgggctatggcgacgatttgtggacagaagaagctgtccggaaaattaaagaaacgtttgtagccgattgtgagccactgtttgttttcaatggaacaggcagcaatgtcattgccctgcaattgatgactcgtccttacaactctatcctttgtgccgaaactgcgcacatttatgtggatgaatgtggctctccggtgaagatgaccggttgtcagatccgtcctatcgccactcccgacggaaaactgactccgcaactgatcacaccctatctgcatggctttgccgaccagcatcattcccagccgggggccatttatctttcggaatgtacggaactgggtactatttatacacccgacgaattgaaagccatcacttcgttggcacatcaatacggtatgcgggtacatatggacggtgcgcggatcgccaatgcttgtgcttcgctggggctttcattgcgagcgctgactgtggattgtggtatcgatgtgcttagtttcggtggaaccaagaacgggctgatgatgggagagtgtgtgatcgtattcgatgattcgttgaagtcggaagcgcgtttcatacgcaagcaatcggctcagttggcatccaaaatgcgttatctatcctgtcagttcactgcctatctgacagacgaactgtggctgaaaaacgcaacccatgccaatgctatggcaaagcgtcttgccgatgctctggaacaggttcctggcgtacgtttcactcagagggtggaaagcaaccagttgttcctgactatgccccgtgccgaaacagatcgcatgctgcaaacttatttcttctatttctggaatgaggaagccgacgaaatacgtctggtcacttcatttgatacaacggaagaagatatcgatacgtttatccgtatactgaaaaaatagttttatatccaataggggcagatgctcatcacagggtaacacagagtctcacagagggaaagataataggaattaaaactctgtgggactctgtgttactccgtggtgaacaatcttttttattccttccttatcttagattctttcaggaacagttcgatattatacatcgggaagttctcgtccagcaatttgccgtcccgatccaacaatacgtaacggggaatgccattgaaatggaatagttccctcagatagttatagtcgctttgtggaaggcggaagatggtttcctctttcagatgcttttccacatagttttcgtaagctttttcaggtgagtcctgattactggtgacaaagataaacttgatatcgggactgttgcggtactcttttctcaaatcagcatgttgttcgatgctggcacggcaaggaccgcaagatgttgcccaaaagtcgataatcacaaattttcctagataaggtgctgtcagtttacggataatgtccgtaccttttcctgccggaagttcttgtggcttgttcccctgtacgggataaacctgacggtacatacgttcggcttctgctaccaggaatgggtcgtgcagatatcccttcagtgtgtccagcagggcaaaagccttcttctcgttctcaagtgttttggctaggaacggataggaacgtgtcaggataagttcgccgactaccgggaagggcattcctgttgtgtcctgcaatatctccttttttttcctccagctttctgcatatttctccatccgatcgtccgtcccattctttatttgccagcttgccgggagaaaagggttcataaattcaatgcggttgataaaggtggagaagttgttgcaaccgatgctgcggacatcattcaacggcattgctttcaggaagtcataatagtccggggtttcctttattttcaatatcgtgttggtcgtatctttacgggcatccatgtctctcatcaggataaactccaagagccaggcgccgtaatttatcatcacatcgttcttcagcatttgcatcgcttcgggttgtagtgttttcgattgctccagcgagtcgacccgatgcatccacaacttgtacatcggttcctgctgtgttttgaattcagagggtgtcagcgttttgcatgcattctgtatgatgtgatagtcttttgagaacagcggttcacaaggcatcagttcctgatttatgctgcttgaaggtcccatgtacagagtttctgtcaacataggtttcagtctcctctggcgtagatagtccagatggtcttcccaattgatataaagcatcagtgtctcgcccggcctgatatagaacgtcatccagttgttgcccatagagaggtgatgtactccgggataattgacgacgaagtccgattcaaagcgtccgtccggatggatggtgactacggcgggagtgccttcattagttatgtgattgtccgtataaatcagtacggtagtgaatcccagtttgggactgtagccatccaggaatccgcgtatgtgaaccgtgtctttccggaagaaggctgtttgtggggctgtggctgctgttgttgccgcataatttctttgtggacgcccggcacggatatacttattggcttttcccccgttttttccgatacataggttgccgtctttttcctgtgttatttcaagcaggcactgttcgcctgtttcgtcttttaagttcagtttgaatttttttccctgtttccggcaaagatcatatttccagaaacggttgtccataatggccagtgaatcataaattccgatatcccatccgttttgggcatcggcttgctgccagttgccgtgaatcttgcggagggaggcctgttctttggtttcctgaggtttcaccagcaagatgccgtaagtattggtttccgagttcaggttgtcgtccatccagtctatccgggtagtgccttcgggcaagggaggataggtgatgacacaatcgtcctctatgataccggaggcgggagtcgtcacctgttcgccaaatttacgtccctctatgcgcaggggatacagttgctttttgctttcgggagcgtaaatgtaagtcaggctgtctagactggtccaccattgcgggcggaacacagtccgtatcgtcagtcgggtttctgttggcgagagttctattttcgagatggtgtgtatacttccctgacgtgtttcgaaagggggattttcaatcactgtctgtgctgtgatgtagctgcttcccaaaagtagcagtaagaagagtagtttgcttttcatatacgtatcgttaaagttgagactgtaaagataaagatttgttggtaaaaaccttacggaacgttactttatctttgtccggaagatagattcttgtacttgggaaggcagggaataccagttgtgcaactggtgcatgacgagttgtgcaactggtagtgcccgagttgcacaactcgtatgctgccggatgggtaactcgtcgtactgatgttccgaaggagtggaacttgccttggcaagaaggcataataaaggtccggaccttcgcaggggcggacctcaggttatacaaaccacgctctccttgggggggagacgggtcatttactgaaaacaatcggattgattgtctaccttaaatacctattatgatagctttcttaactaacctttatcttattgtaatgctaagtggggctgtctctaatatccggtgtagtgcagccggcatcatggaagcattgtttaaggttggggaatgtgttaagctgtatgatacaaataaagcggatttaatttacttaaggaatagcagggagcttttattagttgacattataggttatttacaagtttttgggattgagccatacggtctcataccttggattttgaacattttctgtttattaagtgttaaatggaggcaataaaagataaaagagaatgtaatatgattgtaacaaggcgggatgaaactacttttgcaaattgagttttctaaagagggaacaatatatgagacctagacacaaaaactggctattactgggatgcttctccatcgtgtggactgcatctttggcacaaggagagaatcacaacgacagcctctcaccgattacgcatattcctgtgatagaggactctgcttctgtatccgtcactgctgattctgtcgcggtgaaacgtagtttcttcaagaaattcctggactacttcaatgatgccaacaaggagaagaagaacaaaaagtttgacttcagtgtgatcggtggcccgcattattccagtgacaccaaactcggactgggcttggtagccgccggactataccgtaccgaccgtgccgatacactgcttcctctctctactgtttcgctgtatggtgatgtgtccactgtcgggttctatctgctcggtgtacgcggaagtcatatatttccgaaagacaagtaccggctcaattataacctttatttctattctttccccagtctgtattggggcgtcggctaccggaatgcggtgaatgacgagaatgaaagcagttacaagcgctttcaggcacaggtaaaggttgactttatgttccggatggcaaaaaacttctatctggggcctatggcaagtttcgactatatcgatgggaggaattttgagaaacccgagctttggcaagggatggatgcccgcacctccaatgtcagtgcgggactttctctggtgtacgactcgagagatttcctgacgaatgcctataaaggatattacctgcgcatagaccagcgtttcagtccggcatttctggggaatgactacgctttcagtagtacggaactgaccaccagttactatcgccgggtgtggaaaggcggaatacttgccggacaattccataccctgctgacctacggcaatccgccttgggggctgatggctaccttgggaagttcgtactccatgcgtggctattatgatggccggtaccgcgataagaatgtggtggatatgcaggtggaactccgccagcacgtatggaaacggaacggagtagccgtctgggtgggagctggaaatgttttccccgacttttcctcattcaaagtgaaacatatacttcccaactatggctttggctatcggtgggagtttaagaagagagtaaatgtacgattggatttagggtttggaaaaggccagaccggatttatatttaatatcaatgaagctttttaatagtataaaaaaatggttcggtaatcaggagaatttgttctacctgttcctgtttgtgctgatagtgcccaacgttgtattgtgtttcaccgaacctttgccgcttgtagccaagattgccaatgtcctgttgccattggggtgttattatctgattatgaccctttccaggaattgtggaaagatgctctggattttattccttttcgtattcttcggggcctttcagatcgtgttgctctatctgttcgggcagtccatcattgcggtggatatgttcctgaacctggcgactaccaattcttccgaagccatggagttactcgacaacctgttgccggctttgattacgattgtgatcctgtacatcccggccctgatactggggatgatctccattgtccgtaagcgtacgctttctgtccgctttatccgcagggaacggagacgtgcgtgggttgtgctgggtgcaggtctggtatcgttgggagcggccttcctgttggataagaagtacgagatgacttccgatttatatccggtcaatgtgtgctataacgtagtgcttgccgtggagcggaatgcccggactctcgattatgaagagacttcgaaggatttcactttcaatgccgccgccacgcatccggcagaagaccgggaaatttacgtactggtagtgggagagacttcccgtgcgctcaattggtcgttgtacggttatgatcgtgagacaaatcccaaattgtcggaggtatccggcctgacggcttttacgaatgtgctgacccaatcgaatacaactcataagagtgttccgatgctcatgtctgccgtttcggcagagaatttcgattccatctatcatcagaaaggaattattaccgctttcaaagaagcaggtttcaagacagctttcttctccaatcagcgttacaacaactcttttatcgacttctttggaaaagaagccgatcactgtgacttcatcaaggaagattcgttgactgccggtcagaatctttcggatgattatctgctggcgttggtgcaagaggaacttgcgaaaggaaaccgcaaacagtttatcgtgttgcacacctacggatcacacttcaactatcgggaacgttatcctgccgaagctgcctttttccaacccgacagtcctgccgatgccgaatttaagtatcgggataatctgattaatgcctatgacaattccatccgttataccgacgatttcctgtcaagactgatcggcctgctgcagcaacaggatgccgggtcggctatgctctatacttcggatcatggagaagatatttttgacgaccatcgtcacctcttcctgcatgcgtctcccgtgccttcctactatcagttgcatgtaccgttcattgtctggacttcggacacctatcgggagaagtatcctgagcatatggacgctttacagaagaatcgtcacaaatctgttgcttcgaaccgggtggtgttccattcggtgctcgatctggccggggtgaccaccacctatgtaaacgattcattatcggtggccagtccgtcctatacagagttcccccgtttttacctgaacgaccacaacgagccgcgttcgtacgatgacatcgggttacgtaaagaggactttgagatgttcggaaagatggggatacgttgaaaatgccgggctaacgtgcaatccggcaaggagcaggattcactacaggtttgatttcgggagataccttgggatagataagtgtcagcatctcgaaactttgcttcctttcggtacttttgttgtgttttgtgttgaaagtaggagaataatatctatatttactgtcgattcatcacaacatgcaattatgacaatccaactactattggtgacgggagtaacagactgtctgtggctttatgtattatccctgcttttgtttctgaccgtttgcttcctgctctatcagaacttcctgcttcgtaagtcggcttcggctgatgacgactatcgtcgtttcctgtttgatattttagataatctcccgtttcctatcatggtgaaagatattcaggaacaattcaagtatacctactggaataaagaatccgagttacagtcgggcatcagccgcaaagatgccgtcggcttctccgatgtcgatatctttggtgaagaaagggggaagcagtaccggaagatagatgaggatcttgtcagggccggaataccttataaggcggaagagaggtatgttactgctgacggaaaagtgcacgatacacttgtgatgaagtcgatcatatcttcgggtaaattgggtaaatggctgttggtggcccgttgggaaatcacccagctgaaaatgtacgaaagagaactgctggctgccaaagagcagttggaaggagccgtacgtaagcaaaaactggctttgagaagcattgatttcggattgatttatatcgaccggaactatctggtgcaatgggaagagaccggtaatattaaaaatctggtttccggacgccattatactcccggcactgtttgctaccggactacggggcagggaacccaaccgtgcgggaaatgtgcttttcgggaggctatcggtaccggtaagatcgtgagacacatcacccatgtggatcatgtggactttgagatcaccgccacccccgtttatgatgatacgggaaacgaaattatcggcggactgctacgctttgaagatattactgagaaactgaaagtagaacgtatgttgcaggaagccaaagagaaggccgaagagtccaatcggctgaagtcggcgttccttgccaatatgagccatgaaatacgtacgccgctcaatgccatcatcggtttctccgatctgatttgccagacggacgatgttgaagagaaggaggagtatatccggattgtcacttccaacaatgagcttttactgcaattgatagatgatattctcgacctgtcgaaaatagaagcggggacaatggatttctcttatgccccgacggatatcaatgaactgatggaagacatctgtttacagatgcagcagaagaatcaacgcccggaggtgcagatcatgtttactgaaaaagaacccggttgcgtaattaataccgaccgtttgcgcttgtcacaggtcatcatgaatttgatgaacaatgcaatgaagttcacttccgaaggttccattactttgggctatcggctgaccaggcaaaaggacgaactttatttctttgtaaaggatacaggtatcggcatccctgccgatcaggcgggaaaggttttcgagcgttttgtcaaactgaatacttttgtcaaaggtaccggactgggacttgccatctgccgggtgattatcgaacggttgggaggaacgatcggagtggagactcgggaaggaaagggttcctgcttctggttccgtcttcctgtcagagaggatatgctgctcgaaagccctgtccgttgaatttgattcaccactctcttgaagtatttgccggatggacctgaaggtctgttttgatctggcccggtattgttgtcaaggatatgttcttgttttgtgaggagtatagccgggctatgtgacgaatacaaacggtggaacagaccgaaaggaaactcaaggcggaccgataaagctccaatgaaattttattcgggtaaaatctaaataggctcttaatttgtgctaaaatttgaacctaaaactcaggttggcgtgttgtttgtatacacttaatatagaggtttaaatatataaaaacatggcttatatagattattacaagattctcggagttgacaaaaatgcttctcaggatgatattaaaaaggctttccgtaaattggcccgtaaatatcatccggacctgaatcctaatgacccaagcgctaaggataagtttcaggagattaatgaagctaacgaagtattgagcgatccggagaaaaggaaaaagtacgacgaatacggcgaacattggaaacatgcggacgaattcgaagcgcagaagaaggcgcggcagcatgccggtggaggcggaggaggattctccggctttggcggagacggcggttcctattggtactcgtccgatggagaggggttctcgggtggtgatgccggaggattttcggacttctttgaatctatgttcggacatagaggaggaggcggacgaggcaatgcaggcttccgaggacaagattttaatgcagaattgcacctgtctcttcgcgatgcggcccggacccataaacaggtgttgaatgtgaatggcaaacaggttcgtattacgataccggccggtgtagccgacggacaggtgattaagttgaagggatacggaggcgaaggcatcaacggtggccctgcaggagacctgtatatcactttcaagatagccgaagactctgtattcaagcgtcttggagacgacctgtatgtggatgtggagatggatctttatactgccgtactgggtggtgagaaggtgatcgatacactggaaggtaaagtgaaactgaagataaagcccgaaacccagaatggaacgaaagtgcgcctgaaaggtaaaggttttcccgtttataaaaaagaaggacagtttggcgacttgatcatcacttattcagtcaagatacctaccaatctgacagataggcagaaagaactgttcagagagttacaacagagtatgaactaataatgaaagagcactatgcagaccgaattaataattgtcagtgaatactgtcacaaatgtcatattgagccttcatttatcgacctgttagaggaaggtggcttgattgaggtacgcaccgagggaggcgagcactatctgcttgcgtcgcaacttccggatgtggaacgatacagccgtatgtattatgacctgtccatcaatatggaaggtatcgatgccatccatcatttgctggaaaggatggaaatcatgcgaagggaaatcagttcgctccggaaccagcttattgtctttaagagagaaggcattatggaggattggtgaaaagattgtttcatgtgttgaaatactgaggtcccgatggtttcggccggagcctctatatcatataaacagagcctttatcaagggcggacagagtgtctgttccgccctgataaaggctctgtttttttatgcttgcctgtgcttattcagccaggatagtcagttcggcacccgaagcatagtcttgtccgcgttgttcgctcaaggcggtgaagcggatataacgggctttcacaggtttatcgaacattactttcttctctttcaggtctcttgcgaaagtacctttcaggataggttcaccccattctttaccgtccatacttacgtggatggtatagtctttcacattaccgttgctgctgtcctgacggggcaggtaagtgaaacctttgattgttttcacttcgccggcatccaggtctacccaatgcgggtgtttagccaccgttacagagaacatggtgtgccagatggtattcggatcaccgtctgtcaggttcttggcttcgcctccgtccgattcttcgctacttgcgtagattacttctgtctggatgctttcgatcttgtcgaatgtcatgcttgccttgatgaaaggtgcatctttgaaccaggcagtcaccgtaccgccattgcgtagtgcgatcggttcggtataagttttggatttactcttatctactgtataaaggataacggcgtcttttttctgtgatgatacagataccacaccggtacggttgcgggttatggacaacggcatctctccggcgggagctacattggctgttacagtcaggtctttacctgcggggcggataatgaaacctgtgttgtgatggttggcgaagacacggtcttgctccaacgggccgccttgaccgcagctgttaccacccaggccggttacggctgcatccaggtgaagataagtatcaccggctttcggtaactgatacggatgtgaagccagaatcaggtcgagtgcagagtaaggcagagccgaagccgacaaacggtcggtagctataaacacggcaccgttgcctgcattgttggtcagggcacaccagcgtacgtcttcgtgattacccatatcttgcggtttggggaagttgacgaactctccggcaaccgtattcttatgttgctcgatgaactgtcctactttacggtcggcgtagttgtcgataggaccgcgtccgtagtaagtaaagttggcatattgctgaggcacacgtaccatgtatcccagacgaggcaatacgagactcggctgattggaggtgatgcttgcttccagttcgatagaaccgtctttgtagactgtccatacctggttggtagtaaacttgaagtcactgctgccgaacttcttgtctgtcagttcctcaatcttgttcttgcccgagcttgttccacccagaatcttggctgcattaggagcctgagactgtactgtgaatgacaatacgactgtaccatcttctttggtagtcatattgaacccggtagctgaatgcttcaggttgtgcaaaccattatcaaaccactgagaatagaaccagttatcgttattggtgaaagcacggagcgcatccagcttcggaccgttgccgtcagtaatcaccttctcgtttccgtatgtcaggctgtagatagtacctgtcttgatatcgaactgagctgtgtaaccattgcctttgatggtaatgatatcgctcgctttagtcatcatcacttccggtttgtcgccctcggctgctacggtggcgatagaaggacgtgcggtagcctctttcacaagtatctgttcttctgcttgtgcgaagttcttgtcagcccaaggcatgttgtctttcagcaggaattgaatcttcacgaaatattccgaatcggctttcagcttactgaactgataaggaacagtgatctgcgtacgggtacgcggagctacttcgcctatgctcaataggcccgattgtgcttctttgccgttttcgtagagtgaccatttcacatcatagtccgaaaggttcttgaagtaatacttgttgaacacttcaaaccggcctttttctacatcgatagccttcacgtcgatgtgctggtatacctttttcacttcataatactgaggtttcggttccagatcgccgaatacgataccgttcataacgaattgaccgtcgttcggagtatcgccgaaatcaccgccataagccaggtagcgttcaccggttttcttgtcatagttgtacatcgattggtctacccagtcccagattgcgccgccgcagaagaagttggtcgattcgatagcttcccagtagtccaccaggttaccgcaggcgttacccatagagtgagcatattccgaaacgtggaacggatatttgatgtcatagttgcctttcacagcaccgcgcatccagccgatggaaggatactggttggaacccatatcgacgatatcgttgttacgttcatactgaacagggcgtgagaggtcgaatgctttcagtgcatcgtaagctgctacgaagttctttcccggtccggcttcgttgcctaatgaccagatgacaatcgaaggattgtttacgttggcatgaaccatttccatcacacgggctacatgggcgtttttccattctaccggatgagacagggaagcggctccgtaataatactcgtgagattcgatgttggcttcatcttccaggtagagtccgtatttgttgcacagatagtaccagtacggatcgtccggatagtgggagttacgtacgtgattgatgttggcacgtttcatcagcataacctctttctccatcatttcacgggtgatggcatgtcccacagccggatttgattcgtggcggttgacacctttcagttttacggttttgccgtttacgtaataatagcggcctgccagtccgaattcgtcagcagaagcaggagtatctttgatttccactttgcggaaacctacggtagtcgaaacggtttctattgttttgcctttcttgtctttcagttctgcaacgagtgtgtagaggtgggggaattcagccgaccatttgttgggggactgtacgttcatgatcgctttttccgcttctacggtttcgttcgggttcaccagattcacagtggccgaagcaacggcattggcaaccggagtgttttcatccgagtacagtttattagcatatagtgtatacgccatctggtatcctttggctgctttcttgccaaagttgcggatgtcggcgctgatggccaacgaaccgttggtgtatgtctcgtccaggtcggggattaccacgaggtcacgtacctgtactttcggagtagagtagagagctacggtacggaagatacccggtaagcggaacatatcctgtgcttcgaggaacgagccgtctgaactgcggtatacttcggcagcaacggtgttctttcctttttgcagatagggggtgatgttgaaactggccgtattgcgtgagttttttgagaaacctacgtactggccgttgatccagaggtagaagaaagagtccacaccgtcgaagttgataaatacttcacgaccgtcccaatcttgggggatgtcgaagtcgcgacggtaggaacccacttcgttacggtatttataagtagtccagttagtgggaggagtacgcatcacacctccgcgccagtcgtctactttcactttgtgcatgaaaatgacaggttggttcacatagataggtactccgtatttcaggctaccgtctttctggataccatagatattccagcttgaagggacgggaatgttgtcccagcccgaaacatcgaaagtagtctgataaaaatctttggggcgagaatccggatcgggtgcccaattgaatttccagtcaccattcagtgacaaccagtatttactgttctccggtaacactttgcgtgcgctttccacatcctggaaggaaaagaaccaggctcgtggttgttctttgttgagtgcaatgttctccggtgattcccattcattgcccaccggggctttttccgaggcatacttaaatccctctaaaggtcgttgaccggcaaagcagagcgtaaccatgctgcatagtatcagacctaacgtgattttccgcataattgtttttcttttaatagattatttactgaagtttttcgtgtcatattgagccgtaatccggtatctctttaattttgttgcaatattcgtaaaaaccagccacatagccaaatcatttgacattaattgggtattttcggaggataaaatgccttgttgccctcccgtaatgcaaaaagaaaagggatccggtcgtccgaatcccttttttagtattggagtaaactctttactttctgtagtaagccagatcgtctttatcgaatttgcggataaagttgatatgtttttctacttcagcttctgcatagcgtacatatacttgagccgattcagagaacagatcgctctttgaagcgtcctgtaccatcaggtgacccatgatgatgtgagcagccatttctacgaggcggcgtgcacagaagtcgagcagttcctgatcttttgcctctgtgatttgagtcacacaagccgcgtatttgcttgccatgcttttcagacggttctgtaagccttccagttcgggagctaccggcatattctcgtattcctggatacgggccaggtaagcgccggtcgttacataacggatggcggccacaacctgcaactgagtggtaccctcgtaaatggaagtgatacgtgaatcacggtagatacgttcgcaggcataatctttcataaagcccgaaccgccgtgaatctgaatacagtcgtaagcgttctggttggcaaactcactgcccatgcctttgcccagcggggtgaaggcgtcagccagtttagcgaatgttttctgttcggcacgttcttccggagtcagtttgcgctccttggcaatgtcgtccagtgctttgtaaacgtctacgaaacgggctgtctcgtacaacagtgaacgggaagcatccagtttggctttcatcagagaaagtatttcggccacggcggggaattcgatgattgccttaccgaactgtttacgatctttggcataagccagagcttcattgtaagcagcctgtgacaatcctaccgactgagcggcaatacccaagcgggcaccgttcatcaacgccattacatatttgatcagacccagtttgcggtcaccgcaaagttcggccttggcatttttatataccaactcgcaggtaggagagcctttgatacccattttgttctcaatacggcgtacgtttactccaccattgcgcttgtcgtagatgaacatggaaagaccgcgtccgtcgtgtgttccttcttccgaacgtgccagtacgaggtgaatatcggcatcaccgtttgtgatgaagcgtttcactccgttcagataccagcattggtctttttcactgtaagtggctttcaacatgacagactggagatcggaacctgcatccggttccgtcaggtccattgacatggtttcaccctggcatacgcgggtgatataacgttgcttctgttcttcgttggcaaattcgtaaatggtttcagcacaatcctgcaatccccacaggttctcgaaaccggcatcactgcggctcacgatatcggcagccatgatgtacggagtgatcgggaagttcaagcctccaaagcggcggggcatagccatgcccatcagccctgctttgcggcaggcatccaggttacgggtagtcccgctggcataggtcacacgattgtcggcgcagaccgggccttcatgatcgacaccttctgcattgggagcgatgatgtcaccacagatttctcctacaatttccagcactttgtcgtagctgtccattgcgtcttcgaagtctaccggagcatagtcgaatttatctttatcagcatagttgcgctctttcagctcaacaattctcttcatcaacggatggttcaagtgatgcttgagttccggagtatctaaataaaagttagccatttcttacttactgttttgtttataatacttaatcatcttcggtacaacttcttcgatggttccgttgattacatagtctgcaatcgtattgatcggagctgacggatcgttgttgatagagatgatgataccgctttcctgcataccggcgatgtgctgaatctgtccggagataccgcaggcaatatagagtttgggacgtaccgtaacaccggtctgtccgatctggcggtcgtgctcaacgaaacctgcgtctacggctgcacggctggcacctacttctgcgtttaatacctttgcaagatcaaacagcaagttgaagttttctttcgaacctacaccataaccaccggcgatgatgatgggagaacccttcaggttgttctttgctttttctacatgacgttcgatgactttcactacgtaatcggtgtcggctacatatttcttcacatcatgatggattacttcacctttgtagtctgctgccagaatggcttttttcatcactccttcgcgaacggttgccatttgaggacggtgttcggggttgacaatggtagcaacgatgttgccaccgaatgcaggacgaatctgataaagcaggttcttgtagaccttgccttctttcttatcttcgtgatcgcctatttccaatgatgtacagtcggctgtcagaccactggtcagggctgaggatacgcgcggaccgagatcacgaccgataacggttgcacccatcaggcagatttgcggttgttcttctttgaacagattgaccaggattgaagtgtgggggagtgaagtataaggatagagtccttcaccgtcgaatacatggagtttgtctactccgtacgggaggatctgtttttcaatatctttaagtccggttccggcaacgactgcttcgagctggcaacccaactgattggctaacgagcgtccttttgtcagaagttcgaggcttacgtctgcgacgatgccgtcttctatttcgcaatatacaaataagttattcatatcttttctctcctcttatccaatagtgtggttctccaacagttcaacaatcagttcttccacttcacggtcgctgccgctgatggttttactctctttcgcttggaacacgatgttctggatcgcttttacctttgtcggcgaaccgctgaggccgcattgtttcagatcaccgtttacgtctgctacgctccattccaccagattcaggtagtcacgggtgtcgtacaggtcggtgtagtccaggttaccctgttgcttctcggtaatggttttggcgtgtttgtacttctgaaccagtttagcattgcgcgggcggcagggagctgcacttccgttgacagtgataacgatgggcaagggtccttctactgtttccacaccgccatcgatgtggcgttttacggtgatgcttccgtcacctactttcaggatctcttccgcatacgtaatctgagtcagtcccagcttttctgcaacctgcggtcctacctgtgccgtatctccatcgatagcctgacgaccgccgatgatgatgtcatattcacctattttcttgatggctgttgccagagcgtacgaagtagccagcgtatcagcaccggcaaaagcacggtctgtcagcaaataaccgttatcggcaccacggaaaagtccttcacgaataatgtcagctgcacgtcccggtcccatggtcaggatggtaacggtagagcctgggtgagcatctttcagtcggagagcctgttctagagcattcaggtcttcggggttgaagatggcagggagtgccgcacggttaatagttccgtcggctttcatggcatctttcccaacgtttcgtgtgtcgggaacttgttttgccaatacaacaattttcaaactcatgttattaattttagtattagtatttctacaagttagcagccagtagtcagtagtaaggttcttgctattcactatccggttaactatcagcctgcaaatttaagcaaacgcttggttctgacaagaaatctatctgaaaaatgcacaagtttaaggattctgagcaacttgtcggactcttacgatcatgaatacagggttatcgtcaactttcagatcttttaattcgggaatgttttattgataaaatcttcgttgtcggagtaggtcagtagctttcttgcccgccggtacgatctttcttataaggtatctattgaaaaaagagggaaagagtagaatattggaggtatgcctcagatttatgaaaacttccggcatacctccggaataatgttgttattggattcctatttctgcaaatcccatagtttctccttcagttaccattttggtcggtttcagagagaggtatcgtgctttcaccggagtgaagtagacggactgtagaatcggattgtttttaatattagagaattctccttgggctactatccggtttaccgcatttgcttcggtacccacagatagttcataagaggaaatcaatcctttgttgtattcactctgatccggcagataatggaaagaggtgatggtacgttcttctcccagatcgatcaccaatgcatctccctcgacaaaagcagtggtgttcttgtctttatccatgcattttttagtttcttcttcgggcactccgacaagtgtaaacggataacttttcagttcttttgcttccacggtgaatgtgtcggctgtttcacctgcataataggcctctatattattgatacaaaggcaggcacgtgcatcagtgaaacgtatgcggagtttatcggtcgaaacggtttcaaagcgcaataaacgtttgtagcccacggtggtagtctcttcattgagtttgaccggaagccatttcccgtctttatcatattccacgatgaacgatttgacacgttgtcccaacgggatatattcctggatcatcatacggttgaccttctctgttttcggaaagtcgaactctatatctgcggcagtcacaccgtcattggtagcccagtaagtatcccagctttcgtctgttgcggctttggcagagaattgtcctcctcgttcatccgaggctttgggacggatgccggcaagcagattgtgtgccaactgcttttgtacattcttgtggaagtttactgcattggccgaatcgatcgggtggatcagaccgtcgcggtcaacggggaagttaagcaggagggtggcgttgtgtcccacgctccggtaataaaggtccgttaattgctctacggtttttacccggtcgtcttcttccggatgatagaaccatcccggacggatggagacgtcacattctgccggtacccattggttgccgtcggcatgtccgtattgcagttcgcgatatttcggataacccggatacacttcacctgcacgcaggaatgaccagttggtggctccggcaaatccgttttcattacccacccaacggcaaccgggacctccgtcggagaagacgatagcttgtggctgaagcttgtccagtatttcgtaaattcgcggataattgtagtaggtcttacgatcaatagtacggctgtctttggctccgccataccatccgtcacctccgttggccccgtcaaaccatacttcgaatacttcaccatagttggtcatcaattcagtcagttgtttatggaagtaatctacgtattccggtgtgccgtaattggcctggtgcctgtcccatggagagaggtaaacagcgaacttgatgccatatttcttacaagcggcagccagctcgccgacgatgtccccttttccgtctttataaggagtattgcggatgcaatactccgtcaattgggtgggccacaggcagaaaccgtcatgatgcttggcggtgaggatcacacccttcatgcctgattcgacaaacgttttcacccattgttcacagtccagtttggttggattgaacgttttcggttccgaatcgccgtatccccattcccggtcgttgaaggtgttcagaccaaagtgaacgaaagcatacgtttccattttctgccagtctacttgtttctcttcgggaacgggtaagatggcttcgggagctttcacagttggagcgcaggcgccaagtagggtcagggcggctccggcatacagtagtttgtttattttcatgatatgttaaaagggttaatggtgcaaagataaaaaaatccccggaaactcgttccggggactaactaaaaagcaattattcccatcccggattttgcgggagaaggttatcatttctctgaagttccccggtcggtatcggacgcaagtagagtctgtcattccaggtgcggctcttgccggcttcataagagtagttatcattggtataagcaggatatacaatcgcgtattggccttctttataaggctcacgttttccgatgtatgtcttcacgttgttacagattgcaccggctttccaacgggccaggtcgtcccaacggaatccctctccggccagctcgatacggcgttcgcggcgaatctcttgtaacagcggagtcaggctgtatccccatgccggccagttgggatcggtgaaaccaacttccagtgtcaggtgcggcatgcccgcccggtcacgcaatacgttgatggttttgttcagatccgcttgcgtaatcgttcccagctcggctttagcctctgcgtttatcagcaaggtttctgcataacgataggcaatgccgtcataagtattattgtttgcttcgaaagctttgtctgtcggtatgaagtatttgatggatttatatccggtcaggcagtattgtgaaatgaagtcttcttctttctcgatgtatgtactgtcattggtggctacagttactcgtgtcggaaagtcccaagtcagaatggtttgcttcaggcgcggatcgcggtcggtcgtttcatccttcatattggtatcccctttatactggtcgtttcctgtaatgggtttaccatttaggcacagatagctttctacaaaatcttttgagaaacctgtgtttgcttctgccagcgtacggctcatgccatgttttcttttaccatccagataggtgaccgggagaatggcctctttcagattcgttttgtcttccatcacaaatacgtcataatagtctttttccggatgtccggtgttatagatttcgtatttaccggttgccatgattgcatctgtttcatcagcagccattttcagcaggcggtcagctttgtctgcccatcccaattcggtatgatacttatagtatgtaccttcgtgcaggcaagttctggctttcagttggcgtgctacatctttccctatacgtccggtagccggtttttcgggcaaccattggatggcaaaatcaaactcttcaatgattttatccatcacttcataacgttttagtttcggaccgtaaagaatatccgtgtcgcctgtacccagatctttatccaaccaggggatatcgccgaatgttctcatcagtccggcatattgcattgccttaaagaagcggacttctgctacatactggttgatttccgactccttaccgcttacggtctgatagtgagtcaggaaatagttgactagccggatcggttgccatccgcctttactccaattacaccaactagctgcttccgcaggggtgctcaactgattccagaagaactgaggaatactgttgggcacctgattgtcactttcaccgtctgctatcgaggttacacctccgggcagataactgtagaattgattggcatacgtttctaagtctcctgtggtattccagaaggttttgtcattgatcgcttccggggctctttccaggaaaccgtcattacaacccgatagggcgagtgttgccactccgatgtagaatagatatttgattttcataagatgctttgtatttagaatgtgagacttaaaccaacagataatgatctttgcatcggatatgtgtatgggttatccaattccggatcgagtccgtcgggggtatctgaaatagtgaaaaggttttcaccggtgaaatagatacgtatcttttcgatagaagccttttgagtcagtactttaggcaatgtataaccgatgctgactgacttcagtcggcagtaagatgcatctaccatatagcgtgtctgggcttggttgatggcagaaccaccattgaaacgcgcacgggggaaatatgctcccgtattttcttctgtccagtaatcgttgttgtaggctgaaggtacttgccattcgcttccgtagtggcttcggaatgaagttcccggtagatagaggtcacgtttgcccactccctggaagaagatacctaggtcgaaacctttccagtcggctcccaggttgatgccgtaatgatagcgcggagtgctgttgccgatgattttcttatcacccggattatctacggtgttgtcaccccagtcgataacgccgtcgttgttacggtctacaaaacggatgtcaccgggcatcagtttgatacctcccgatactttgtcctgattggctgctccggctatttcctgttcggactggaataaaccataggtttcatacccccagatctcaccctgtttctgacctacataccagttgcccaattctttcgattcgttatcgaacttggtaacttccgattgatagtcggacagattgaacccaactgtatagtggaatccgttggccagctgatcattccagctgatctcaaattcccaaccctttgtcaatgactcggctgcattttcctgaggttcgttcgcacccagaacgcccggtagaattttacctgcggcaagaatatcggacgtacgtctttgatagtaatcgaaagcacctttcaatcggctgttcaggaagttgaagtcaagtcccaggtcccactgtgtaacggtttcccaagtgatggacgagctgacgaggccgccgggaaccacatactgtggttggttgctgcccatgatccagctgatctgtcccgtactatagttagaaagataagcataccagccattattgagtgcctggttgcctaggctaccataagatcctctgattttcagttcgttgaagaaactgtttgtccagctcttgaaccaactttcgttagagagtctccaagctgcagagaacgaagggttgaatacggcacggtcgtgcttgggaaatttggaagagaggtcgtaacggccgtttacttccagtaaatagcgctcgtcatatccgtagttgatgcggaagaaaccgcttcgtgtagcccaggagttatcactgctgcctacccagcggtctcctgtagcataacttaaagatcccagatcgtttgagatcagctgttcgcgtccggcattgaatccggtagtatgtttgctttcctgattataaccgatcattcctttcaggtaatgtttacccaatgttttttcgtaatcaccgaagaagttgaaagcattgtatgtatcgttggcttgtgattgtgacacagaattcggattcgtccatgcaaaagtttgcagaaattgtccattggctccatattcgtcaaatgacttcatgtgaaccttattgttttcactgtagtaattgaacgtgtagtccatgttgatgctcattcctttgattggggtcagtttcatcgtgatcgtgttccaaaggtcattcttgttggtgagccggctaccgccatcttcaaggatagcaggaaaattggtaaaatcaccttgtcctgcccagttgccgtccggatgtttcaccggcatgataggacgggtatcacctcccataaagttatcaccatgtacattgtcctgattcagtcctctcagtttggtgcggttaaaacttgtcttcatcgagaggtgtaaccagtcgttcacgtcataattgatgttgttcatcacattgaacttcttgaactgttcgttaccgaaacgaatcagtgatccctggtcggtatatcctaaggatgtgtagtaagttgccttctttccacctccgctgatattgacattatacttctggacgggatagttctttttatacaattctttcatccagtttgtattgccggcatacgtgtatttggtgccgtttttactgatactcgggtccgaatggataaataccggagaattgttcaccggatctttatagtaggcttcgatatgctgcatccactcagcatcgaaatagtcgcgtcccacggtgttctgttgcgcagtgttcatccaggtagcatattgcatggagttcatatatgttgggcgggtagtaggcccgttgaatgaaaccgatgcatcgaacgatacttgtgtcggctggtctttacggcctcctttggtggtaatcaatacgacaccataagctgcacgtgcaccatagatggaagcagacgcggcatctttcaatacggaaacacttttcacgtcttgcgggttaatcaggttcgggtccatttctacaccgtcaaccaataccaatggtgaacttccactcatggcagtagtaccacggatattgaaacttgaaccttgcccgggccgtccgctggtggttacatttaagttaggaatggcaccttgcaaaccttgtccgaggttgacaatcgggcgatcttccaacactttaccatctacggccgacactgctccggtcaggttggctttttttacggtggcataaccgactaccactacttcttccaaagccttgctgtcttcggcaagtttcacttgaataggttttcctgtataaggtatttcttgtgtaacgtatccgatgtaagatattacaataatatctccttttttcacatcattcagcgagaacttaccttctaagtccgtaatgacaccattggtcgtgccttttaccatgacactggcaccaataaccggacccaatgcatctttaactgttcctgtcactttctcttgagtaacttcaggaaccaatacttctgttgcttgcgttgcatacgaataagctgggaagcttaatgcaccggcgagcaagagcagagtaacttgtctagtgatttttaacataacaattttgttttgggttaataataaaggttttgtttggttcttttacattcttcctttcttgttgattatcctttcttatttctttaaaaatggattagttctggcagaacttggtgaaatgtaattcccttattatcaccggatatatatactttatcactgctctgtatttataatgaaggactttataggcagggagtaagagatggaaatagcctgttgttctactgattggtttagcattgtgtttggtatttagtgttttatgacaaaaacagaaatttctgaagtcctctctgtctaccctttgtacttggttcagtgtacttctcttgattggtttccggaaggagtaagaagagaaaggaatattgccttggaatgaaaaaaacttttgggattattatctatttttaaaataatcgctatatttgcaacgttgttaatctaaaaaacaaaaaatattctgttcttttttaatacattataaaatctatttctttaaaatcaattagtttggttatagttctgccaggaataatctgctttatgtcatttgatttgtacttaatgtgttgtaatataatgatctatgaatttaagtctaatgtgaatcagggtttgttgcgtaagagagacgttataggcttattgaagaatgaagagataatttcgaataaaatattcaatatttttataaacgaagagctggatttattatattaattttatctatatctttctttttgtaggcgttacttcttcctctgttctcttatctgtgctgtttttgtcagacgtttgtctggtattagctacttggtggtgagttcgcttcttaagattgtgactgcttggatggataaataaatgatagattggatagcatgctataaacttatcccgaaaacgaagtagaaccggttctcgtaagggtttgctatcagtttgccaaagatggccggagtaaatccggaggaaatattcaaggtcttggtagccgaaagtccgacattaactacattcagtttgtctgcgtattctccttcccacggagtgaatcctgcttcgacggccaagtctaccccctttactgtgaatgggtaactgaattcacaataactggaccaggcacgctcctcattttcccgatagtcatttccggcaaaggtggtgtaccagcctatggataaagggaaacgttcactgactgtgtagacggctcctgcctcaaaagtatgtcccgtagttcggggagtatagtgaaagtatttgaaaggctcgtcttcgctttgatagaaatagttgttgagacacagttgcagatttttatattcgtattccagtgtaaggtctatttcattgttttcatttctgaattctgtcgatccccatgctgataaggtccatcctttccactctacacccaaagtgggttgtacggaagcatttccattcttcattccacgccagatgtagctgctgacaaggtctgcattgataaaaacttcttgtgcctgtgttgcaaccgaacagatggtcaggactgcaagtatccatattttcttcatattgctgataggtatctttttcgggctgcaaagatagataattactgttaaaatccctctgttcgttgattctatttcctttgcaggcgactttatcgtcaaaagagccctcttggtcgacttcttttgcaggggtaggacaaaggaggtatttttgtaaacagacattcaagacgaactttttggagtatgaaacaaattaataagcagaagttactggagcagatggtttatctcgtcatttggctgacggttatctctgtgccgttggtgggtgattatctgtttgcttccattagcccggtacatacgtttagttggcagaccatacggatggcatggttgctgactctgcctttcattctgcttttcgtagtcaataactattttctggctccccggctgttacttcggaaacggtattgggcttatgcactttcattagcaggagtcgtgactctgctttttattttgtatccttctatcaatcctcctcaacataaacaatttcagaatctgatgccgatgcaaccccgccgctatccggaaggaaaggtgttaccggatagggagagggagtttcccaatacatttccggagcattcgtcaccgctccttttgccgaaacaggagcttgatatgcgctggcggggcccgcatcctcttccgggatattttctcggacgactttcactggcattacttgtggtaggcattaatgtggctatcaaactcttgttcaagtcgatgcgtgatgaagaagcattgaaagagttggaacaccagcatttgcaatcggagttgcagtatctgaagtatcagataaatccgcatttttttatgaatacccttaataacatacatgcgttggtcgatatggatgccggcaaggcaaaacgtactattgtcgaactttccaaactgatgcgttatgtgctttatgaagccagcaaccggacgattttgctttcacgcgagatacagtttttggacaattatattgccttgatgaaattgaggtataccgggagagtccggatcgaatgctgtatgcccgatgaggtgccggaggtgcaaattcctcctttgctttttatctcttttgtcgagaatgccttcaaacatggagtaagttatcaggaagagtcgtttatccgggtttttatgtctgtcgaggatggcagacttgcctttcgttgttcgaacagcaatcacgggcgatctgtggaacaacaccacggcatcgggttggagaatatccgcaagcggctgaggttgctattcggacaagattatactttatctatcaacgaacgtgacgatagttttaatgttttactaattattccgttattatgatcaaatgcattgctgttgatgacgagcccttggcgctcgagcaattgacgggctatatagcccgtgtccctttcctgcaactgatagcctcgtgccaggatgcattcagtgccatgcaggtgttgtcggaagaagaggtcgacctgatgtttgtcgatattcacatgcccgatctgaacgggctcgatctggtgcgttcgttagtggtgaaacccctgattgtgtttacaaccgcctatccggaatatgccgtcgaggggttcaaggtagatgcagtcgactatctgctgaagccatttgaatttcaggatctgctgaaagcagccgataaggcacgtcggcaatttgagtatcatttgcaagataacgggggagggacggaaactgatttattggaaaaggacggttcattgttcgttaagtccgaatataagattatccgcatcaatgtggcagacatttgctatatagaaggtatgagtgagtatgtacgcatctataccgatacggcggataagcccgtagtgactttgctgagtatgagaaagctggaagaacgcttaccacaggagatgttcatgagggtacatcggtcttatatcgtcaatcttcggaaaataaccgaagtttcccggttacgcatcattttcaataagaatatatatataccggtgggagataactataaggaaagattcacagaatatattaacaagatttgtgtcagcagttaatgaccggatgttagggtggtgaagttctttttgagcatgtgccggaagtttatcacagatgaacagattgtatagggcagtacagggatttcggttgcctgtaagtgtatatccttataaatctgttcatctgtggtgaaagagactttaagacctgttgttgtcttagtcttgcaatgttttacttaattcccagtttctttgcgatatccttgggaagggcatctttgtgaaccagaatattcatagtcttgtaagcaacaaaagctttagaagcataccaagtacctttgtacttgttgtttgtaccccaagagttcttaaccatgaagtattctttgccgttctggtctttagcgataccatagataatcattccatggtcatcagttgtttcccaattatcgaaagctgtctgacgcatttcctgagtgattttcatttccggcaatggttttgaagtcaactctttgcgtttgtcggcagcagtcattcctgtccagcgtgccatgtccgatcctgtcagttcggcacctttggctgcatccggaactacagcgataccgtcacgggtaaatccttcttcgctcacgtcgctaccccatgcaaatgtatatccgttctttacagcgttatccattacagccataaattcgtcgagcggcaggttgtatgacaatccgttacgccagttgtcctggatttcgatggcaaactgagaatagaacgggtgatgtgtgtacgaagtcagagatacatagtcgtccggattaagtcccaaagactgtgcaaaagtcatcggagtatactctttgcctttgtaagtgaacttttccgggcattgtcccaggtaagtatcataaatagcgcaaaggcccttcttccataccggagtcagtttcttcagattacctttggcaatagcattaacataggctcctgctgttgcatccagttcgttgtgaacaggcagtgagtcaccatacatgattcccggcatagcatcctgcggtacaagtccgtagttcttcatacagaacatgatatcatagaaacttcctcccggagagaaagaactgtcgccatgatagcgaacgtagttaacagcgcggtcaaccatcgtgtggtgtacaacgaacatttcagaaagatcgtattcaccctttcctgtgcggagcaattccgattcgagaaaaccgaggcttgagaagctccagcaagtgctcgaacggttctgattcttaatggatgtaatcgggttttctttcacagtagtgaaaacgaagccttcttcttgtggtttgtcttgggccaatgcactcagactgatcaggcctaaagcggccaggaggattgtctttttcattattatgtcgtttttattaatatttatgcgacaaagatagctgaatatccccaaatatggaaatgaacgtctatctttactgctatattttagcgttttattctcgttgtcgcagcattgtttctatattctttgggcgaaactcccacatattgtttaaaatatttgccaaagaaagactgtgtcggaaaattcagttggtctgctatctcttttatgctcagatcagattcctccaataattgtttcgcttcggttatcaccatccgtacgatccattgcaaggcactatctcctgttttctccttgatgatggccgagaaataacggggagtgatatgctgcatccttgcataaaaagagacgtcacgttccttgcgatagaaacggaacagagacagcatgaaattctgaaagacaacatcttttttcccttgttgtaaaggctgcaagggctggttggtaaaatacatgtttaagatttcatagcagatagtctgtcccatcgattttatcagttccagtttcagatgctggtactggacattctccttctggcagtcttccgcatttatcctatcccatagattattcagcaaatattcaaaatgggcacattgttcaccggacaaggagacacatggatttttccgcataaagagctggctttccacatttatcactttgtttacaatcggtagaatatagtaaaagtccacttcaaccataatcccctcggcatcttcactcttatgcaacaagtgcaccaaggtagaagccatatagatataaacatccccgggtttgatatgataatggcaaccttccaaagagacttccacactgccgcgttgacaatagaagataccacatttattgaatgtcgaaattatttgtccctctttaagtatttgaaacgtatcactggtaagcagaattctccgaaaaggcatttgttgttctatcattcttctgttcttaaattataaaccggctacaaaataaatacaaatcgcaaagtttttacctgtatacagactgaaaaagatacaaatagaacaatttatcattcatttcaacctttctatctcctcccttcccaataactttgcatatgaaatacaaaagtacgcaaattatgaaacagatttatcttattctgacagggatttttcttatgctgtttatttcctgtgcccggcacaccaaggaaaataaagattgtcaaacagtaaaaatagacacagtcattgctgctgataaacagaaatttctacaatttccggggagagtaaaagccgctcaggacattagtctttcttttcgggtaagtggcactatcaataaaatatacgtgaaagacggggcgcaggtacgagcggggcagctcctggccgaattggatccgactgactatcaggtacaactggacgctacggaagctgaataccgtcaggtaaaggccgaagcggaaagggtcatggctctctataaagagaacggaaccacacccaatgccaatgacaaggctgtctatggactgaaacaaatcacagccaaatataaacatcatcaagatcagttggcatatacccgcctttatgctcctttcagcggatatgtacaaaaacgtttgttcgaagcccatgagaccataggagccggcatgcctgtcatctcgatggtaagtgcaggtgcacccgaggtggaaatcaacttgccggcagctgaatatatccggcgtaaccggttcaaccgctatcactgtacattcgatatttatccgggagaaacctacccgttacaactgatcagtgtcactcctaaagcaaatgctaatcagttgtataccatgcgacttcagctaatacccggaaaacaggctgttccttctcccggaatgaatgccatggtgactatcttttgcgatacagatcgctccggtacgttatccgtccctaccagtgccatcttgcagaaagacggaaagtcgtatgtctttatctacaatgcatcagaccataccgtatacaattgtgaagtatctgtattgcggttgaccaatgacgggtacagccttatttcttctgacggactgcaacccggagacaaaatcgtatcttcaggagtacatcatatagaaaacggggaaaccgtaagaactctgcctgaaatcactcacacaaatataggaggactgttataatggatataagtaaatgggcattccataatcgtaacctgatttatttcctgatagccgtcctgatgttcggaggagcttattcctgctatcagatgagtaaactggaggatccggaaataaaggtaaaacttgccatggtggtcaccacatatcccggggcttcggcacatcaggtagagttggaggtgaccgatgtactggaaaagaacatccgcaccatgggaaatatagataatatagaaagttattcttataatgatctgtcacttatacagattgaacttctgagcaccgtgccggatgatgatgtggagcaatgctgggatatgctgcgtcgcaaagtcaatgatgcccgggcttcactgcccgaaggagtcagtgctcccattgtaaaagacgacttcgggaatgtgtacggtatgttttacgctttgaccggtgatggtttgtctgatcgtgagttgtcggactatgccgaactgattaagcgtgaagtcggcgaactggaaggggtagaccggatagatctgtatggaaagcgtccggagtgcatcaacatctctttgttgcaggatcgtatggcaaatttgggtgtaaagcctgctgaagttcttgctaccctgaacggtcaaaacaagactacctataccggctattatgacaatggtgacaatcggatccgtgtgactgtcaatgataaattcaagacggtagaagatataggcaaaatgcttattcaaggacatgatgacgaccaactgcgtctgagcgacatcgcacaaatagagaaaggctatgaagagccggtccgtaacgaaatgtactatgacggtgagcgtgcactgggcattctgatagccgctaccagtggttcggacatcgtgaaagtggggcatgccgtagaggccagactggctgaactcaaggccgaacgtctgcctgccggagtcgaatatcaaaaggtattctaccaaccggagcgtgtgggcgagtcattgggtacatttgtcatcaacctgatagagtcagtcatcatcgtagtgcttatcctgatgattgccatgggatttaagagcggggttatcataggcatcagcctggtggttactgttttcggttcattcttgtttctttattccgcagggggaaccatgcaacgtgtatccctggctgcctttgtgttggctatggggatgctggtcgataatgccattgtcattatcgatgggatattggtagatctgaaagccgggaaggaccggatggaggcaatgaccgccataggacggcagactgccatgccgttgctgggagctacactgatcgccatcatcgctttcttgccgatttatatgtcaccggatacggcaggtgtctatacgcgcgatctttttatcgtacttgccgtttctttgctgctcagctgggtgttggcgttggttcatgtaccgttgatggctaaccgtcgtctgcattttgccgtagaagccgatagtggtggcaaacgggtttacaaggggaagatttatgccgcattacgtacggcacttcgtttcggattggcacaccggtggagttttgtctttaccatggtcggtttgctggctctttctgtttttggctatcagtacatgcggcagggtttcttccccgatatggtttacgatcagctctacatggaatataaactccccgaagggaacaactatacccgcgtagaacaggatctgaaagagatagaagcttacttgaaagggcgtaaggaaatcacccatgtcacagcttccatcggtggtactcccgggcggtacaatctggtgagaagtgtagctaacccgtcactctcttatggagaactgatcatcgacttcacctctcccgaggagttagtagacaatatggatgaaattcagcactatctgtcggcgacttatccggatgcttacatcaaactgaagcgctataacctgatgttcaagaaataccccattgaagcacaatttctgggacccgatcctgctgttcttcaccaattggccgacagtgcacgcaacatcatgaagaatactcccgaagtatgtcttatcactaccgattgggagcctcaaatacctgtcctgaccattgaatatgaccaacctgccgcacgcgcactgggtttgagccgcagtgatgtcagtatgtctttattgactgctgccggtggcattcctatcggatctttttatgaaggcatacataagaacaatatctatctgaaatgcctggataaggaaggacaaccgatagaggacttgggcaatacacaagtcttttctgccttaccatccctgagcgggttgttgaacgaggagaccatggtcaagttgaagactggtactctttctaaagaagacctggtagaaagtatgatggggagcaccccgttgcagcaaatcagcaaaggaatcgatattcgttgggaggaccctgtagtgccccgttacaatggacaacgcagtcagcgtgtacaatgttcgcctgctccgggcattgaaacggagaaggcacgactgaccattgcggataagatagagcagatacgcttgcccgacgggtattcattggtgtggcaaggtgaaaagatagccagcgaccaatccatgaagtatttgttcaagaacttccccttagcgataatcctgatgatcgctattctgattatgttgttcaaggattaccgtaaacccattattatcttctgttgcctgccgatgatattcgtaggggtagtggccgtgatgctgcttaccggaaaggttttcaactttgtagccattgtgggaacactgggactgattggtatgttgattaagaacggcattgtgctgatggatgaaatcaccttgcagattaatgccggtatagaaccggtcaccgcgttgatagacagttcgcaaagccgtctccgtcccgtaatgatggcatcgctcaccactattctggggatgattccattgctgtccgacgctatgttcggttcactggcagcagccattatgggagggttgctatgcagtacacttatcacactgctttttatacccatattatatgctttattcttcaagataagaaacgactgattaaaaaacgagaactgatgaaaaagataattatactttctctttgctttatgttgtcgggcttctgtgctccggcattcgcacaggagacactcagcctgcaagagtgtcgcgaaatggcattgaaatacaataaagaaatggcggcttccattaaacagacggaaagcacccactacacagccaaaagttacaaagggaacttcttccccaattttacagccagcggtaccggactttacagtaatgccgacggaagttacgggatagccggtggcaatctgcccactttcctgcccgatgcgaccggacaactcatacctaatggcggctttgcctattttccgggtatcaacctggattataagataggatgggtctatatgggagggatacagttggaacagccgctttatatggggggcaaaatcactgctgcctacaagatgtcggtactgggaaaacagatggcgcagatgaatgaaaccctgactgctaccgaagtgattctgaaaaccgatcaggcttatgctcttgtcgtgaaagccaaagagatgaaggtagtagccgatgcctatcatacggtacttaccgagctgaagaagaatgtagaaagtgcatacaaacacggtctgaaaccacaaaacgatgtattgaaggtacaggtcaggctgaacgagagcgagctggctgttcgtaaggcggagaatgcgtttcggctggctaccatgaacttgtgtcatctcattggaaagccattgactgccgacatccatgtttccggtaactttccggagatagagcagggattggaaattcaggtattggatatcactgcccgtcctgaatatactattctggataaacaagttgccatagccaaacagcaggtgaaactgaaccgcagtgaattgttgcccaaagtcggtatcaaaggttcttacgattatgtacatggtttggaattgaatgacaagaatttcctggacaatgccagtttttccgtcctgctcaatgtcagcataccgcttttccatttcggtgaacgaagcaacaaagtgcgtgcagccaaggccaagctggaacagacccgcctgcaacagcaaagtctgaacgagcagatgttgctggaactaacccaggcggccaataatcttgatgaggcgaaactggaaagcgagcttgccgaccgttctctccaacaggccgaggaaaacaggcgtgtcagcaaaagccaatatgaagtgggattggaaaccctttccgaccatctggagggacaagccttatggcaacaggcatacgaaacgaaagtgaatgcacatttccagctttatctgaattatgtggcttatttgaaagcggcaggtatattatataataagattaatttataaaaacttaaaccgatgaaaaagaatctttattggatggcagcagcattcatcactttaactgctgtaggttgtacaaatgcgaagaaagccgatgtatctgcggcaggcagcgataccacacaagtggtagatatgcatactgccgaaacctctctcgattactatggagtttataaaggtacggttccggctgccgattgtccgggcatagaactgaccctgaccctgaaaaaggaccgcacctatacgtatcattgggcttatattgaccgtaaagatgccgatttcgatgaaaccggtacgtttacggtgaaggataatctgcttatgcttactgaaaaaggaggcgaagtgtcttacttcaaagtgcaggaaggcagcctggtgatgctgaacaatgagaaacagcctgctaccggtgctttggccgatgcctatgtattaaagcaggaagaggtgttcctcgattgatttattggatcttcgcccggtacgtccgttccgaaaaggtaaaattgaaaaagagtgtgactccccgttcccgttgcatgccgttaggcagatgaagctggtcgctgtatttcactcccagggagagaacgttgccgttgtacagagtgaagttgcttcctgcactgacatagtagttggttgctttcttcttctgaatgactatataagagttgctgacgcccgctccgagtaacagtttcaccggattccggtaaatattgcctgccgtataggctgtgcctgccgacaatcggtgttggttctcgaagcggacgttgctttgtgatgacttcatacgactccaatctgtatatttatattcagctgtcagcgtccagcgcggactgttgtatgcaagtcccgctcccacaaactgggggaggcattggcgcacatggcgttggctttcgtcaatcgattcgttgcccgatgtgctgcttaccgacaaggtattgtcttgtgccaggtcttgcgaatatccgtatacagctcctgccacgaggtacttattccggctcagtggaaatttgtattgcaagccgaagtcagcataaaaggcatgcttgtatgagctttcttccacactgatacttccctgggtttctgtctgtttgatggtcccggttacgtaggaaaggttagcgccgacagaaaatcccttgaaaagccgataggctgtactgattcccattttagacaatccgccttcgccttcgaagagtgacgatacggtggaactgccggttcccgtgatgtcctgatccagtgtgatggcatagcctacactactgaccggtgccatgaacacggctccataccagcgtggagtgatgcggcaaccgatgctcaggttgttcaggttacctaccagcgagtgattgctcgtcccggtttgtgtatataccttgtaagctcccattactccggcgtctatcaggaaacgttgtccctcgatggcggtaagtgaggccggattggctgtattcaggaagttgtagctttgcaaggcaattcctgctccacccagtccggagtattgtccgccttctccggtggagagttcgcccagtccgaatatggaagtcggggagttggtggtattttgactatatattaataaagtggagtggcaaagagtaagcaatagaatcaggtttcttttcatgggttatatgttttataaagtagggttagtttcacgggattgctgtccggatgtccggtatccccgaatacgactccgttcaaggtagtgaagaataagttgtccgggagcatcagttgaagaattttccggttgtatcctaccgttcccagattgctttgcaggaaagaggtgatatcgaaggagtaataggtatcttctcccatcatttcatctgtcaccaggcttccggtttgtacggaactgcctgaaatatcagtcactacatcttccgtcacattgttttcatcggctgtatacagtgtcagcgattcgggaaggggatactgtttgccataagttccttttaccggatatagccggagcagggcgctttcgatggtcaccagcctgccttcggcacgcaggtcattgaggaatggaaaatcaatattgatatacatgccggtcaacccttgcagataggactggtgctccgatttttcagaaggaagtccgttgttgagtccgctttgcaaagaggagagtgcggtccggctgcggtcacaactgacctggttgaacctcagatcgctgttgggtaaaaaatcggcggacagttccgtggcatccgtttccgtctgatgataatagagagtgatgcataagcttgagtcgttcaccatgaaaccgttgacacaatttcccccttcttcgggaataaacgcgatacctttgaaatagtcgcggaagtactcttgcgactccatctcacgtgaaccggcctggaaatgttcgaaccactcgactccccattcgtcggggaggcggatttcatgttcccggattgtttcgcccggggtgggggtgaaagtaaaggaagccaggggagtggagtgataggacaccttcgaagtagtgtacagataaccttcgtccaatgacagattctccgatagaccgtgcagtgagatacgttgcggactcagggtatctcccagatagttacccgatgaatagaaccggatggtaatggagtcgaatctgtagtcggcattttcactgaatgaaactgtcggtacgtcatattcgacatagaaagctgcctttatctttccccagacgggatcgtcaatggttcctatctggcagacagtgtcacccgatgtggcaagagagtcactcaggatagtgctgaggcgtacggtacaggtatcggtttgtatggttcgcagggagctttccacccatttacctcccgccgtcgacagttcgtcacgacaagaggcgaggagtgatataaaaagagtgataaaaaacaaggataagttttttcgtttcatgaatcggatcatttttgccgcaaaagaagacgatttattttccctgtaaaaaaaggatcgactaatcggaacgatttatcgacttcattttcgttggtagagagaatgtgcctgttagtcgatccttttttttgcgcttaccgatgtcgcctacatttgcggtcagtaattaacgattaaaaaaacagaataaaagaatgactggaatagaaaaaacagtaacgaataggtcgggggccggagctttggtgctctgtaccatacttttttgcttgtgcgcctgtacggaagatgcttcctatacggcaggagtctggtatcgccgttcggacttcgacggggtggcacgtaccgatgctgccggtttcaccattggcaacaaaggatatatctgtggaggttacaacgggaaaacaacccgtctggccgatacctgggagtatgacatcgacaatgactggtggacgcaacgtgccgatatgcccggtacggttcggaatgccgctacaggtttcccggtggggaataaagggtacatcactaccggttacaatcccgatcagaagtatctggccgatacgtgggagtacgatccggagacaaatacctggcggcaaatggatgacttcaaagggggagcccgttattatgcccttgggtttggcattgataattatggctatgtaggtaccggttacaatgataactatttgaaggacttttatcgattcgatcctactgcggcagccggttcgcaatggactatcgtgaatggtttcggtggacaaaagcgtcagggagccacagcctttgtgatcaatggaaaagcctatgtctgtggaggacagaacaacaattccgatgtgtcggacttttggcgtttcgatccttctgccgccacgccgtggacacaattgagagatattgccaataccagcgacgatgattatgatgacgattatacttctattgtccgttcttacggagtcagttttgtgatcgatggaaaagcgtatctgactttgggctctactgccggaggaagttattattcgaactattggatctatgatcctgaaaccgatctttgggaaggagacgacctgacagcgtttgaaggcagtacacgcatccatgctgtctgtttttctaccggaacccgggggatcattgcgacaggcggcagtggatcgagttcatactttgatgacacttgggagttgaagccttatgaatatgaagaagaataagagcatactttggctgactctcgctatctgcatgctgatatccttcttcttataccatcggcatgaggcttgtaggtatagtctccaaataattgaaacggagaatgaaggcggatatggttaccggattctttgtggcgaccgggtagtgatctgccagccatacataccttcacttcccggacggaaagggtttgcttcggaagaagatgcccggagagtcggaaatctggtactggaaaggatacggtcgggaagtgatttcacgatatcggcttccgacttggagcaggtgacggaaacaaatggattcctttacagggctcactgaaaatcgatatttgaaaatgtatttgcaaacaggagaatgaaaagcgataccttttggtctttataaggcaagttcaaggtttctttttgataggtttcgaagcactgccccgttggttttaaattaacggggcttaccttttaaaccaaaacacctttgatttaaaacctattttttgtatttgtatagtgctgttttttagtcggttatggttttgtttcgtcacgagtcgcttttatcccggtcttcgcctgctttgtctgctctgtggtgaaaatatcatttcgaatagatttaaacttactctaaaactattttttattttggtttgttttatctttgcatagacacacttcacaaaaaaatatgcttgtatgcagagagccaaaaagaattatcttatttatgcggttatgttgctccttttcggggcgcttatttacatggctatcgaggagggagatcgtttttcacaccatgcggtagcatcgtcaactgtcgcagaagacactcctttcactatgttttgtcagtttgtcaccgacaacttacatcatcccttgagtatattgctgatacagatcattgctgtcctgctgatggtaaggcttttcggctttctgttcaagcacatcgggcagcccggggtgattggtgagattgtggcgggtattgtgttggggccttctgtgttaggctattttttcccggatgtgtttcaagcccttttccctcccgaatctcttaccaatctggagttgctgagccaggtcggactggttcttttcatgttcgtaatcgggatggaactagactttagcgtactcaaaaacaagataaacgaaacattggtcatcagccatgcgggtatattggttccgttcttcctcggcatcgtggcatcctactggatttatgaagagtatgcggctgcccagaccgcctttctgccgtttgccctcttcatcggtatctcaatgagtataaccgcttttccggtgttggcacgcatcattcaggaacggaatatgacaaagacttctttgggaactttggccattgcttcggctgccaatgatgacgtcactgcctggtgtctgctggctgtagtcatcgccatagccaaggcgggaacgtttgccagtgccctttacgccatcgggctgacggctctttatatcattatcatgtttatggtggtacgtcctttcctcaagaaagtgggagaggtgtatgccaatcaggaggtgattaacaaaacatttgtggcgctgattctgctgattctcatcatttcttccacgcttaccgagattatcggtattcatgccctgttcggtgctttcatggcaggagtggtgatgccgcccagcatcggattccgcaaggtgatgatggaaaaagtagaagatattgcccttgtctttttccttcctcttttctttgcctttacaggattgcgtaccgagatcggattgatcaacagtccggcgctttggggtgtctgcctgctgctgattacggttgccgtagcaggaaaactgggaggatgtgctgttgccgcgcgtttggtaggtgagtcctggaaagacagttttactatcggtacgctgatgaatacacggggactgatggaactggtggcactgaatatcggatacgaaatgggagtacttccgccttctatctttgtaatcctcgtcattatggcattggtaactacttttatgacgactccgttgttacaccttgtcgagcggatttttgcccgtcgtgaagaacgcttgtcggccaagctgaagctggtcttctgttttggcaggccggagtcgggacgcagcttgctttccatctttttcttattgttcggaaagaagatgaaagctgcccaggtcgttgctgcccattttacagtgggtacggatctgaaccccctgaatgcagaacagtatgcccgagatagtttttccctcgtggacgaaaaagcttccgaattgggacttagcgttgagaatcgttaccgggtaaccgataaattggtacaggatatgatccggttggcacgaaaagagcgtcccgatatgtttctgttgggagccggtagcaagtacaggccggatactgcgggaagcaatggggtgctgtggctctctctgtttcgcgataagatagacgatgtaatggagcaggtgaaatgtccggttgctgtttttgtcaatcgtggctatagcggcagctcccccgtctctttcgtactggggggagtgattgatgcttttttgttgacttatcttgaaagtatgttggaagggggagcacaggttcatctcttcctttttgatacggatgatgaagctttccggcaatcgaccgatccgatcttggcaaaatattcgtctcagatccggacgcagccttttagtggtgctgccaatctgacttcggcagcgaaggatggcttgcttgtgatgagtcacttatcttatacgaagctgtccgaagaagaagaggtgttccgcgatttgccttcactgttggtcatccggaggcctaagaagggttgaagtttcaaacccgacaactgctgattcgtattgattactgaattctaacgactaattattttgaaagatgacaattgataatcaaaccggtctggtactcgaaggaggaggtatgcgcggcgtatttacctgtggggtactggactatctgatggaccatgatattcgttttccctatacaatcggggtctctgcgggagcttgcaacgggctttcgtatatgtctcgccagcgtggacgggccaagtacagtaacatcgacttgttagagaagtaccattatatcggattgaagcatttgctcaagaaacggaatatcctggacttcgatcttctctttacggaatttcccgaacatattcttccttacgattatcaggcatactttgattcgcccgaacgatatgtgatggtgactaccaattgcctgaccggggaagccgattactttgaggaaaaaaaggataagaaccgtgtaatcgacatcgtccgtgcttccagcagccttcctttcgtttgtcccatagcttatgtagacggcatccctatgctggatggcggtattgtagattcaattcctttgcaacgtgccatacacgacggatatcggaataatgtagttgtcctcacccggaatcgtggttatcggaaagagaacaaagacatccgtattcctccttttgtctatcgtaaataccccaagatgcgggaagcgttaagtcggcgttgtgctgcgtacaatgcacagttagagatggtagagcgtatggaagaggagggggacatccttgtcatccgtcctcagaagcctgttgtggtggaccgcattgaacgtgatattcaaaaactgaccgatctctatgaggaaggatacgaatgtgcgaagcggcagcttgaaaccctctgatgacagatccggttgctaaggattcagatgaccgtagccccgaaaataaagttaaaactccggttagcaagataacaagtcggttgtaggtatgtttctatatcacgtcactataaaataatatattatggatgctttaaagatgctgattgttgtaaccggaaccgatatgtatgccgatggtaacctgcaaacagggttatggctcagtgagttgacccatatctatcattgtgccgaagaggcagggtatgaaataaccgtcgcaagccccaagggcggcaatgttcctgttgatccggagagtctaaaaccgatgatgttggacaaactttctaaggattattgggatgatcttgaatttaggcgtgaattgcagcatgcaaaaagtttagccgaagtttccggacagctatttgactgtgtttatttggcaggtggtcatggtgcgatgtatgattttcctgacgatactgtattgcaggcgattattgaaaagcattatgagagtgataaagcagtagcggccatctgtcatggtgtaagcgggcttttgaatgttaaactgtctggaggagagtatcttatcaaagataaaaagatcacaggcttttcttggtttgaagaaagtttggccgggagaaaaaaggaagtacctttcgaccttgaggctgcactcgaaaagagaggagccgactacgagaaggcattgattccgatgacctcgaaagtagtggtggactgtaacctgataacgggacaaaacccgttcagttcaaaagaaatggcagaagttgtaatgcggcagttgagtcgcgaaaagtaattttgattattataggaaatgaatttagaagaagtcttaaattatcgtcgttccgtgcgggtgtttgataaaacgaagccgttggaccctgagaaagtgaaacattgtctggaactggcaacattggcgcctaacagttcaaatatgcaattgtgggagttttatcaagtcatacagccggaattgctggcaaaaatatccaaagcctgccttgatcagaccgcaacttcaacggcttcagaggttgttgtttttgttacgcgtcaggatttataccggagccgggcaaagttcgtgcttgattttgaaagaggaaacgtgagacgaaacagtcccaaagaacgtcaggaaaaacgtattaaagacagagaactctattatggaaagctaatgccgtttctgtatgcccgcttctttaggatactgggactcctgagatctgtattggctaaggctatcggccttttccgccccattgtgcgtgaagtttccgaaagtgatatgcgtgttgtcgtccacaaatcttgtgcactggctgcccagacatttatgattgccatggcaaacgaaggatatgatacctgtcctttggagggttttgacagcaaacaaatgaagaaactattgaagttgcctcatggggccgaagtgaacatggtgatcgcctgtggaatacgggatggaaacaaaggaatctggggtgaacggggcagagtaccgtttgatgaagtttatcatagagtttaatgttgtttgtatccatttaggccataatacaaaatgtaagcttctccggcgatgaccaacagccatgtccaaagccagttgccacccatcacatcggcaaagattccttgtaaaagagggataatgcctccgccgatgactcccattgtcagcactccggatgccttagtggtatatttccccagttggtcggttgccaatgtaaaaatggccggccacatgatggaatgaaaaaagcctatcaatgtcaatatccagggattggccgtcagcatagcaagcatgagtagtacgatggctccgatggaggctatcaccagttgcttttcggaagggacctgcttgataaaggagcctaagaagcgtcccaataacagcaatccccaatataaggcagccatgtgggtagcgtttgaggcgaacgatcctccgagttcggatgcatacatattgacattagctccgacggccacctcgatgcctacatagaagaaaataccccatacccctaatttcaggtttctaaaggaccatacgcttttatcaaatttttctcccggtgcttcgcgtacattgtcgatagaaggcatttgtgttttaccaactaaaagagtaataatcagcatgatcagaattaatacgatcagcggaataataaattgcttcgtcacgatgtcatgcaaaggtgttccgtgaaatatcagataactgattaccaatggagcgatagccatgccgatcgagttgctcgttccgccgatcatctgtcgctgcaaggctgttgttttaccaatccggcaaactgtgagatatagattgagcactacttgcaggatcgttgcggctacaccgatcacaaaagagccgatcagaaaaatgaaaaagccgacagaaatgtggtttccgatgatggagacctgcatgggcgtatatatatggaaaagcacagctgcttcgtagattgccagtccggcgataagtatcagtaaggcaagataagatgtttttcggtatccgtatttttccagccatcgtgttccgaatccttcggataggggataggcaagaaaccatgaaaaattcagcattgtcaccaatgcattggtgatattaccatcgtggggcagcatagctgtttgtaacggtatctggaattgttgattgatgacggtgaaaagtcccacgataaaatacaagatcagcattaccataaatacggtaaacacgtttacgactttggtttgattgcgcttttggttcataagagatcatttgaattacatgtttgggaaacaatctttcgttttgaaggttgtgtgaaaacatattatttacctatattataatgaaatttgaaagagtgcttcataaccatgttagctaatacaagacataaacaaagttagaccaatatataatttaggttgaaaaggctatgatgggcattaatagttcatatctataagaacaggtgtctgaatagggatttgggtagccattgaaagtagcatcggtatttatacttaccgattgttattatgtaagcaatatctcgaaatctatattaaaaagtgggaaaaagtgatcttgggataactctctgttttcaaaaaaatagtgaaacaggagtggattggcaagcgaaatgcaaatattgagcctgtttataccatgaaatccggaagtcggcaacaggaagttaacatcgtaaaaacaaagaactaacttcttggcaagagaaagttaatatcctgaaagcaggaagttaacttcctgctttcaggatattaactttcagaaaaaaaagcaaggtcaggtcgtagaaaaaacaataaatagaatgaaaaaaagggtatttctttctggaatccaatcataaacgggtagcatgcgaatagcattttgaaatcattcaggtacttcagacttcgattttgttacgacatccgtcaacaatcctttattgtgatcaaaatatcctctaaatacaaaatgcgtgaattgtactatcgcaaaatctacacgtttttatcctatctgttccctttgggctataaaaaagcgcttctccgcattttaaaaatacaaaatgacagactgtaagtgagcgtgaaaaacaagttgtatcagcactttcttgtacgttagtagattagagtagatggaactgagaaaaaggcaggtggaagatgggaggatggagctgcctgatatatatatggtataccttattatatgtaaatgcagttgtgtttctttttctttttatccgggggcttttttacgattatattcgcgtaagtgtttttgggggttgcgtgttgaaggcgcatgaagaagaagtttgaatgtggcttgtatgataaaatcccgttaagattcaatcttattgaaaaattagaattttttttctcttaactcttgcttagtataattataatatctacatttgcttcgaacaattaaatatacccaattattaaagggatctttaaaaagtatgttaaccattggcagttggcaaatatagccaattttgatagaatagagaagaattaaggtattacactaatattgaattacttatattattaacactaaaaaattgagattatgaaaaagaaactcatgatggtagcagtgcttctgggtgctttgtcactgggggcttgcgtagacaatgacgaatcggcatcggtagaagctgtacgtaatgcaaaagctaagcaattggaatcagttgcagctttgaataatgctaaagc

SEQ ID NO: 4985 - DNA, 60388 bp, Unknown
  gut microbiota DNA sequence
ttattgattgcctcttttttatcttcagaaagttctttatctttccaactttctatgatagtatgcgcctctttcgccaactcctcttcaaacacctcaccataacaataagtcaacaactggcatttcaataaagtagcaggaagttggtcaagcacgtcccaacaacgattgagaacaacttgctttttctcctccttgtcaccctgattatagatggttgcattgtaacccatcaataatgccagacagatgtttgcttcctcttcgggagtagcaccacgctgaggatacaacgcatcggattgttctaaaacttctttgttcaactgacggaaatgatcggtataaataggagcaccatccacacctaaatagagtaactcgtgcgcgagactctgtaattgttcaatttgagaagtgagtgtattcataacttaaatgacacgtaaataacttttaggaactttgacgctggcgctcaatacaccggcaatacgaataacaacataagttttgttggcctcgctggcaagttcgccctcgacaccacagaaatcacctttaactacctgaaccctgctaccaacagataaatggtcattatcgaaactgacgccattcggatctaaatccatgacaaatatgaagtcctgcatctgtttatcaggaactatcagcatggccctggtaagcaggtctttcatataaaaaagctggatattgtatttattagaaatatcacaagcatcttgcttggtagcttggatgaagataagattcttaataacagggacttccacccgttttcgacgatatttcaactgccggatgacaaactgagtgggaagatagtaattgagatcaagttcagtcttcaatttttcaagagagtcacgaatagcaaactcttgtttatctcgggtacgggcggcaaaccaatacttctgttgttcagacatttacgatttatacttggggaaattttcctttgtttcgggtgcgcttcgcggtttgaacgagacatcttttctctttcaaaccgtcaaattttacgaaacatttttagaagttgagaacgaacgaatgtgtttcaaaaaacgttcgtcttttgaaacagcattttttgagtttttttcgatgaaaaaatgaatattgtaaagttgctgagcagagaactttttttgctctatatgtgtttgaaaatcaacaatataaaatctttgataaaattttatccactaaatattttgtacattaaaacagactccttacctttgttcaatcaaacgaacgttttttgaaacaacacctatatcttaagataaataactaataacaagatccttacacttcaagattttccctttaaactaaaaaaattccggtattcttttatatttatatttttttatacaaactttgtcctttcataaattcatttaataactaacattatggaagaaaaaaagtagttatctcattgaatgataacttagtaaccatcgaagtaaatggaaaagtaatctttgcgggtaaagctgacttgcaattcagcctcaatcaaaaggttagagaaccactacgcatcacaaaaggcaaaggaaagctaatggaggcacttaccgaaagctttatcaaaggcggaatcaacagcatggaaaacagacccattgaagaactacaggaaacaataaaagaatatctcacctttgaatatcagcgcaaaggcattgctacagagcctaataaacgttcttttctatcagagctgaaaaaatatgccagagcattccggaaaaagcgagatgaaagcgaataaccgattgttaaaatcctgtaaaagcccctttctaaagtacttttacaggattagtctattcaaaacttattaccgtactttgccatgggtaaaaataaaagcccgacaataactcattaataaactttaaaaaatcaattatgaaaaagaacaggaaagcagtatcgaaaaacgaaatgatgaaaggaaaatggaaaagacaaatcatgctcgaaaaggactacacagaacagtgctccgaatggatggcagaacgactggaagccctcatagaatatatgcaatatggacatgcagccgtagcttatatgaaacaggacggaacattcaaactggtgaaaggaacattggtgggatacgaaaaagatttcggaaagcagtatgatccgatggaaataaaaaacacagtggtctaccgggatgtggagcaacaaaggtggatgaccttcaaaatagagaatttcatggaatggagagcgatcgtataggagaatctttcagtgaccaattaatcagtaacataacaacttaacaattatggcaacaacatacgatggaataaattactttccaatagctgtgaattttatggaagagaacgcaatggaggtaatagaagcaaaatatggcatgaaaggactcgcgattgtactgaaactcctatgcaaaatatataaagaaggatattatattccgtggggtgaggaacaatgccttattttcgccaacaagacgggaaaagaggcagacgcagaagaggtgcaggggattatcgagataatgatcgagaaaggaatgatagacaggggaagctatgcggaacataaagtactgacctctgaagcaatacaaaaagtatggatagaggcaaccaagcgaagaaagaggaactggacagccatgccttatctactgataaaaccgaaagagacatgtaatgaagaaaagaccgtctgcacgcaaaatgtagagcaggatgcaggctctgatgcaaaaaatgcatgcaataccgaacaaagtaaagtaaagcaaagtagagaatttcccccctcagctcccccaagggggaaggaagaggaagtcaatgctacgccggtcagtatgcccggatacgcatttaatacaatgacacacaactacgtgggattaatgggaaacctggaacgattcggaataacagacgaaaaagagatcgaagcaatcctgcgactgtcagattacgggagaaaaggaacccctgtatggaaactgatttgcagcacgaactggagtaacatcggagcaaaaggaaaatacatgatcgcagcgttgaaccgggcaaagaaaagaagcggaacctaaaaagaacttttctgacaaacagtacatttttatattctggaaaatactgtttgcttgcagtcaattaaagaacgcagctgttttcctccggaaacgggcactgattctcaagggattgaaaagcgattcaaaaagcactaatacgaagttaaaatcgtgacttcaggaagttaacttcccgaagatacgattttaacttcgtaaaattatgatattaacttcgtaaacaacaagatgttaacttcgtaaacggcatcatccggacatcaaagcaatcaaaaaagattgtcagactatagtatttcaggcagttgccagacttgtatgtgacgaatcccttctttggagggcaatgtggtatcgtccatagaaacgacccacttttcataattgtcttgtatcatctccagcgtgttgtacatttgctccacttgaaaatcatcattgagcagaggtgcacattgcaaatacacaatgcggtctttcttcctgccaacaaaatcgaccagtttgcctcctcgaagcacacctacaaaaacggtatatccggcacgccgcagttccagataaacctggttctcaaagcaggattttcgggaaccggcaaaaaaaggatacagatggcgcatgaatgaccaatcgttaatatagtatttgcagctacccagaagaatctctttactgcggatctgataacgttccacgcgatgaatcagagaggtgtcttccagatagcagatataattggcaaccgtatcataactcgtcttccggttctgggcagcaaagtgactgaccagctgaccgatggtaatcaactcagcgagatgggtgcacaaatagacgaacacatcttcgagcaggcgggcatccttaatccgatatcgacggatgatatcacgaaacagaatcgtatcgcggagagcggaaatggctttccatccggcctccgcatccggaagattgaaaagaatgggtagtgcccccttacccatatattccgcgtaatttttgccggtagcctctaccctctccaatatcctgtgctcggaaaagctaaagggaaatatctcaaaactgacgtaatgtctggccaaaagcttctcggcttcacccgaaagcatatcctggttggaaccactgataaacaactcgcaagtatctacaaaatcctgtgaatgggaatggacaaaatgttcccagccctccactttttgtatttcttcaataaaaatatagactttacctaccggatggattttctcacgatagataaaaagcaagtcgtccagatcacgatagccggaaagtacgcccgaatctgtgaacttcttacttatatatagaatgttccgtgatgaaacaccatcggcaatcaactgatagatgatctgccgcaacagacatcctttacctacccctctctgtccggtcaggacctttacaaggcggttacctacatacccgaatatacggtttgtgtaacttttacgggcaaattccactttcggaagttttccattccaatagttggatgataccaattcatcaaatatatcattcatatacgaatttatttaaaataaaattcattatataaaatagaatagatattttaatattaaaaagcataatattcatttctattttaataaattacagcaaagataagttttttccgttgaaaaaagacaataattcagcagatagattgcccgttcttatgaaaataccgaatattgcatcgtcaaaaagattataaactcaaaacaatagacatgaaaaaagctcttatttcaggtattaccggacaggatggttcattcctcgccgagtttcttcttcagaaaggttacgaagtacacggcatcctgcgccgttcatcttctttcaatacaggccggatcgaacacttgtactttgatgaatgggtgcgcgatatgaaacagaaacgtacagtcaacctgcactacggagatatgaccgactcaagttcactgatccgcatcatccagcaagtacaacccgacgagatatacaacctggcggcacaaagccacgtaaaagtatcgttcgacgtaccggaatataccgccgaggcggatgcactcggtacattgcgtatgcttgaagctgtccgcatcctgggactggaaaaacagacacgcatctaccaggcttccacttccgaactctacggaaaagtacaggaagtgccgcaaagcgaaacgactccgttctatccgcgttctccgtatggagtagccaagcaatacggtttctggatcaccaagaactatcgtgaaagttacggaatgtttgccgtaaacggtatcttattcaatcacgagagtgaacgccgtggcgagactttcgtaacccgtaagatcacgctggcagcagcacgcatcgcacaaggcgaacaggataaattatatttgggtaacctggatgccaagcgtgactggggctatgccaaagattatgtagaatgtatgtggctgatcctgcaacatgacgtacccgaagatttcgtaatcgctaccggcgaaatgcataccgtccgcgaattctgtacactggcatttgccgaaataggcatcaacctgcgttgggaaggcgaaggcgtcaatgagaaaggaatcgacacggccaccggcaaagtactggtagaggtcgacccgaaatacttccgccctgccgaagtggaacaattgctcggtaacccgaccaaagccagaaccgtattgggatggaatccatgcaaaacaccattcccggaactggtaaaaatcatggtacgccacgatatggccaaagtgaaaagaatgattgcgactaaacatgattgacagaatggataaaaacgcaaaaatttatgtagccggacaccacggactggtgggttcggctatatggaaaaacctgcaggaaaaggggtatacgaatctggtgggacgcacacataaggaactggacttattggacggtgcggccgtaaagcagttttttgatgaggaaatgccggagtacgtgtttttggctgccgcttttgtcggagggatcatggccaatagtatctaccgtgcggactttatctataagaacttacagatacagcagaacgtgatcggagaaagtttccgccatcaggtgaaaaaactactctttctgggcagtacctgcatctatccgcgggatgccgaacagccgatgaaagaggacgtcttgctcacttctccactggaatataccaatgaaccttatgccatagctaaaatagccggactgaaaatgtgcgaaagcttcaacctgcaatatggaacgaactacatcgccgtgatgccgaccaacctgtatgggccgaacgataactttgacttggaacgcagtcatgtgctgcctgccatgatccgtaaaattcacttggcacactgcttgaaaaaaggagattgggaggccgtgcgtaaagatatgaacctgcgtccggtagaaggcatcagtggtgccaactccaacgaagaaatcctccggattctccggaaatacggcattactgaaacggaggtgacactttggggaacaggaacgcctctaagggaatttctttggagtgaagaaatggcagatgccagtgtcttcgtaatggaacatgtggacttcaaggatacctacaaagccggtgcaaaagacatccgcaactgccacatcaatataggtaccggcaaagaaattacaatccgcgaactggccggactgattgtaaatacagtcggctatcagggtaaactgacttttgacagcagtaaaccggacggaaccatgcgaaaacttaccgatccgtcgaaattgcacaacctcggatggcatcataagatcgatattgaagagggggtacagagaatgtacgagtggtatctgggataatcattcaccacagagggcataggaggatacagagtgataaaatagaaaagaaaacagaacttctatgtcctccgtgtaccctgtagtgaatacagtgaaacctgcaaaagaaaaatttaaatagcttccaagctttcaaatctcaattaaatagctatatttgcacaatttatcatcaaatgtgcaaaaaacaatggaacaaagttttatagcttacattgaaaatagtattaagaataattgggatctggacgccctgacagattataaaggtgccaccctacagtataaagacgtagcccgcaaaatagaaaagctccacatcatctttgaagaaagcggaatccgcaaaggagacaaaatagccgtttgcggaagaaatagttcccattggggagttactttcctcgcgactctcacttatggagcggttatcgtccccatcttacacgaattcaaagctgataacgtacacaacatcgtcaatcactcggaagccaaactcctctttgtaggagacgtggtctgggaaaacctcaatgagtctgccatgccgttgcttgaaggtatcctgatgatgaacgattttacgttactggtatcacgtagtgaacgactgactcacgcacgtgaacacctcaacgaaatgttcggcaagaaattccccaaaaatttccgtaaggaacatatcgaatatcataaggatcagcctgaagaattggctgttatcaactatacctcgggaaccaccagctattcaaaaggtgtaatgctcccctatcgcagcctatggtcgaatacggctttcgctttcgaggtccttccactgaaagcaggtgataagatcgtatccatgctgccgatggcacacatgtacggactggccttcgagttcctgtatgaatttgcggtaggttgccagatttacttcctcacccgcatgccgagcccgaagattatcttccaggcgtttgccgacgtgaaacccaatctgatcgtggctgttccgctgattattgaaaagatcatcaagaagagcgtacttccgaagttggagactcctaccatgaagctgctgcttaaagtgccgattatcaatgataagattaaagcaacggtacgcgaagagatgataaaaggctttggcggcaactttgaagctgtcattgtaggtggagccgccttcaaccaggaggtggaacaattcctgagaatgatcgacttcccttatacagtgggctatggtatgaccgagtgcggtcctatcatttgttatgaagactggaaacgcttcaaaccgggatcatgtggaaaagcagcactcaacatggaagtgaaagtcctttcacccgatccggaaaacgtagtaggcgaaattgtctgcaaaggtccgaacgtaatgttgggctactataagaatgaagaggctaccgcccaagtgatcgataaagacggatggttacataccggtgaccttgccctagaagatgctgaaggcaacatcacaattaagggacgcagcaagaatatgttattgagtgccagcggacagaatatctatccggaagaaatagaagataagctgaacaatctgccgtacgtggccgaaagtattatcgtacagcagaatgacaaactggtaggactggtttatccggattttgacgaagcctttgcgcatggtctgaaaaatgaagacatggaacgggtgatggaagaaaaccgggttaccttgaacgaaatgcttcctgcctacagccagatttcgaaaatgaaaatctatccggaagagtttgaaaagactccgaagaagagtatcaaacgcttcttatatcaagaggcaaaaggataaaagcagtctctatctttcttaaaaaaacatcgattacgcagatttgcatagattttaataggataatccgtgcaaatctgcgtaatttgcgttctaaaaatttagcttatgaagaaaataattcttgtagcagctcttctttcggctgcagtctgtctgcctgcacagaataaaggcggaaacaaaagtgggggaatcaatctttctttatggaaaaaagcatgtacacaaccacttgacagtacacagactacatatgtcaacctggggcttttctcggcaatgcataagttgcacggtgtaggcttcaatgccttcggaagtatggtacagaacaatatgaacggtgtgcagatttccggattggccaaccttgcgggaggaagcatgcatggagtacagattggaggtatcagtaacgtaaacggcaacaatctggcaggattgtctgtttcgggacttgtcaacatcaccggaaacaaagcaaagggtgtactgattacgggtttaagcaacattgccggagacaatatgcgcggactgatgatgagtggtatcatgaatatcacaggagataaagccgcaggtgtacaattggcaggccttgccaacgtaaccggtgaggaatatgacggacttatgatgtcgggattgctcaacgtggtaggagaagaaatgaacggactgcaactttccggacttgccaatgtaaccgggggacaaatgaacggagtgcaattgggactgttcaattttgcctctaaggcaaaaggtttgcagatcggactgttcaactatcataaggaagatatgaaaggacttcagctgggactggtcaatgccaacccgcagaccaaggtacagttaatggtcttcggaggaaacagcaccaaaatcaatgtaggtgcacgtttcaagaacaaactcttctacactatcctcggtggaggcacacactatcttgattttgacgataaattttctgcggcattattctatcgggcaggccttgaacttccactctacagaaacttgtttgtaagcggtgatttaggctatcagcacatcgaaactttccggaataaaaaggtggaaggcattccggcacgtctttatgccttgcaggcacgcctcaacctggagtatcggtttacggataaattcggtctgttcgtcacaggcggatacggtggcagccgttactataacaaagccaggacctacgacaaaggcgtgattgcggaagcaggagtggttctgttctaattgattcacagccaaacgacacagcgtctcacagagtttatattaaaattattcctctgtgagacgctgtgttattctgtggtgaacctgatcagaccttctcctttatcaaaccgatccggtatgctaccaacaacttctttaaatccagaatttgcgttacgagctcttttcccttatcggtatctttcaccatcattcgttgtgaattgaactcgatgacgaaggtagtcgacttaatgtcctgtccctcttcgatggctttctgtgtagactggaaagggtcatgctgcaccaactgcaaaccatgtgaatgatataccagcgtatatccggcaataccggtctccggctgataagctttcgaaaaaccaccgtcgatgaccagcaattttccaccggctttcatcggctgctcgcctttaatggtctttaccggcacatgaccgttgatgatatgagtatgctgccctgtcactccgaattcttcaagaatccggtcacaaatttcttctttgttacgcaaagcataataatatcctttcgtctctttatgcaggctcttatccgcaatgaaataacgttcgaacgtagccatcttgtctttgtcgaacgaaggggcatccggtccgcaccacagataccagatgtaatccatggcaaagcgtttctcttcttcatcatcttcatcaaaataagccgtacgaatcaattggtctatcttgtccagcaagttcttcccccaatactctttaccgcagatattcacgtgcttgaaacttccatcctcgttgagaggcacagaggcatgataaagcaaattggaattgcacaccagatacatacctccataggtaaagaggcaacgcatgtgttttttgagtttctcgctgttcataaacgagtaatgtatcttttctatcaattcctgctcttcatcagtcagacgataaggttctgcaggatctaccgtagggaagttggtatcgcgcaacggatattctttgccttcatagacaaatactccccgttcaaagtcgattttctcaagcaacttgcgaccccccattccgaactccggacgacgattaataatgtttgcctccagcttaaactgaatgatggtaatagctttatgcatctgggttatcagcctcaaggtcttctcgttataagtagaatcggcaaagttggtcttaggtgcaaagatggtacagggatcatccgcataagtatccatcgcaaaagtggcaagaggcaaaagattgatgccatacccatcttccaatgtccccagattgccgtaacgcatcgagagacggatcacgttggccatacaagcttcattacccgatgctgcacccatccagaggatatcgtgatttccccattggatatcgaaattgtgataatcacacaaagtatccattatgatatgggcacccggaccacgatcgtagatatcgcccacgatatggagtgaatcgatcgtaagacgctgtatcagattacacatggcaatgataaagtcgtcagcgcggcgagtggaaataatggtactgataatcacattgatataagcatgtttattgggctcgatggtcgattcgtgaagtaactcctggatgatataggagaactcggccggcaatgatttgcgaaccttcgaacgggtatatttggatgatacgttctggcagacctttaccagctgattgagagtgatcaggtaccaatcgtcaatatcggtttcggttgctttaatcaattggagtttctcttccggataataaataagcgtgcagagttctttcttctcgatctcacggagagtatggccgaatatttcgttcactttccgcttcaccgctcccgaagcatttttcaatacatgctgaaaagcttcatactcgccatgtatatcggtcagaaaatgttcggtccctttcggaagattcaggatggcttcaagattgataatctctgtactggcagcggcaatggtagggaaactacgtgaaagcagttgcagataacgcagatcggcaacgatactttcgggggttatattactttgagcagtcatataatttacgattttacgatttacaatttataaatttcgcccgaatggctatagaagaaacatgagcagcacctgggctataatgacgcgaaggaacatactcaacggatagaccgtagcataagctaccgacggattatctccggggatggtatcattggcgtaattcaatgccatcggattggccatactgccacacaacataccggaaacgctgccaaaatcgatcttcataatcttaaaagcaaagaaccccacaagcaccgtaggcacgagggtcagcccaaagcccaggccgatccataaaagtccttcgggacgaaataccgtatcgaagaaatgggcacctgcatccaacccaaggcaggcaagataaagggacagccccaaggcacggagcatcagattggcactgcgagtggtataggtgatcatgtgcaaacggggtccaaaggtcccgatcaggatgcctacaataatagggccgcctgcaagtccgagccggacaggagtactgataccgggaattgagaaaggtacggctcccagggccaatcccaggatgataccgacaaatacagccacaagattgggttctttcaagcttttgatggcatttccaagtaccttctccacattctggatggcagccgcttcgccgaccactgtcagacggtcacccaactgcaaggtaagttcgggagtagccaacaattgcaccccggaacgatagacacggctgatattgattccgtaatgattgcgcagacggagagctcccaacttcttcccgttcaattcgggacgggtgacgacgatgcgttgcgaaatcaattggctgtcgatagcattccaatcgatatcttccttgttccaatccgtattctcctgttcaccgaacagtacggtaagggccaatgcgtctttttcggatgtaacaaccaataagcggtcgccttcttttataatcttttcggaagtgggaatactgacattaccgtctctccacaaacgggaaatgacgaattttggataactcatatgagcgatatccttaatgcttttattaaaaatagcagggttgtgtacctgaaaagcggcaatataggttttgttggcatcgtctttctcctgtacttcaagatcttcccggcgtaccagcaatttacggatcaacagaaccgccagaatcaccccgatcactccgagaggataggccacggcacatcccaaagctggtgtactgctttcaagccccatctgtttcagcgtctgctgggctgctcccaaagccggagtgttagtggtggcaccacacagaatgcctaccatattgggtaacgaaaccccggtggtatagctgcaaacaaccgcaagaaacgtacccagaatcactactgcgatggcaagcatattcaacgtaacccctcccttgcgaaatgagctgaaaaagccgggaccaacctgcaaccccaaggcatatacaaagataatgagcccgaaactctcggcgtaattcagcatctgcggatcaatggacaatccgaagtgcccggccagaataccggcaaaaaagacaaaggtaacgccaagcgaaatgccacaaacatgaattttgcccaatccgagcccaatggcggaaatcagggaaagaacgacaactgcctgcaaagcagaatgttcgataaagagactatataaccactccatgtgaataatttaccaatgtatccataagccaatgtatccgttaaacgcataaggatgcattagcgtcggcaaagatagcaactatttatgacctcacaaagcttttattcacccacttcatcccataccaacgacggacaaagataattccacgaatgttttcatcgagagcaaaggcaacccacatgccgcaaatgccccaagcccaataaattccaaataaataacctatgccgacagccacactccacatcacaaccaatcctacatagaaaggataattcacatcacctgccgcacggagggcattcgtcgcaaaaatattaatgggacgccctatctcgagcaccacatcgatcagcaatacaatcactcccatacggatgatctccggattggaagtcagccaactcagtatagcatgcccggaagcggcaataataccggaaagaatcagcgtaatcattacggatttcttcatgacgtacttaccgagcagaaaagctgcatgaggtttcttctcccctatcaaatgtccgatacagatagctcctccctgggccatggagatgctgaataaatagacgaacatgataatgttgacacaataagtacgggtagccagcgcctcgactccaagcatattgataaaaaaagtaatgaccacttgcgatgaactgtacgagagctgctctccggcagaaggcagaccgacccgcatcaaattcttcaattcgataaaaggaaacggacggaagtaggccaacgggaaacgatgaatgtgtttgcggaacagaatgacaaacagaatcaccatagatactccacggctgaaggctgtagaaatagccgccccttccaccccgagttcgggacagccgaacttaccgaaaatcagcgaataattaccgataatattaagaatattgactactaccgtcaccaacatcggatatatggctttattggcactgcgcaatgaagcggaaagagtgagagaaatagcctggaaaaaagcgaatgcacccacgatacgcatgtaatccataccgtcggccatcagttccggccccaagcccatccattgcagaatggtgcgggccattgtaaacagaataaggctgattattccaccaaccaacaaattgacaagcaacgacacccccactacctgaaccaccttcttttcaagccttgcgccgaggtactgcgagcaaagtacggatgttcccaggttgatcacctcaaacaccaaaaaggtcagcataataatctggttgacaactccgacagcggctacactattgtcagagtgacggctcaacataatggtgtccaccgctcccagcatcataatcagtaatgtctcaataaaaataggagcagccagttttgccagacgtctctttatgctttcctgttgaattctgtgtgtcattttaccttatccgtttcgggctgcaaaggtatctaaaaacactgaaaagacggattgacatatatcaagaatatatcaatccgcctgcaattatctatataaaagtttaggttatctcactccggtaaagtcaacataattgtcgtgtccatccaggtatccgctcagcacattcccccgaatccagacatcgtcgagataagagacatcaccgggaccatataccatccgaagggagtattgcgaacggtcctcccaattccaggtaaaggagtacaccgattcggaataacgtccgttgggatattccacccggatataatcttctccatggcgatcgagataaaaattcagttcctgatagcaatagttcccgtcggcatcataaaacgtatctgcccagggacgactgcaaagatcaagggatttattatagtacgaaccaccgatattgtcatcatcataaaagtcatctatctcaatctcacaagaagtaagatttatcattgccactgccagcagaaacaattttaagtatttaaaagttaaagtcttcatatcgtatagtttttagttatatcagtttgatgtgaacaaaagtagggaaagaaatgatttgcatgaaaagaaaaaacctacatctgcagagggaatcgcctaaataaaagagggaaacaggacaaagaaggcagaaagctctaaaaaggacatatcaaatgttaacaagaaaaacatatttactaaataacgttacaaaattacgatttatacccggataatttgccgatattctccaaatccgtatatttgcaatgtgtttttcatagtattagatttaaggttaacaaagattggttgctcgtgagagtagcctttttttatgccctttcctccggatcagcttcagactatcctgaccaccctctccttccttctgtacactactgtttcataagaattcaagaacatcttcctgctaaaaggtgcttgtagaaagaaatccccatttatacttctccgaatgacgacaacgggtatggatggaaaagcgactgtcatcttacataattatgaagataaaaagtatccggccgtattgcatggtaacaggctgtggttacggccttatgaagccattgcctggaagcttacttagtgtaaatctactcttgacgcctccccttgttgtattacaggatttcgtcaggaacggaccgtcaatttattcatgatccttgggaactgaaccgcaaagatgaccgtacaacaaatggctgccgcagcatccgatattgcttcggcagcatatacccccatcactcccatcaggtatggaagcataagggccaggggaatcaacaggatcaccttacgaagtaatgcaataaagatagaaaccttggcctgccccaatgcgacaaacatattctggcacgcacgctgcaacccgaaaatagtcatccccgccaaaaagacaggcatcacctgcactacggtttctatcaacttttcgtcagaagtaaaggccgaagcaatcacagagggaaacaaaatcatcagcaggatcaaaacgagattgaacagaaacataaaggtcatcactattttgaagcattccttcactctttctcggtttccatgaccataattataacttacgatgggtacgaatcccaatgcgaaaccggcaaggggaacactgacaaaaagcatggcactctgcatgattgtcaatgcactcacatagatatcaccgaatgtcttcaatgaaccgttcagcacaaatcctaccaagctttcggtacttgccataataaacggtgaggctcccaacgccaatatagctccaacaaccttccggtccaacctcatataacgaggctcgagccgcaaagaagcacgccgggatgtcagaaagaacaatacccagccagcactgcaagcctgtgaaataatagtggcaagcgcagctcctttcactccccaatcaaagacaaaaataaacagaggatcgagcaagatattaagcaacgctccaataacaatcgacagcatagcgatgccaggacgtccctgtgtattaataaaagtattcaacccgacagagacttcgacaaaaagggtaccgataagataaatcgaaagataagccgttgcgtacccgagcgtctgttccgaagcaccggtaaacaaaagaatcggttccataaacaaataagataagccggacgtcagaagtgtaaaaaacagcaataacacgaagccattacccaatattttttcggcatgggtacggttgccctgccctaacgctatggctgcaagaggcgcacctcccccggccacaatagccgaaaaagctgaaatcaaaataatcagagaacctgccaccccgatacctgcaagtgcttgagtaccgattcccgggatatgcccgatatagatgcggtccacaatattatagagcaaatttacgatttgtgcaattaccgcaggaagtgccatcctgaacacaagtggcaacatacggtccgtaccaagcctctcttcatatttatcattcataaccaagatgcaataaaaaagccttttacgctaccgtaaaaggctaattatcagatagtagtgggtacgagaatcgaactcgtattacatgcgtgagaggcatgtgtcctaaccgttagacgaacccacccgattgaaaattagattcaaaaaagagctaagcaataaactcagctcttctttgtcatcttaaagttgagatttggtgcggaagctgggggattcgaacccccggtacggttacccgtacgtcagtttagcaaactggtggtttcagccactcacccaaacttcctttttaaccgcatttcctctcaaatgcgatgcaaagatagagggaacttttgaactacgcaaatctttctgcaacatttttttcaaggattttatgcgaaacaagttaaccagctaagtttcaaatgttaaaggagagaacttttttttcatacacttcttcctccggccggacatcggagtaaaacgaatctttttactttgaaaaattgatttatatcaaccgattttcgtacttttgccccgcaatctataataacttatcaatatataacataatggaaaacctgaaagagacagtggatattgttgtaaactccagatatccggagatgaacagagagggacgagaactactggcacaggtcttgatacgcaaagagctggaaaagggtgaaatgttgttgaacgaaggacaaataagccgccacatggtttttgtcggtaaagggatgttgcggcaattttattataaaaacggaaaagatgtcaccgagcacttctcatacgaaggatgtatcctgatgtgcatcgaaagcctgttaaaacaagaacctacccacctgatggctgaagcattggaaccggcggtagtatatatgctcccttatgacgtcctgcaaaagttgctggaacaatccaaagaaatcaatgctttctatcgtaaggtactggaatactcactcatcgtatcgcaaataaaggccgattcatggcgtttcgaaacagcacgcgaacgctacaacctactcttgcaccatcatccggagatcatcaaacgagctccgttatcacacattgcatcctacctgctgatgaccccggaaacactcagtcgtgttcgttcgggagtactgtaaaaaacattttttgatttatatcaaaacgtaattcaactacatgctgtatttttgcagcagttaataaataggttgttttttataggaataaagattagtttttaggtaacaattaaaaaaacaggcagcgtcaactatttgacgctgcctgttttttatcagacactttccatcattcatatagatcatgctgtgccatttcttcaaaaagtccggcgagtttctctacgatcggtttcacataacgctctcctttttccgctgttgcttttttcgggtttcctacaccactgtctactgttgctttgtcccaatgacgaggtacccaagctactttttcgttcagcgaagcaatggcaaacggtttcgattcgccatcaccggcctcagccagattcaccagttccggatgatagtgcatcatcacggaagtttccgattctccggcatggtcgtcaatctccgcttcaaaatagcctttgggcgacaccacctcaaaccagtttgcggcagcaatcagaaagtcgggatattcaaaagcaaggtcacgaatcatccctttaaaattattccctccgtgtccactcaaaatcaacagcttacgaaatccttgtacatgaagggacgatacgatatcttccagaatagcctgctgggtggcatatcgggtatggatacagaacggcaattcacgctgcccgggattatgcgctccgaaaggtacgggcggcatcaccatgcaacggacacccgaacggctaagtgccagttcggctgcctccacagcaatatcatgggggagaatgcaatcggtgagatacggcaaatgtaaattatggggttccgtagctccccacggcaaaataataacatcatatttcagctctttcaccttaccaaggcaggatactgaaagatctacttctttattcatggtcttctgtttttagaattcaaatgtgatatcacaaagatatgaataaaatcagaaacttagttcataatctttatccccacaaaataagtcctcggctgagtcggtccgtagaagtaacctgcatcccggaattctcccttgtccagatccttctggaagctattaaatatattctgtactcctccgtttacctgcattttgatatgatctttcagcacaaaagtataattcagtttcaggttgagatccatgaattgcggagtgtgctccatgcgtgacttctcgatgtatccggccatgtgcggcacaatcatcttaccggtataagtacccgaaagcgagaaatcgaaattctttaatggtgccgacgtaaaagtgaaataaccgtagtagtccggcgtacggggcatgcgtttcgtagtctgctcttcttctccttcactggtccatacttccgcccggttatatctgctgcgctgcaccgtaaatcccaactgcaactgcgcttcgcgtccatgggctacctttgcatccagattgacaccatatactttggccccgctgccgttccggcgctcttttatcttatctccgttttggtcctcaccgatatcttcgagcacaaatacatgatgtaaatccgtataaaacccttcgagaagaatgtttgactgccagtgccccatcgggaacgaccaatccaccgaaccgctgaaactgttggagcgctcttcacgaagtccgtcggccaaccggatctgtactccttcaccccccacagccgttacatgcaagtcttcatcgtatgcttgtggtgcccggaatccggtagagtatgtcagacgtgcctgcaaattatcgctcggtttatataagaaattcacacgcgggctaaaaatcggatgatcgatcaggttatgcttgtccagacgtgcccctacaagcatcgtccagcgattcaaccgccattcgttctgtacaaaacctccggcaatacgcacatcctgctgcatgtcgcggtgatatcccgtcatcacatcgtgtagtgagttgctctgatactctacaccgccggtaaacgtagccggagcaaaaagacagcggtccatgttgcccacatacatacctcccactacccaagtcagatcgtttgtcttaccataggcattcatgtctttctgtgcaccgtaatagctgttgcgatccgtatgctggatagaaccgtatacggacattttatgcttctcgccccagtaacgatcgtaactcactcctccactattgatgatatgtttcgtttgttcagtaatatccgcctcgtggggttgcaaattgaacttatttcctccccgccggaattcgtttgtcgtgtgatactccacattgatacggctaaaatagttaggacgataataagcacgcatcccgaatgtattcatatttagtttaccgagttccgaaaaaccgtctccgtcggcatcataaggattccggttacgataggtctcgtacagggcgatgccgtacgaattgtcttttgccaccaaagaaacgtttcctcccatatattgctcccacgacttgccattcatattagacatcgtgcttgccacctggaaagaattattaatcgggtctttcgtgataatattgatcgttcctcctacggcattggcaccgaacaacgccgaaccaccaccgcgtaccacttccacacgttcgatcatgtttaccggaatctgttccagcccgtacactcccgagagagcgctgatgataggacggctgttaatcaggatttgcgaataaggaccttccaagccattgatacgtacctgtgggaaaccgcaattctggcaattgttctccacccgaagacccgactggaagttcaacgatttagccagatcggtagagttcaccgtctcaaacagtttagcgctcatcacgtttacgaccaccggtgccgcctttcggctcacctcgttccggttggccgaaaccaccacttcatctgtcgtaaaacttacttcttccatttggaaatgaaccacggacgtagcctctgcactgaccgtaattgttttttcctgtgttttatatcccatcacctgtacacggagcgtatatttaccggcagccagtttacggaattcaaattgtccttcctcattggacaccgcaccgcggttggttcccagaatcatcactgttgcgaatgggatactttcttcagtgcccttcacaataacgtgtccggcaatcatattaccttctttaatcggattgaccgcatacgaactcatgcttacacaagcaagcacaagtataactatataatgtttcattcttttttgttagccataaaagacgaatcagcagtaccacatgaacacacttacacacagtgcccgccttttggaagcattatgttcactcccaaatactgattcgcagtagtatatttaaatgtaaatgagtaaaagaaaaaaggggagcatagcccaccaccgattatgtggtgaatgcgaattttgacatatccccatttttaagctaactctgccggaggggcccgcagagaaatcacctgcagatgtgttccggccgtcaccggtatactctccggtatctctacggtgaacagaatcgggcgttcgggtgtaaaatcataatgcacatcgacttccaaagaatggaatgcggcaaaatgtgcaataacaataatgttggaagcagtatgcgagtgggtacctttgtagggatgagagtgagctatcatcacaccgttcacgtaatgcacatgagtaaacattgtaatgcttacctggtacgttacgaacagcgtcaataacagaaacgataatagaatctttttgatgtgtcccacctactatactcttattttgaggcggcaaagatagtcattattttgataaatagccgcacatttcttccagatatttccgatctgtttcatcaaagaaattcaatagatcgctgtctatgtccagcactccccataccttaccgtcttttatcagcggaaccactatttccgatcgggataacgaactgcaagcaatatgtcccggaaaaacttccacatccggcaccaacagcgtggcaccctcctgccaggcagtaccgcaaactcctttgcctttccggatacgtgtgcaagccaccggaccttggaacgggcccagtaccaactgatcctgcttcaccaaataaaaacccacccagaaaaagtcaaaagcctccttcagggcagcagccacattggccaaattggccactaaatccacctcgccctctatcagggatctcacctgaggtagcaaagagagatattgctcctctttgctacccgatataaatgtcagttcttcagccatattattttattttccaccaaacagatattcataatctctctctgcggcaggtttcacccactcttccggtacaaatttccattggttcagcgcacgcggatcaagcgtacctttcttctcgatatactgcatcagatagaaacggaggtccttgtccgtagaaaagataatacgctctttcagtttctcctgcgggattcccgatccttttgtcagcagttctcccccgccgttgccacgataagagttcagcgccactttgtagatatgatccatccggaacggagaaccgtccgccatactgacaatagtcactttttctcccttcggtcgggtcacatccactgtgtagataattcccgcagccgaatcgaaattaaaactaaaattctggaacgaagcccggtcttcggcacctgccctacgtttttctttcagccacaacaagtggtcttcgggagatttcatccggttcgtccacatataataggactcttccaggaagtctttaatctctttgcccgacaacttcatcacataaagcatattttcgtacttatacagattgaacatgtcgctcacacgaatatctcctttctttatctctgcatcgaaagataacggagcggcaaacgaaatatccgctcccgaaatatcgagttgcaacgaatggataaaatcaataaatgccgacgaaccgaaataggcgggacgggtagacagatcttctgtaaataccccgatcttcttagatacaaacttctcaaccgccccgtattgcaatgcgaaatgtctcataaaggactcgctgactccgtattcttttgtatccgtcagcacaccgtctatctgtttgctcaccactttaccgtctttcaactttaaagtcacgtcaatgtccgacactactattccgttgcttgccggatcgattaccagtacggagtcgcctgccacattcaccaccttcttgcactcccgcgcatggtcgtgccccatcagcaccatatcaaatcccggtacattcttcgccacattcagcgaagcattctcgttatacttgcctgacatcacaaaagcatcttgtccggcatgaaacaacccgatcaccagatccggattttctttctcacgaataactttcatccacttccgtgctgtctcttccatatcgtcaaaccgcagtccctgccacagattctctgacaaccacgcgggaatagccggcgtaatcattcccagcaccacaatcttcactccgtcgcgctccaacacccgataaggaggaagatgagtctctcccgtagccgtttcaacgatgtttgcccccagcaccgggaaattgcactcaccaatccagcggtcgaatacagcgcgtcctgtttccacatcatgatttcccatgttcccggcgtcatatcccataaaattcatcatctcggcacatacgtgaggcgccactgtatctatataattataatagtatgccgaaggctgtccttgcagaatatctccgttatccagcaatataaggtttcctttatacacctcccggttcttttgcaccaacgcatatacacgtgcaagacttccgccccactccttttgtgtaatgaagttatatggaaagtaattaccatgtacatcactggtctgcacaattttcagtttcacctctctctcttgtgccggcaacacacataccaggcagagcaagaaagcatacatacaaatcaatcttttcatcataatcatgttttaaatttgattcaccaccaaataacactgagtcccaccaggagaatttaaataaggaatgaactctgtaagactctgtgtgaccctgtggtagtctctttttcttataacgggtgcgaaaccacaaatctcgccccaccttcataattcgggtcgatccagatatcgccaccccatttatctaccgtgagtttacagattgagagtcccaatccggttccctgcgcatactcgttcagcttttcgaaccgttcgaatacctgtttctgtttctccttcggaatgccgcatccggtatccgccaccgcaaacaacacccggttcttctccttctcaacctcaaactgcaatgtgatcgtaccattcttggtgaacttcgccgcattggtcagcagattgataagcacttgctgtaaacgttgaatatctgtctgcagaacaaaggagtcggtctttgtctcaaaaacaaaccggttacccgattccctgcgggacatctccaccgacgataatgcctgcctgcacagttgaaccacatcgcagtcttccggtgtcagtatcaccttgttcgcctccagcctcgacagatcgagtatatcattaatcagtcgtaacagcaggtcggagttcgactggataattctgaaataattccgctgatcctcttccgagctcccacccgaagccagcacatccgagaatcctacaatcgcattcaggggtgttcgtatctcatgactcatattggcaagaaaagcactcttcagccggttcgactcctccgcccggtccttcgcttcatacaaagcaacttgcgaacgctccagatcgtctttcaaccgctttgtccgcagatagaaatagatagaaaccagcaatcctatcaccagaatgcagaggacacctacgcccacccaaatctgataccggtactgtttatagaaagagggtgattcattgaccaactttaccttcatcggcaaagcagccacgtctatcttctgttccttcactttcttactgtccagcaacgcttccgtacccactacttctacccgcatattcggatcttcaggattatccaacaacttgaccgcctcctccgccaatcccttaccgaacgtccggaaaacaggaaccactccgcctacggcccaataacccagaccgatggaagtagccgtaaacgtcggtacatccggaatcgcctccatcatcgaatacgtagcattgcgcataaaatagccttcgttcttgtccactctccaagtgcctaacagaacggccgtatgcttcggcaatttccgaagttcatccacaatagtataaatggtatgttcgcgcccgtccagcaaaatcaggttcatatccggaaactgtttcatttcctttcgcacatgagcttgcaaagtgacgccaccgtaagtattgtcggatataaaagcaatgttcttcgtatcgggatagattgcccggatcatgcggatgttcgacgcgatgtcgtattcgtacagaaaaccgccgcatacctggtgcttcagactgtcttcataaaaatcggaagattccggcatccagtgtgccagatctttcccgtcgtccggcaaaagcaccacgttcctgctggtcagtgcgcacattaccggcacttctcctgtcaccgagtcattcagcgacagataagacgcccacgcctcctgtccgaacagaatgatcagcgccggttcctggcttccccgatatttatccagaatattctccatcactcccttccagcggggaaagtctgagaaactcttacagttcatgttttcaatgaccactccccgtttgccccccaacctctgatattcgtccataaagtcggatacattggcagaagtcggatacgctcccggattgtacgaacagatcatcagtatgggtttctcaccggtagcagcatgtcctgccatgggaggacagcaaccaataactaacagaagtaaataaagaatatatttgaacgataccggcatattcatctgttttagagtgtgtgtatccgtttttttatgcccgcaaagatagtaaaagttgatggttatagcagatttattgcgtacatttgtcgctcaatgtcctaaaaatagtttatggaaatttttcacaaaatgatttcggcagcactcaacctgccggaaaagcagatcagtaatactctcaggctgttagccgagggagccactatccctttcatcagccgctaccgtaaagaaatcaccggcggactcgacgaagtgcagatagaatctatcaaaacgcagtacgataaactctcagaactcgccaaacgcaaagagaccattctcggcaccatcggcgagcaaggcaaactgacgcctgagttgcggcaacgcatcgatgccacctgggatgccaccgctcttgaagatatctacctgccctacaagcccaaacgcaagacccgcgccgaagccgcccgccagaaaggactcgaacctctggctctgctactgatgatgcagcgcgagaacaacctgggcccccgtattcctgcgttcgtcaaaggcgatgtcaaagacgcagaggacgctttgaaaggcgcccgcgacattatcgccgagcaggtgagcgaagacgaacgtgcccgtaatgcagtgcgtaatctctttgcccgccaggctgtcatcagcgctaaagtagtgaagggtaaagacgaagaggccgccaaataccgggactatttcgacttctcttctcccttgaaacgctgcacctcccatcgcctgctggccatccgccgtgccgaggccgaaggtttgctgaaggtcagcattacccccgacgatgacgaatgcctcgaacggctcgaccgccagtttgtccgtagcaataacgaatgtggccgccaggtggcagaggccgtacaggatgcctaccgccgtctgctgaaaccttccatcgaaaccgaatttgcctccctcagtaaagaacaggccgatgacgaagcgatccgggtctttgccgaaaacctacgccaactgcttcttgccccacccttgggacaaaaacgggtaatgggtatcgatcccggctttcgtaccggttgtaaggtggtctgcctcgatgcacaaggcaatctggtacacaatgaaaacatctatcctcacccgccggtagacaagaaaaccgaagcggcttcgaaactccgcaaaatgattgaagcttacaagatagaggccatcgccatcggtaacggaactgccagccgcgaaacggaaaacttcgtcacgcaccaacagttcgaccgtcccgtacaggtgtttgttgtcagcgaacagggtgcttccatctactcggcctccaaaacggcccgtgacgagtttcccgattatgatgtcactgtccgtggggccgtctccatcgctcgccggctgatggatccgctggcggaactggtcaaaatcgatcctaagtccatcggtgtcggccaataccagcatgatgtagaccagaccaaattgaaaaaatcactcgaccagacagtggagaactgtgtcaaccaggtaggtgtcaatctcaacacagccagcagtcatctgctcacctacatttccggtctgggtccgcaactggcacagaacattgtagcctaccgcgctgccaacggcgcctttgcctcacgtaaagagttgatgaaagtgccccgcatgggagctaaagcttttgaacaatgcgccggattcctccgtatcgccggaggagagaatccgttggacaacaccgctgtgcatcccgaaagttatgggatcgtgcaacagatggccaaagatctgtcatgtactgttcctcaactgattgccgacaaatcgttgcgtacccgtatcgaaatggaaaagtatatcacccccaccgtaggactccctaccttgaaggatattctgcaagagctcgacaaaccgggacgcgacccgcgcgataccatccaggtatttgagttcgaccgtaacgtgcgtaccatcaacgacctccgcgaagggatgactctacccggtattgtcagcaacatcaccaacttcggagcttttgtcgatataggcatcaaggagaacgggcttgtccatctctcccagcttgccaaccgattcatcaccgatcccaccgaggtggtctccattcatcagcacgtcacggtgaaagtactgagcatagacctcgaacggaaacggatacagttgacgatgaaggaggagtaaaccggtttaaaataatcaaaagccccggtctcccttccggtgattcctgacaagaataaacgacaaccactgttgtacatacttttatcggaagagagtaccggggcaatctgcaaacttgtgttatctaatatcactctccggcctgtgtcgccagatagtctatcaactgttccatcgaagtatctttgagtatcacccgtttccgcccgtcaagcagatagatagtcggcgtagcgcggatatcgtaaagttgccgggttcggatatcgcctgctttgttccagcccacgatccatccccgcggcatatacactgcctttgtcgcccactcttccctgttttcgtcaggatagatagccagcacccgcagtgtcccgttttccaccatctcaacgaaagcaggtatttcagcaaataacttctcaaacttccggcaattcgaacagtccggatcgtaaaagaacaacatcgtatattgggctttcagcctgctcatctggctattgtcaccatgtaccgtgacatatgtaaaatccgccgctttcattcccgggcgattcttgtgtgcctgcttcaatcggtctgccggacggatcttctcccattcctgcaatctgtccgattgcagcatctgttccagtaccgcgatgtaaaagtcttcgttgcgcatcggtgaattcggctcgttgagatacttttctcccagcaggcaaaagcgccggtatgccgtactgtctgcctccatccgtaccatcatggtatgcaatgcctttcgcccggtctcaggttcgacatacttcagcgcatcgataaagtcaacatacaactgctccgtgtctccactattcacccatgccgtatcacctgtcagataaccatcccagtaatgtttcacgtagtagaccgcacgttccgcaggatcggtcattatctgtggtaaatccggccgtgtataatgcaccacatgcagcgtgtctgccgccaccttctttttccattcgctcccgtctcctcccgcacaggctttcaccatccccaggcccagacaaatcaccatcaacgctattgaggataccgtcaatataaatgccattaaattcttcttcgcattcattttgcttatgtttatttctgcaccgcagaattactcgttccttatcttctccaccttcctcgtaccacccaccgcataggcagtacatacacctttttttcatctcctttcagtatcaccgcaggacgatactcacccggcttcaactccggtaaagccacaaccaccttcccctcagagtacgtatacacaagcctgatatcgatcacctgttccggtttggcatgtgtcaccaggcacaatctgatattctccaacgcataacggttcagattgtaacccgaaacaacaatcggtgcctgcgatgtaatagtcccgtctctcagcccgctcagcggatcgtatactccggttatctccggaatgtcgacacctccccacacctcctcgatctttcttatctctaccatatctttcaaagtttatcgttaaccatttgtcgttcatcgttgaaaatgcttctcaccggaaacccatattttttcatatcgtgcatcagatacatctgccggctgggttccacgcagagcgaataaccatataccgggctttggctgctccccgtccagtagcgatgcccatgcggaatcacaatccggcagccgttgatgtgactccggtgtccgcacagcggcagatacaccggtactccgtcgtcactcagaaggcagatattcgtccggtcctcctcccgttgaagctccatcggagcagcgggactgttcatcagtgcctccatttcgatacgcgatggtagccgccacccctccggtgaagggtccaactcattaatccgtgcaggactctctgccgtaccatcgtaccaactgccgcgacagggcgtaaagttctcctcccatcgatcagtaggacagccaaactgaaaatacgtaccctgattaagcgtggtatccacttccaaccccaacgggatggctacctgtgctaatttcccgcctgccgccagattacggtccagccaatatttaccccggatacgtacgtaaccaccttgataaataaggatatcgcgtaccacgcccgtatcattcaccaacgagagcaccgtgtgacgtgctgccggaaatccaccacgcacccggtatccggcattagaatgcaccttcaccgtgaaccgtccgtcataatgtccttgcaacagttcgggttcactcacctccacccagtccgccgccttgtcactcacgatgcgccatgactgattactgtccacacacacgatgtacgtcctcactccctcctcctcccgatagtccggtggtgtctctatcaccctgctatggcgtgcgcaaggatcctccggcggatattctatataatagtcaaagcagacaccctgcatcaatagcagatcagttgtctggctgaaaggatatgtccccgtctcgagtgtcagtaccagcgagcgcgaacgcacactggcaggtttcgcttcaaggtgcactttcaagttctggcttcctttttgttgcaggcctacgggcggatagaccgaataccaacatccgccgtcgttagcgttggcgctcctcacacaccagcatgcctgttcgttgtcggggataacggttagcgtcaccgcctcgttcttccgtccggtactgacgtagagccggcgactgaccgtcaatgtgggatgaatacccatcacttgctgacgcaccttgagcaaatgtactccctcactgttccctatttcaatggttgcctcccgttccacggcagaaaaattggtacgaaactgcatcaacaaccggtccccctcacggcgcacggcaagccagttgtccggttcaccttctgcataatgcacgcttcccgtattccattgttcgctacaccccttcaactccaccggaagctcctttgccattgcgtccgtaatcacttctgtcggaagcaatgcattcagtgtggcagaatcgaccttttcattttcctcgtctgtttccgtaccgaccactatcaactctaacgatgtgccatgaataatctcctgcagtcccgtttcagcaatacagatgccggcatgaccggcaaacaggcgggacacatcatcacgatgatgtatcccgctcaggcagagcgcatgaggtgtaaacagcacacagaagttcaacattccttcctgtacggtacaacgcagccgccacctttttctccgtttcagtacatccgcctcagggtacttgcgcaccagatatcctcgtcggtcaaaaaccaacaagactgctctccggcactcttccgacaaatcatccgttcgcttcagaatcagatgcaccggccattcacgggcgagatgcacttttcggttcacccgccaatacttcacggcattgtatgtcatccccgaagcgataaacgccattgttgctatttccgctatatccataactttcgtcagtttgtgttttccatttttattttcaccacaggttacaccgattctttattatcctttatttagcgaaaccacacggagagaaaaaaacgaatccatgtgaatctgtgtattctgcggtgaacctttacttactttgcaggaagcgcagtgcccttcctgccggcacacttcctcctgcctgtgccaggctcaggtagacttccgcctttccccggtcaccttcaagcaggcaaagaatacccatgttacacccggcttcaggcagggtggcaaagcgttgcagatatttccgggcacgctccgtatcgcggcgcaacaaggctactccggcagcgttgatgcacgccaccggactatccggataaagacgtcccgccaagtccatcaagtcattgaattcagccgaacctacggcatgtgcttctgccaagcggcagaagtccgccaccgagaatgcttccggtttgcccgaagtaacaaccgacaccccttctgtcatgcctgtcgacggctgtgtcgcgatgcttccgtccacgtaggttacctcgtactcaatgcgacgtaacctcccgaaaaaagccgacgacaaatagtggtaggcagtcccaccggccaaatccatcagcattcgttcacgaccatccaccacatccactgtacggataatatcgagtacggactctttgaatgccatctccgacccaactatcagatcggtcaatcctttccaatcctccgctatccagttcacctcaaaaggcactgtgccgaagcttttctcccgccgaatataatctttcaatgccagtgcgcgttgtaaacccagacgttcgttcgcccgatagtcaccgtccggagccgtataacctgtcaaacgaataccttccagactcacacccggtgtttctctaagcggacgtgtcacagccaaaagtttgtaaacagcttctacaaagttacgctcatcatacttcgtcttctgcccacgaccgtaatccagcacgatgctgccactcactgtctgccgcacctcctcaaccttcggtgcctccgtagccgaaggcgacaaaaagcctacccacgagagcagcatgctgtccgtaggcaggtcaactttcacctcgcatacggacaaagggcgtaccgaggtagactttcgagtacccaccggggttattttctgtcgtacgtttcgtttgttgttcactgccgacgccgcttttttttccggcgagtcggcaccggtccccgctcctgccatgcccggaagcaacagcagacacaagaccatgctcagttctcttttcatcttatctatctaaaatcaatttattaaaaggtgtggatagcccgtataaacctcacacttagcgagcctctcctatcatttattatcagtcattttaaaccacacttggagtattattctgaatgggattcttcggatcatcccccgacgtatacccgttgtcggttacacccgcactcggaacaatctgcacatcattgattgtcaatgtaacatgatagtatcctcctgcattcaatgtaccgccaaacgcagtaaccgtgaccgtacggacttcaccatctaccgttaccgaaatggtcaatttattatcagtcaaaggttgcggaggaagtaaatattcataaacttggttcccggatgcaatttctacattcggattgtgtacatatccctccgccgcaggggtcccttcggtaatcgtgccggtagttatatcgacttgccgctgaagataaaaattggttgaattattcttcaacactatgttttcaattttgcatttacggcctgacatcacattcgtcccccggacaaatgtaagtttcaatcgggcatacgcatgtttcatatcaataaatcgcactcctttatgatcattatttatcatgcctgatccatctgcagacgtagcgctaccgtaacacatatctttagctgcatcataaatccgggcaaccaaaatcgccttcgtagtgttatcggcaaatgatacagactgataaggataatatgcgtacaggctcgccgaacggtgatccaccagtatttctgtagtagccgtccaaccggctacaccgtcgtaactatagggagcatcatactgaggtggatatccattagcgtccgtacggaaaatacccaatttataatcaccagtattgatgactccgcgtgtggacactctcgtactcaaagaagcttccataaccccgataggcacttgtctatcggttgggataggtccttcttcctccttcccgcaagagaaaaagaggaatagacttaatgaaagcaaacaacattctaatacctgtttcatagaatataccatttatcgtttaacacatcttatcgttctgccatcaggccgcgcccaactgttgtctataccggcactattattaccttgcatagcattaagccctttggctgtttttccggaaggagtccgggaccaataaaaagcccaagctccgtttttcgatatagtattgtttattgtagtagaggactgatcccggcttcccaaagcaagcaggaataccccattgttccctccgaaccaaaaacctttaggagagccgctataggtaactcccgcattaatcagatcttgtagttgtccatcagaaggtgtttcccaagtaccgggagggactacttgataacaggggtcattggccgtagaataattcccactattatatttacctacaccgatatcaagagtattccatccgatgaatcctccttctgtcgcaccaccatgataatttgactgagaagcctcaaagtaaaaattagatccgcttttataaagatttccccttgcccatttatagctcctcactgaaatataatttggcacaatgctaaccgttatcttataattaccggctgcactgaatatacggcttgtagcactaaccgtaatagcgttattcatttgtccgttaccgatttttaaagtagtaaacttaatcgtaagcgtacggctggtttgaggaagtaccttatacacattactattcaccgtggttgcattcggattagtccatgccacgttcaatgtcccgcttgtccccgttacaggaagagttgtctggctcgcattccaggtcacagggctgttgctaagtcccgagatagttgccgcacactgctgaaccgtattattattaaactctttagccactacacacaactgaagttgggcacactgccttgaaaaactaatgccgctcaacaggcattgcccgcttgcatcggcctttacatctaccccggtcttctgacacaacatgaaatcctggttatgcgtcactgtcgtcgaccaattaccggacaaagcagccggagcagaattggttccgtatgaatagaagacaaacgcatacgtcccgggccttaacacccactgtccggaaacagctgcgggagtggctgtattcgctacaatcgaggcaataccggaagcattggtactataaaccgctgtacccgcataattagcagccgttatggaattgtttttataggctacaacccgaaactgcatattggccatattgccacgcgtctgtaccggattaacgggaagtaaagattcaattgtcgtttctacatcatagcccgaatcataagtactgtccaaaggctgcactatctttgtcaaaatctctccggaacgggtaaccgcaccacccagaaactcatctaccccatccacttttacgttgataggtaccatctccccatctccttctatcggatcatgatgtcccgaaggaaatctttcatcttcctccctgtcacaccctgtcactgtaagcaaaatcaagaacaaagaacatgaacaagccattaggcgaatcatacttttaagtattcccgtttgcgtcctgtcaattgtgcatctcatatttataatcaaaattagtattcccttgagtcccgtaatcattcactgtcaaagcatccgtaagtaccatctgtatatctgtaatcgtcagagatacattgtagtacgacccggcatccaacgaactgcccaatcccgcaatattcaaaaaacgcacttcgtcgtccaccgtcacaagaactgttaatgtattgccggcaagtggctgcggaggcaacaagaagtcatagctcgattgccccccaatcgctatattcacattcggattataaacataacctgttgtcacggcagttccttcggttgcaccggctgccgtggtgatatccaaatgacgttgcggataaaaatcggtattattagattttaaagtaatattctttatattacatgccttactcttatcataattcgttccacgcagcaatgtcagtttgagccgggcataagcgtgtttcatagctgtaaactccacttccggagcatcattattaatcatgcttgcactccccacaggtatccccttcccatagcacatatctttatccgcactgtaaagttgcgcattcaggacggctgttgtcgtattgtctacaaaggaaacggattgataaggataataagcatacaaactcacccctcgatgatccaccttcacttctgtagaagccgtccatccggttgctgtatacgtataaggcgcatcatactgaggagggtaacctttgtcaccggtacgaaacagtcccaattgataagtggcgttagcaatcagcccacgtgtagtctccgcaccgtattcaggaacggcaacagtcgatattcctataggaatctgcctgtcggataatatttcggatgaagtgtccgttgtaatctctgccccgcatgatatacacaatccgcacatggcaataaaaaacatactattaattttcatgaccaaaaacagtttaaaacagaatttgtatgtatagtagcctcacctatcaagtctcccgaagcagtggttggcgcaggccagtcaatagtagaaaccccatccggagcaatgacgattccatgcgctccttgtacggtgatctcaatcaagtattttttcccggcttccaattgaggtaatttagaacgcggaatccccaatgtatatacgtcaccatccactgtaaggtctactttcatgccacagtcagctactcccagaatggttccgatcgattctaatgtgcaaggtacgataagaaagcccacctctacataatcagtttccagttccggaatcgtttcgtccactttctcagcgattcccggctccggggtggatgcattgccggcataagttccgtttgtaatatccagtgttgtatatgtcaatacattagacacttttactttagacaacttagcctctttggtatacaaatgcctgtttatccgaaaaacgacccagctataagcatgatccatatttaagaaagaaatatctacaggaactttacttcctgcaggctgagcaaaactgatctcatcggttaccccggttcccttcccatagcacaaatcctttgcagccgaatacagtcttgaccttagagggatggctgtccgatccgtataatccaatccgttttccttatcggcatgataaggatagattgcccaaagatttgcataaactccttcggccagtgacacagtgttttcatcatcaatcggcgtccactttcctgtcaccttggtatatttacagttattcctgtccgaatattttcgggtactaccagctccattcgtcgccacatcatccgtcaaaaagacaccgatggaatccccgtcttctatcgtagcacgagtattgaccttatgcggttcgattacactcacgctattgatgacacaaggtacggtggcatcatcgggtataccatccatattgtcatcttggttgcaggcgaccaaaatcagtagcaaacaccaaatcctgatcagatcatttagattattcattattctttttttacgatattagacttcaccattttcaaaattttcatcttttgacgcatcttatcgggaatgcatcccaataccaataatagttattcttaacagcatagctctgattaaactccagataatagcaacgcttaccactggcgcccgtacagcttctgtaataccccgtttcaggccaatagtttacattattcttacctctgtttcctattgcgggcagaaaaaccttatcaccgccaaaaaatcctcctctcttactattcagatatccagacctatatccactatttcccagattttgtaactggttggcagtcggagtacaccatgtgtgttggggagcaactttatcgcagggatcattattggaagaaaaagagcttcctccatacgtgttattatcggaagaggtagtattccagccgaaaaaagatccaccttgtgtaccactgtgataaccactttgtgaggactcaaaataaaaattactcccactcttgtaaacattcccttttgcccacgtagctccccccacagtaataccgtttcctgttatcttaacagttatcttataattacctcctgccgcaaattgacgcccggaggcattcaccgtcacacggttattatattgtatattaccaattcgcaaagtcgtgagcttaatggttaacgtacggctgttctgtggcagcaccttatatacattactattaaccgtagccgcattcaagctgctccaggaaaagtttacagctcctcctgtgccgcctgttgaaagggctgtctgaccggcattccaggttatgctgttactattcaggttggatacagtggctgcacattgttgaaccgtattattagtaaaatcattggccgtgacagccagttggagcaaagcgcactgacgcgtaaagctgattcctcccaatgtaaactctcctctatcatcgggagccactacaactccttctttccggcaaagcataaaatcctgattgtgcgaaacggttgcagaccaattaccggataacatagtcggtgcgctattcagtccataagaatagcacacaaaagtatatgtgcccggccccaatatccattgtccggcactattgacaggagtagctgtcttggctacaatagctgcgactcccgaaccatttgtcttataaacagctgtccccgcataatgatcggcagacgaagcatctgttctgtaagccaccacacgaaactgtacattgtccaggttggcacgggtcgacacaatattctctaatggaattgattccactgttgtctccacatcagatccggtatcataagtagaatccaaaggctgtaccaggcgggcaacagtttctcctgaacgcgtcactgcccctccgtaaaattgatcaaccccgtccacactcaactgtatcggaatcatccggctttcatccacggagggatgttcctcctccggagacgatggataaaacgtatcactgtcctgagtgcaactcactgcgaaaagagaaaatgccaggcttaaaccaatcatttccatgtaccgtctcgttccgccatttacttttagtttatctttcagttgtatcatctttatcctccgtttatgttataattccgtatctacctgagtatttccttgtccgccaaaattattgacagtaacaaccgccgatgacaggatgattcccacatccgtaaatgtcagtgatactccataatatttccccgaatccaaagaactgcctaacgttgaaatgtcacaactccgagttaccccgtcgacagtgacaagaatagtcagtttactaccggccagtggttgcggaggaaacatatactcgtatgtcacacttttaccggtggcaatattaacgttaggattatgaacatatccggcagccacagcgcttcctccggtagctccggcagtggaagcgatatcgaggctacgtgtcagataaaaattggcattattcgatttgaaagtaatattctgtatattacattttttagtcttatcaaatttttccccgcgggtcagtgtcaacctcaaccgggcatacgcatgtttcatattcagaaactcaacaaacggattgtatacactaaccggacctccacccgaggcttcacctgctccatagcaaatatcctctccggcattgaatagctgtgcttgcagggtcaaggtagtgccacctgccagtccggcataatttccggtcgctgtatgataaggataataggcaaaaaaagaagcattccgataatctaccttgattacatcatcggctccccactctcctcccgaataaatatgcttcacattgtataaaggcgcataagtaccggcagtggtccgaaagacccctaaagcgtatgtattatcgtttattattccacgtgttgagggcctatcgtcagaagaagcggacactacagccagtgtcttttctccggataccttatcttcttgttcacaagagactaatgcaaataggatgcaaataaaaaataataggtttgtcttcatacgtttaatattaaattatagtgctcctgatccattttctgtaggatccgacgcccaatcttctgttcccactttaccaccatcaataatgatctctgttgtatctttaatagtagtggcatcaccaccatcaaggcttgttgattgccactctttcgtggtaacctccactatattaatcggtattccccctctgatatccaatcggactacgtggcgttttcctgctatcaactcgccaagatccgcctgtggcacaatcacactgaactcacgttcatcgatggtcaaagtcagtttcaacccggacgcgagagtctgaggaacaaacagataattacaagtggtatctctcgccgcttctcctacccccaatcccgtgtcatgcataggtccggaggttggatatgaataagaagtaacatccgttgtgttttgcaggctcccgtcttttatatcgaatgtcccctggtcaaccatcgggtccccgttttccaattctatacgtacattggttattttacattgcaacggataccttccgttacgaatcatctccaaagagagctgagaataaggtttctctaataaaaattctatctcaggtgacagattagtgactgtgacagccgcattatctttagcataccaccaatccgcatcctccgtgtaagcttggttttttagtgtagttcgtgtatctgcagaaaaagtaactttaccaaacggataatacgcacacagaccggctcttgccccgcccacgcaaacagaggtctctgacgtccattcgtcatcgggctgacaagtgtatttcacattactctgaggggtatagttagcatccgctatcaaaaaaactccgatactgctcccctcaggcaatggttgagcagtagctcttgtagtcacatccgccttgaacgaagtgaatacgcttaaaggcaccctgtccgttttttctgtcggaaataaagtcctttcctgcgaacaggcaaccaataataacatcattgcatatatggcagccacagaagtatttatattcatattgagtttcataatcatgctgttcatttttgtataatcattaaggttggggaagcggttcataatctacaccttcattcagtattttctcatcccagtcagtagtggttacattcaccgatttaattgcgatccctctcaatttcaaagagacaacgtattttttaccactttcgaaatcagagagatcgtctatcggaatgatcaccgttgccggaaatccacttacattcactatgacgctaagccctttagtgggttcaaaagggtcaggcaataattttgtaggaatcataagcagatcagcctggtattttttatcaggactgtctaaaagataaggaaggccttttgtaatgttatatccacccctgaattgtttctccgtatcatccggatggatgccaacagtaccactcgtaatatctatcaccgcttttcgaaacaatgagtcgtttgccaaagccactgaattaatactacacgtagccggataagcatcttcgacccctatattcaatactaaacgtgaataagcatgcttaaaatgcatttctacaaaatatctcttagcatcgacttcctggttagccacataatacagttcttttgaaggatcataatcttgcgtatccataggaatggtagtacggacattataaagagtatcagcagtcccaactgtcccttccacatagggataatacccgcatacatccgccttctcgctacctaaataaatggtagtcgcctccgactcggctgtccacttactatcaccggaatttagcgtatattttctgttattcacaggcgtatagctcgtttcggctgcctgcccgtggcaaaacaaagcaatggaacttccgggcgtaaaaggtacatctgcacgagtctgtgtattgccttccacaatagaagcagacactatttccagctcagtacgggctgttttgtcttttcccccgtccggcaagccatcactatcgctgcaccccagcaatatgcaaactaaaaaacttatgtatagtactcctttcatagcagctcagttttaaatatgattttattcaacaggatatttattcccgccattaacctcttcatcttcccattccaatgctttgacggtaggcacgatttctgtccctttgatctttaatccgataacatacttttctccctgcctgaactccccaagttcggaatacgggatctccacgagcatctgttgaccatctatcacaaggctgacagacagcccgaattctcctccttccgcatctgtccgctcaattttaagcggaaccggaatcatcagtacacggcatacataagattcgccaacagacaatgtatgaggtgaagcatcagttactgttgtcaaatcataattccctgtttccgaggagtgtatacttccgtcaacagctatgttaatagtgcctttttttattagattggaattcttcaaggttattttactaatttcacaaggcataaagtagtgatcacggctgatcttcagctccaccaaagaataagcatgtaccatctcaaaagtaatcgcaggagtaaaaccatttatcatcgtattcaatgcataatagatatcttcagtttccacatagtcctgtgattgtaatggaatgaccgtcttgtccgtatacgaatctttataagggtagtaagcgcagacatcagcatcgttacccactaaataaattgtatcattagccgtcggaggtccccaatgaccttcgctgtaaatgtatttacggttgtcaataactttatatccgctatcctcttgtccgctttcaggttctgtgcccgacagaaaaatccctatggccccttccgtcaaaggtaccggatcgggagctaaacgtgtaaccacctcctgcttaatgactgccgaagatacctcgagcggtactcgaagtgcagatgctttccatctcccgtcatccatctcacggtcatcagaacaggcattcaataaaatacctcccaccaggatcaataataaatgtttcataatcttcatattctaattaaaactggtatcataatcactgccactgcctccggtccctgtctgcacctctgtccaatccctgtcaatcaggattttgtcactcatcaaagttaactttccacctttgacaaccaatgacacagtatatttagtacctcttacaaatgtgctcagtttatcgaccggaatagtgacggaataatccatgccatccaccgtaagtgtcagaactacgcctccggaaaaagtttgttggggcagcagccagtcaaaactcgtatcatctgtgaccccgatctcaaatccgtcttttaaaccggtcgtcacagtatgagtatattgaggtgtttgtgttccacttccttcggttccggtactgatgtcaaccgtattggctgtgattatatttccggtagaagcctttatttttgcctgcgttatcttacatgtgttcggatacgtggcatcccgtaccacagacaataccaaacgggcataagcacgcttcaattcaaaatttgcagtaggagtctttttccagacttcatctcccccactgacagcaaaacgcatatctttctccaccgcataagtctgcatggtcaggccggcttctgttttcaacgaactatttttaaactccacagagttatagggagcataagcacacagcctggcataggtaccgcccacatagatcactgtggaaaccggatgccaatttcctcccggcacacggtcataacgaatattatccaatgccgtataatccgcttcggctaaacggaaaattcctaatgtcccttcggtcatctctacagcagcgggtgcacgggtgtcaacctccgcgccggttacagcccgtacttcaagaggtgcctctccattcccgccttcaatggagtctgcaacctccgcttgcgaacaggagctccaggctaccattaaaaggcacatcagccacagacatcctgccaaacgaaaacccggattatgcgtataaattcgtttcatgattcttccattttatggttcgggattatattcaccatccaccggttgattatcccacggagtatctttcacactgatttcaagtgcagttccttttaacttcaagctgatctgatgaataacacccgcagtcaatgcccctaatttatcatgcgcaatcggaactgtcatcagcttaccgtccaccgtcaattcaagtgttacccccgtacctccggcattcgccaatgtgcagggaatcatcaatacattactttttacagtccccgattcaggaaccgcaataccatcttcgtgttttgccacatttgtccagtaactgaccttctccactgttaccggtgtatagcctcccgttgccagattcaacgtagcagtcttaataatatttgcattctctacagtaatctcagtcaccttgcatgtattgggataatcctctctgctaaagacaaattcgatctgcgaataagcatgccccatagtaaattcaacgctcttacgggcagaagtaccgttcactgtttgattggttgcatataccaaatcgatttcagcgtcgtaaatctgagagaccaagggaacagcctctttagcggataaatctaatttcgttgttttcttataagcacatacatcggcatcctccccccccaggtaaatcgtttccgttttgggtttccagcctacattataatcatactgtatattgtcttttttgtcataaccggttccggaccggccttccaaaaaaactcctatcgaacctgatgtaagcaattccggcgtaacagcacgcgtctgcacatctcccgttacaaacgcagaagtaatctccagagggactttcggttcttctgccggaaaatcatcattaccacaacccaccagcaaagtcagcgataaagcagctattataaatggtttcatatcagacttggttttcattactatccttttgttacaatcagttattaatctaaagtcgcatcgttgtcacctccgggtacaacagaagtatcccacggatatacttttactcccgagacatctactcccgtacctttgatctccagagaaatggtagataaatatccggctttcagagccttcaaaactttatagggaatcgtcacggaatattcactaccgtcaatggtcaatatcagccgggtatcatcctcaaaatcttgtggaggaaacaatttgctgatactctcatccgtacttccttgggcgatacccgttgtccccacagcaagcgcagatgtatccagactccaaccggaagcggtactccctcccaactgccccgcatccgcagcggatttactgatatccatgctacgttccacataaaatatttttccactcgttacaggttgcatcactattctggtcaacttgcacttcttcaatggataagtggaatggcaagcaatactgaacttcaaaccggcataagcatgctttaacaagaaggaggcaaccggcgtacggttattaactgccgtaagaggagcatcagcataacaaaaatcattatctgctgtatgatctttcactgtcagagcagtcaccgtactattagcgccgaaagtgaccttaccatagggataataggcatgcaaagaagcatccgtgctcccgacatatatcttgcttgccaggctccatgaagttccgtcgtgaatgcactccacatcgtattgttgcggaaacgtagcgctataaggtgccgtacggaatattccgatagcggcattcgacaaagtgacagcacgtgtaccaatgccgttgtccgtaacggtttctaccctgacgggaacatactcttcttccccgccggtatccaccggatccatccctccgttgccacaggctgtcagcaatattcccatcccgatatttgtcagcatctgtttcatctttatctgctttcttaaaaacataattattcctttctgtctttttattgcggcacaaacggatcaccggaggggtctttgaccacctcccctatccattcttccacctccacagtccctatctctacttcagtaggacgaataatggcatttatctcatattttgtcccttccgccaattttccactcgtaccgcaaaggtccgaagcgctgattttacctttcatctcctttccgtctaccatcaatgtaaaagaaagctctccggtaaagtcagaaggtaccaccatataatccagaacggcaggagccgcggtggtcccgatactgatcggaacgttataattgaacgtcacttcccgcgcctctccttcaacagttccggtaaacagatccagaattccggcaatccgtaaggttgccttgaaggtaaatgagctaatcttcccgtccccggtatactctcctttggcagaagtcggagtcccatctcctatccccctgataaaattgaatctcagcagcgcataggccctgcgtaaattcagtgtaatgggcccggttgaatttgaggccttaaaaggacaataataaatctctttcgaagccacatagagctcactgctcagccctacgctactcgccccatcttctctataaggataataagccgtcagttccgccggttcatcgatcaacaccacctcttccccgtctgtctcccaaagtggagttccatacgtatactttctgttatgaacgggctcataaccctttccggtatcttcttttcgaaatataccgatagcatcagtcgcatcagtcagttcggcagtcaccgaacgcgtaagtacctctaaccgccccgttgaaacaccgcctatacctaaagaagcgcgctccccttctcctgtttttccgttatccggaacaacgcaatcatattgcgaacaggagaagagcgccatacacagaagaatgcaggatttctgaaaacaatctattttacacttctttattttcatcgttctgattattttttatgaaaccattcaattcacttctacatccggtggagtcactatcccgtcaggaactttccaatccgtaggaacagtaacagtttgtatgcctccaaagctgccggctccgtaagcatcatcgggagtatcagccccctggctcaaaatatccttaataattactgtataaacattgttacgccgtaaatactggacatcatctgtatcgatattaatattcacccgataccatccactgcaagaagaagaagatttttcacattccaagagcaaacatactgcctgtgtctgtttcagataaggagtatgcagggtgcgcaatacttcggtagcatacaaaccgcctatgatgctgaattgctcctgtgcacttttcgtattcgcgtatgtcaacggagtaaaagccgcatcctgcggatcattaaacataggtatgtccggtgaaacgttacgaagtacagccgatttcaggagaaccgtcccctttttatcctcagccacccgtacatctatgcgtacagcagcacgcagcaattgaacgctcatatcttttcccgcttctttgaatgcgattccactcatgggcaaacagtcgtccgtaaccttataggtcctgtccgttggtgaatacaacggcatctctccccggagttgtacccgtaccgcattttcagtctgtccggcacaataggcatcccaatccattccggaaaaatagaccgaagcattggcaagtaccaatacatcgtaatccgtgtgattgtcaatgcttccgcttcccggtatagtcaccgatatttttcctgttttagccaggtgattgccatctacggttccgtctaacgagccggcatacaaaccgttaccatgctcgtcataaatgaagaataaaagtttcacatcctttatcgcactttcttccggacgggccacagatattttccctcccgtatcggacgctctggtatccggtatttcagtatcgggaatggtatagttcagcgtacaaatggcaggatcaggaatttgtatatcatgtccctcttcacctgaacaggctatgatccctatcaagcaaaatacgcttaaaagcatacatccttgccgcatattttttttcaatcgtttcatgagtcaactaatctatgtttatttttacagttcatcttcctgagtcccgccgtttccccaatcatcgggtgaacgatccacttgagtcagtttaaaatgcaccgtcaaattctttacttttatatagaaatcgtcatcataagcctgcccggcaggaagatctccgtaagactttttagcctttacggtaagagtattcccagtaacggttatttcataacggtcattggagatcatagccgatgcagcaccttcagccaccgttacaggcacaaccgaagcattaccgttaaccgtactcgacgtgttaaaacttaattgccagaaaggaccgaatgtgacatcactgtctatggaaaccgacttttgtgaatctgcatagccggacaaaacaatcttctttgtagccgaagagaaccagttttcacggtcaaaatcaatttcggtatttacatcgatccagtcaatcacttttacatagatattcatcggaacccctacagccgcatcgtcaggattgtcatagcccgatcccgagacattcatgatttgaaaggtatacttatgattacgtaatatttcaaccaaatttttcggatcgtccggatctgtcaggtcaatccggtaataactgacctccgtatcctctccatacactccgcctaccaccagacgggtagtagccacttgggtattgccggcaacagatccgggctgatcaaaaccgttatccgaataataagtgttttcgtatagatagagcggtcccgcaagtgccacgggagtctcacttttcaggaaaagcttatcccctatcggacggacacccaatttatcgggtaaagttgttttaacgacgttacgggtctttttttcctcttccgaaccggcgactgccgtttcataaacctccttcaacggtgccagcctaccgctatctgccgggaaataagcataaaactcacgcaacttaaaaatcactttaccctcgctatccaacaactcacccggatttcccgtatgcgcttcatccactttcgcctggacagcagctacggaacgcaacaccggtacgctaagcgttttacccaccgattctttcgctacagtgacacctgacaaaaagccgtgcatcggcaaacagtcagttcctgtcgaattattttctaccttagatatcatcttttccagtaaagcgtccatcttcatgcccagtcctttataggcaccgctacgcaccaactcttcatggcaattcgtaaatacatgtacctccaatccttcccccacaggcatagtcacctgaaacgtattcttaccggtaaccggtgttccttcggataccgatttcagaaacaatccgctctgggaggctgttcccggagcaaataccaatacgtcaatgccattaatcaccgtctctttactatctgtctcatcagctccggaagcataagtgcggggaacattcacacggaggtacatatccttatccgggttctgagggatactttcggaagtatcatccgaacacgaaaccaaagccacggtcagaaacaccatcaatcgacatatcagaattcttttcatgctatactctccttttatcaacttgcctacatattactttctattgtcgccactttccagccattgacacgaacttgcataacgggcttcacataatgtccgtcaatcaccagatcaatgaagttgcccggaacagaagtcaactcaataggtgcgcaatcgaatgaagcgacctgttcatcacgaataaacacattcactttcagatactttccttctgaagaaaaagaaccgaaccagggtgtgagcacatttccggtactttcttcgtaatagcactggggttcaagtactacctcatccgcatttgctttattattataatcgacaccgctacgcgtaccgtaaaggtggaatttaaaatcttcgggtgaaggaataatgttgcttgcagcacgcgtcgttcctccttcttcaacgacctgatcctctactgtctgaggaatcatcgttatacgtgtacggcacacagcacgtacaaacggaatggttacaatattgcgattttcgcgcaaaccggcatctatggcaatgcgtccgtacaacaggtcgtctacaggtcggcagattccgctgccatcggtaatttcttttaatttcacatacccctctcctatgggagtatcaggagtatccacataatcaatcgcctcatcctgtgtccaagctatcagttccaggctatccgtatcatcaaagtttttcaggaagcgataaggttcggtcagtcctatttcatccacggctatttccaactcccgatatttatgcttctgtttataaaaatgaagttgcgtaggagtagaaaccgtctcaaaaaagcggttggctccaccataaatatagctgaaatagatgtgcatatatccggcacaagcatccatatcatctttaatacatgaattcagcagtagggtaacccccaaaagtatcggtagcaatttcttcattttagtttcgtattcttctctttccgacaagaaaaagatatcaaccggagcggactttccatccgccccggattatataaaaaagaggttctgattacatatttatattgttaacaacatatttccatggcttaacaactacctgtacaagcatgtcgatattatccgaattgatagcatcttcaatgctcttggcacccagtgtagtgatggtacctgttatatgatagaatgtgttgcgttcggtaatcttcattgaagttgtttcgtcatcgctatagttggcaacatcagcacgatagtaacgtttatcgttaggtttaatcgtaatggcagcttctttcttacttggatctgtttcacctctcaacgcaagtttatatgcctcactcgtttccaggaacgcaaccaatgctgttacattcgaaccagtatcccaaaaatcagcaaccaatttatcataggtggtacctgccggaacagaagtagctgttttgaaagcatcattctccaaagcttctttcaacatctgttctgtaatagtcggttcaagcagagtatgggcaccgatataagtagcctgagtaactacaacagtagcacaaccggcattgtcggcatagttaggagttacataaaaataaggagaatataacttgtcactcttaacgtataccatcgaagcagctgcaggagtagctccatcagccaatgctttttcacctacaacccatgtcagacgatattctttcgcgtctgcattgtattctcccttattcaatgcaagagtcgttccagcaacttctgcagtaccgggtacagattctttctcacctgcaaatgctttcaaccaaccttccacatcccagtctttagcagttgcatccgcactctgcgggaaataccagtcacgagcctgtgccttgaacggagaaacacgtctcggaatacgcactacgacaataccatcggggtctttagtacctgtcggattttcccatactgcatctttaattgccatcttaccataagcctcgtatacggggttggtagtaacagaggcattaaagaatactttggctaattcacgattcagaggaatcgaaactttcacggtagatccgttcgggatattcgggttggtaggaatagccgatacacctgccatgatatacttcttaccctgcgtcccgtctttagtaacggtcagctcattcagataacttttagagagattagagatatacgcacggatagcggcttccgacttgtcaccctgatgcgccaatgtctgagcggtagcaagggtcatctgaggatcattcacaaccacataaacactatctccctggcgtacaccgttgaacgtacacatatttttcttcgtcccgggagttgccacatcgccctcaccgattgcagctgcaacatccttatcgtctgtattactatcaccagctacacgctttacagtccagtcacccacttttgcaccttcatgttggggatcattctctttagcaaagagataggctacatatacattattttcagtgcccactccttctatctcacctttgtctgcacgggtagcaggagctgaagaactggtaaaagcaatgctgatagcatcaatcaattcacctttctgaccacctttatcaattcccggttcgtcatcattactacatgcagccatcgcaagggctgccaatgtaaacgtaaacaatttgtttaatttcatgttactaaaaaatttaattatagatataagttcgaatagtttatacttttatccgctttggatattccttttttctctttcgaactgtgaaaggaaaaaagcagagagaaaaatgcggatactccctgttccatcgatctgtcaaccgtcactgtctgtttcgtttatcaaatattcctttccatcagtttttttaattttattattaccattcactaattaatttgaactatgtatactattgcattaacttcagtttctttctttcggtcaataatgtgggaacagtagcatcgggtatatacaacgtcatgccacaatgtccgtcaatggtaaatccccctacactctccggcataaagttctccgtggccgctttataaatgataacttgctccagagcctcgtcaaaagcagcagattcttcaacacttccaatccgttttatataggccgaagcatcataaaagagatgccgcccgtccgataagcggtcaaaagcctgcaatccgctacgatctatccattcccaacgctccacacgactctcggccgcccgaagttgaactttcaacatttccaggccggacgtctgaatcacactgatggtagccgaacgattgtcgccttccatactgttgtaataatcgtaataggcagcagccactgccggaagatccgcttcttttttataaagcaacggaaacatttgttgatagacaggagtaaaacccggtgaaagcatttcggctgatgaacccacaatatattgcgttttatctttcagttcgtatgccacctcgagtccggccataaaacacccttcaaaaaggataaaattaaattgcccgtccggaatggctgaagcaaaatcctgtaaactcatctcgtaatgattgtccttgataaccgagcgggtaataccggccggaaccactgccgtccccgacggtaaccatccgctggtatgggagaatacgatcaatcccggatcaacggaaggataccgggccatagcctcattgacaacccgtgcaaacacggaggcaccggctgaattctcctgtttatacttagccaatatttttgttaccttttctccctgttcatccaaacaaacctctaacaagcgggtactatccgctccttttttatcctgataaatcaatagatgccccggaaacctgtcccacgcctctgttaacgctgacaatttttcgtcggtctcgtcggctaaatcattatcccctcccatatagaccaaaagggtacgatcagacagacgttgctccaacaggccgtccgcttcctcaccgactacacaaccggcaagcaacaagcagagcatatatcctatgtaatacattcttttcatattcttattttacgtatctaatacggcatgacacccgacggagtttcggaaaatactcccgaagcagaatttcgaatgttttccccttattcagtgccttcagcctactcttccgttgattgctatcactcacagtacgcaggattgaaagaatttcattacgttccggaaggtcagaaacctctatatctttctcaaactgtttccaatcctcaccgacccactcgactgccacctccatacgttcgccatatttattttccaggaacgcttgaagggccttggcacgtttttcagccagacgttcattattagaagtatatccttcgggagaagagtaaccggtaacggtaactcccgatatggaattccggttatcctgttcaatagaatccacttggttaacgaaatgcatccatgaagcacggttcaactcatgatcgggaagaatacgcatttcattcgtaggaaaataaatatcggcctcataaccggcctgaatacgggtcaccttcttacgaaggggaatatccgaagctacggtcgactgtccggatgcaacagaaaccaggcggatggtgtcatgtatcacaatcgtatccacccgttccacaaccaacggcggtatatgctccgtatgcatggcaaaaggtaccagacgggcatcacaattgcaattcgtgtcgcgcatccatactttaacatcgtccatccatgccgcataaggcacctcggtccgataatggatgcgaggcaaagcatggtctccctcacgcagcacggtgtagggagtaatcttctccaatcccgaagttgtacccaaagcccgacgccggcgatacatcagatcgctttgggggccgttgagcacaatgggaggaagagacaacgaatcaccggtattctccgaagcaagtagcggaaacagatagaccgtacagtccggcgccaggtgcacccctgtcaggtcgacagccagatcgaccagcagaacggagtcaagacgctccaagcgatacacctcagtacggacaggctgtgtaggcctatctgctgctaacactgttagagagatgaaaaatgagatatttatgaaaattacctgtttgatattcatagcctgtcctcccctactttaacagataaataatggatacacctaccttggtaggccccagataattggtccggtagtgatcgacacgttccccacaagtgggacaatagaatttatcgtaatcaacatagagatatcctaatccgatatcgacgccaatgttgacccggttgctgatgatccactggtaaccgtaggtgagtccgccaccatacaattgcccctcgagacgatagtctttgaggatacccaaagggagattaccaaaattaaagataccgcccgtggcatgcacacccagataatgccccttgaacacatcactcaaccaataacgatactctaactgcccggcaagatgtttcattttccggtttttagcgtaagtaaacggattatattgaacaagtcctgctatgctcatctttgaatggaaggcatattccacacctatattcggagtagctgtcgcccaataaagaccattggcagtcaatccccattgctgggcgtcggccaaagcaggaaatgctccaaggaaagtaacggttaagacccatatgcatagtatttttttcatatttgccgtttgtttgataattatgcggctctttcttataatgaaagggagaatgacttcataaatattataagcatttataatacagtaagttacttcatatcccatctgaaaatgtctctgagtttttttattttcagaaacaaagaaaaagtgtatgaatgtaatacattgattaataatacattacttaatattgactcagaaacgctttcagaaacataaaagaaaaaggttgttaaagagcatcacaaaacgaaatatacaatctgttattaattgattattaacagattatcattattgtgaataggtgacggcatgtgtttgcagcagtggaggcagacagatgaaaaaccgttgaaaaagaaacagtagacatacatcgtatgctttcttgaagaggtcgggagacagaaagaaggtgtaccggggagttttttatccaagtgaaagaagaaaaataaatattttacattagaaataaaaaaaattaaaataatacttgtttaattaataatttaatgcgtatctttgcgacatgtatctgagataagaagaatctcttgagtagctctttcattataagaaagagttttttttatccttcttttccacctctttaccgcagactattaatcaccaaccggttggcccggtcaagccgcttagtgtctatgcgatccagataaatgcgggtagtcttctccgatgtgtgccccatacaatcgctgatcaccgagacgggcacatcattttcgtgagcgagtgtcgcccatgagtggcgcgccacataaaatgtgagtggcatatccaactgtaaccggtcgcccaattcacgaatcagtttattaagcctccgctgcctgcgccgataatcctgataacggtcaccgtttcgaagcattggaagcagatagtccgacaaagggctggcgtatctgtcgattaacacacgcaaatctttttcaatgcgtatctgtaactcctgccctgtcttctgccgtttgtaccgaagataatttccctgcaggttctccttatttaaatagcacatatctacaaaggacattccgcgcgtatagaagctaaacaggaacaggtcacgggcaagctgcatatcagcatgacaagcagtaaggtcgacacattcgatctgcgcaatcttctcccgggagatggcgcgtttggatgtcacctcctctttgaggttcagccgtcggaaaggcttttgatcggaaaaaaccacatgatcggcgcaggcacgattgtagatggcacgccactgacggagataaaacgaaaccgtattgggccggttgccccgctcacggagaaaggtgacaaagcggtccagcacttcgggagtcaactcctcaaatgaaaaaggtctgccatccaaaaacatctcaaacgcacggcgggcgctacgataattggcagccgtaccctgacgtcccttattctccagcccggcaatcaccgagtcggcatataccaacacctggctcagatcattgtggtagttataaacgttcacaatgtcgtccaccgtataagcactccccttatccgcttcaagcgatctgcaaatagcctccaactccttctttatatatataaggtattcattggcttcgcggacaatgagcagacgacggcgattgcctccgacgttctccaccatttctaaacgggtgttaaactctgcctcccagaaacggtaaggcgtataaatctctctcttctttcgatggcgaataatttgtatcacaagcggataactgccatcacgcccctcgcgcgagcgattgagccgtggtgtaattgatgtcatcttcttctttacttttaactggtttacaaaagtaaaacaacacctgctatcaatatgttggcagcttcccaatttcactatcttaaataatcttatacattttgtttgcatctccctccataaagggtaggacaaatgtaacctccgccctgaagataacctaaaaatcagcgttgcatttttgcagcacctccccttttcggggtgctgcaaatgtgcaataccgttttttcaccgatggaatggacgatttctgaagtatcacctctctttctttttctcccgccaaaggtaaaaaacaccttatccggcttcccctagagggcatggaaaccacgtaatatcgcataaccgggtctctgaacagcccggacaaggtgaaaacgacatctcacgccccatgtgacagataagaaaagtatatacattatagaaagacatgaaacgaatgcggacttgtgcttgcttaggaatataagaatacatccctgctgcatctttaatcaaaagagattgacttatactttcgataaacggtcggagcaagaatctgacaattgtcaaattgtatatcttacctgcgatagaatttgtttttcctgcccgactgactgggaagctggaaaaaagcccgtaaatcagcattagaagaatacagaaagaaacaaaaacaaagtacatattacaataaagacagcaaaaagcacataacacaaagacaacattaaagagatcggcataaaagagaaacattttcacagatttgcgccaatcaaaattgagaagtaaccagagaaaatccggtactttcagccgcttttcaaggagaaaaaagactactgtcgatcatctaccgacttgccgccgacaagaagttaacttcgtataaacaaagaattaactttctgccggcaaagaacgaactctttgcaactacgttattcacttcctatgggcaaaaaagtgaataacatattattcagactctcaaaaacattttccttttgcatatatatacaataaacaacttctatcacaaaagaaaaaaatagggtatgcgtcacaaaaaagaaagatttttgagcaaatagaaagcaatattgagtaaagactatacatcctgatcagacacacttatcatcaataataaggtgtattgctatttaatcttaatatctatagttgcagtactactttgatatatgaaaacatagagatttgcagattttcatgaatagtagaaaccgcattcatagtttatttttatctttgcagaggataagaaaattacttgtatctatctgaatgatagattgtaattgagaagtaatatgttgttggtaacgatttggcaaaagtaaagctgcattgataatctgtgctttgcgtaccttaaaacaacttcgt

SEQ ID NO: 4986 - DNA, 24132 bp, Unknown
  gut microbiota DNA sequence
ccaaggagttgctagaacatcacggaagagatcaagctttccaaaaagatattgcaatcagcaatgattgcaagaagatggtcattgcatacagattcctcaatatgataagtatagtaaatattgaaaaggaggaaattaataacctattcactgatggaaataaattaaattgggaacaggtaatagaaggcactcccaaaccttattataccaaagtacactgcaataatgcatatatctgggccatggcaatagagggggaagacccttcaacattccgctctcgcctggatatctttgactggaaaggcaattatctatgtaaagcccatctggacaaatgggtttcctctttcagcatagacgaaagaaaccaaaccatgtatgctgtaactgcagatgacatgcttgttcgatacaacatcaaagaactactggaccagcttccctaacggcttttcttcttcatataacagccccatactctgcattgaattcaacgaagagtatggggttattattcaaatcatccatcttatttataaagaattcctcagaaagtcgttatctttgcacgttcccaagtagataacaataaatacacgcaatatatcaatggaaaagaactttaaaagaactaccgtcacatcggcactgccgtatgcgaacggccccgtccatatcggccatttggccggtgtatatgtaccggcagacatctatgtccgctatctgcgactgaaaaaagaagatgtacttttcatcggaggttccgacgaacatggggtacccatcaccatccgtgccaaaaaggaaggtatcactccgcaggatgtagtagaccgctatcacttcctgattaagaaatcatttgaagaattcggtatctcgtttgacgtatacagccgtacatcgtcgaaaacacaccacgaactggcttcagacttcttcaagaagctatacgaaaaaggagagtttatcgaaaaaacttcggaacaatattatgatgaagaagcacaccagtttctggccgaccgctacatcaccggtgaatgtcctcactgtcattcggaaggtgcctatggtgaccaatgcgaaaagtgcggaacttcactgtcgcccactgacctgattaatccgaaaagtgccatcagcggaagcaaaccggtcatgaaagaaaccaaacactggtatctgccacttgacaaacatgaaacatggctgcgccagtggatattggaagaacacaaagaatggcgtccgaacgtgtacggacagtgcaaaagctggctcgatatgggtttgcagccgcgtgcggtcagccgtgacctcgactgggggattcctgttccggtagagggtgctgaaggtaaagttctctacgtatggttcgatgcaccaatcggttacatatccaatacaaaagaactgcttcccgattcatgggaaacctggtggaaagatcccgaaacccgtctggttcactttatcggaaaagataatatcgtatttcactgcatcgtatttccggctatgctgaaagctgaaggcagctatatcttgccggataatgtaccgagcaacgaatttctgaatctggaaggagacaaaatatccacttcacgcaactgggcagtgtggttacacgagtatctggaagacttccccgggaaacaggacgtattgcgttatgtattgacagccaatgcacccgaaaccaaggacaacgactttacctggaaagacttccaggcacgcaataacaacgaattggtagcggtctacggtaactttgtgaaccgtgcgatggtattgacacagaagtacttcgaaggtaaagtacccgctgcggccgaacttacagattatgacaaagagacactgaaagaattctccgatgttaaagccgaagtagaaaagctgctcaatgtattcaagttccgtgatgcacagaaagaagccatgaatctggctcgtatcggaaacaaatacctggccgatacagaaccctggaaactggcaaagacggatatggaacgtgtaggtactatcctgaatatatctctgcaactggtagccaacctggctatcgctttcgaaccattccttccgttcagttcggaacgcttacgccagatgctgaacatggatagcttcgactgggcagaactgggacagaacgacctgcttcctgccggacatcaactgaataagccggaattattgttcgaaaagatagaagatgccacaattgaagcacaagtacaaaagttgctcgatacaaagaaagcaaacgaagaggctaattacaaagccaaaccgatccgcgccaatatcgaatttgacgacttcatgaaactcgatattcgcgtaggtactgttctcgaatgtcagaaagtgcctaaggccgacaaattattgcagtttaaaatagacgacggactggaaacacgcaccatcgtcagcggcattgcacaacattacaaaccggaagagctagtaggcaagcaagtttgcttcatcgccaatctggctccacgaaagctgaaaggcatcgtcagcgaaggtatgatcctgagtgccgaaaataatgacggcagcctggccgttgttatgcccggacgggaagtgaagccgggaagtgaagtgaaataaataactaaagtaagggtgtattcaggactctatgaaaggagaccggatacaccctttatttttactaacggtcgggagtggaaatataatatggcagaacagtcgctaaaagaaaaaacagccaaaggattattctggggtggattcagcaatggcatccagcaattactgaacctgctgttcggaattatcatcacccgtatgctggattcgacagactacggtatgattggtatgctggctatatttaccgccgtagccaactctatacaagagagcggattcacggccgctttggccaataaacagacgttccgtcatgaagactacaatgcggtgttctggttcagttttctaatgggtgcatcgctttacctgttgctctttttttgtgccccgtttatcgcagcattctataagactccacagcttattcctctatcccgcttccttttcctgggttttctgatttcaagttgcggaactgcccataatgcggtattatttaaaaaactaatggtgaaagaaaaagcgaaagcaaccattaccgcactattgtgttcaggcaccataggaattgtcatggcatacaatggaatggctttctgggggctggccgtacagcaaatcacctatattttcatcgctaatgcgctgttatggtacttttctccgtggcgtcctactttttcgttcaatttcaaacctatcagggagatgcttccgttcagcagtaaactgcttatcaccaatgtatttcattacatcaatgataacatattttctgttctgctggggcgcttttataccagtcaggatgtaggttactatactcaggccaacaaatggaccaatatgggcttctcactgatcagtaacatgatcaacggagtatctcagcctgtcctagtcgaaacctcttccgacgccatgcgacagaaaaatatatttcggaagatgttgcgcttcaccgcctttatctctttcccggccatgttcggactggcattgatagccaacgagttcatcgtaattgccgtcaccgccaaatggcaggcatgtgtacccatcatgcagattctttgcatctggggagcatttgtccccattacttatatgtactccaatctcctgatcagtaaaggaaagtcgaatctttttatgtggaataccattgcacagagcctggttcaactcacaatgcttctttgtactatctcacaaggcatactcgtcatggccgtgatttatacggttatcaacatcggttggctgctgatatggcattatttcgtaaacaagcagattcacatcaccctatgggaagtcatgaaagatatcactccgtacctactgatctccggaggagtcataggaaccagctatttcctcacgatcggcttccataacctatatgtattgctgattcttaaaataggaatagccgtaagcctttatgtgttcatcatgtggatcggcaaatcggtgatcttttttgaaggtgtacaatttatccggaaaaaactcttgaaataagtcatgaacatcctgatccaacaaaccaaagcatttcctcatcgtgccaatagcttttattggttctatgcgcaactgaccgaatggctgactgcacacggagtggacagtaagctttacttttcgtatctggaactggctgacagcgaatttgagaacggcctcctgttgcccgatcattattctcaattctatactccccgcaacatcgaagcaatctgtcgcttcattatcgacaaacagatagacgtgattctcgattactcccatgtcatcaccggagatacacgcaaatattacctcgaaatcaaaaaaagaaatcccggaatcaaaatatgcacgatgatccacaactgtcccagccatacgacacagttaaaacaatacgagttatctacactccggttcaaagacgtgcatggacccaagaaactttttcagtggatgctaccacaactctacatcagcttattaaaaaaagtggtcagccatcaaaaccgttcggcatacgacacgctcgacgaagtggtactgctgtcacccgcttatatacccgaattcaagaaacttataggcaaaaaagacgcatggaagttatctgccatccctaatgccataaaacctgtgcatagtaacatcccgattgaggagaaggacaaagaaatcatctttgttggcagaatggcaaccgaaaaggcattacccaaattactaaagatatggggtatggttcaggataaactgccggactggaaactcacccttgtaggagatggtccccaattcggcacgtgccggcaaattattgccgagaaaaaattgaagcgggtctgcctgaccggccatcagatgtcgatcccctatatagaccgtgcccggattctttgtctgacttccgtcatagaaggactacccaccgtatttacagaagcaatgtcactgggggtgattcctatcggattcgattctttcaatgcgatctatgacatgatagatgacggcatagacggattcattattcccgacaacaattatgaacaatatgcagaaaccattctacggttggcacaaaatgacacactccgctgccagatagcctacaaagctcaaaagcggaaaaacagatatgacatagaacaggtaggaccactgtggatggaaactttccgtaaacatggattaattaaataggagaacacaatgaaggtcacgatatatccatactctatcaacaaaggtgatatacgcgttaatccgtatatcagcgacttcatccatgcactgcaacagaacggaatcacaattgccaatcccccgcacaagaatccgttattcagcctcatcccaagaaaagcagatagcgatgcttatatctttcattggccggagaatgtacccgactacaaatatggaatgttgcagactcttgctgctatctggcttcttttcaaaattaaatgccaccataagaagatcatctggttcttgcacaataagcagccccatgtgatgaaacaccgatggtcgaaaaagttattgatacatctgctcctccgcaaagccgatttgatagtgacacatgctacagaaggtatcaaagtggttcaggatcaatatccgaaggctgtagccaaaacggtattcttgcatcaccctactaaaaaccggatagaagaatacatcccccaaccaccggaaaccgacctgctgatctggggaaatatctcccgatacaaaggggtaccggaattcgtacgttttgctactcagcattcattaaaactgaagactaaaatcatcgggaaatgcagttcgcaggaactcctggaagaactacgcaaagaaagtaatgagatgatcagcatagaggaccgtagtattcctttcgaagagctaaaacaagagatccgcagatcacgtttcgtactggtaccttatgctgccgagtctatcttaagttccggcatactgatggactctctctcattcggagccaaagtcatcggaccggctgtaggctctttcagggactacgccaccgaacccttgcttaacgtatatactttccatacgttcgatgatatacaggaactcgttgacaaggcaaacgaagcaacagatatagccggttacaaccggttcctcaatgtacatagctggaacgaattcggcaaaaagtttcaaaatttacttcagaaaataatacagtaatgaaagtactctatacattcggcggcatgccccattatctgaatgccatgctcaacaaacttcataacaaaggagtggaaatcaccgttatcactcctcaaaaaggaaatgccactatcggtaaaggtgtaaaaatggtagagggaggaacatacaggcacctcaccgccattgagaagaaagcattctacggaaaaagctcctatccctccctaccggaaatagtacgtgaagagaaaccggatattctgataatgggatggccctatttcctgcaagtgttctttcaaccccgattgagaaaggctatgaaagagtgccggacacggttggttatccgtgaaattcccttccagacccctccctacgggaaaataaaagaatatttccatgaaaacccgatgtatgatgaaaacatgcggctggtcagtaccggaaccggcttttatcttaaacaatggctgacagcgaaaatacgtaaatactgctacgcacgcattaccggaacgctgaattactcgaccgctgcatacgatattcttccttcctatggagtgaagcaggagcaaatacatgtcacttacaactctacggacacagatgccttactgaaggagaaagaagccgtactcacctcgcccccgcttcttcctccttcctccaaaagagcgctacacatcggccgattagtgaaatggaaaagggtggatctgctgatcgatgcgtttacaaaggttattgccagtcatccggacgcggaactggtagtggtaggcgatggaccggagctggataacctgaaaaaacaggcagccgacctgaatctgacagaacaggttcgattcatcggtgcagtatacagtcccaaagaactgggagcctatatgaatgaatcgactgtctatgtactcgcgggcatgggaggattatccatcaatgatgccatgacctacggactgcccgtggtttgttcggtatgtgacagcaccgaacgtgacctggtgacggacggagtgaacggacttttcttcaaagaaggcaatgccgacagcttgagtgacaagctcaacaaactgtttgcctctcccgaacgttgtgcctctatgggacatgagtcggaacgaatcatccgcgagaaaatcaacattgaaacggtcagcgaacattatttgcaagctttccgaacttttatgcagtaaaaatggagtacgaccaaaaagaatgattatctttaggcagacattaatcatttaatagctctactactatgaccgatcttaccattctcatcgcagtcatcgcattggcgttatggccaattgtattcctgatatcacgtatcctgcacgagcggaacaaacgtgcgaagccatcgggtgacactgtctctgccgaaacggaagaagtgacagaggaaatgactacctccgcactgatcatgagcatccttcaacagctcggttgtcaaccggaagtgaatgaagaaaatcatatcagcttcaagtatcagggagacgatttccttgtcgcagccgaagacggtctccggttaatcattgtatggaatccttggtgggcgtccatcagtatcgacaatcaggcattaccctatctgaaagaaattatcaatgcagtcaatatgaactcattagtgactactgtctatgcgctggacgaggatgaaaaaacatttggtatccacagtaaatgccatatgctcttcgctcccgaagaagaggagccggaaaaaagtttcaccgacctgctggacagttttttcactacccacaatactattaaagaaaacctgaaacaattgggtaacggaatgccggatatgaaaaagaaagaacgagtaagaatcaaaggatttgctgcctacaaggacaacagcacggaactgaaaggggaataaacttcccctcttcctcttgcccgtacagcctataaacgaatcatgtgagctttaacgggttaataccgacaggatgcgttcacaagcatgcccgtcaccataaggattatgtgtttcggacatacgacggtataactccttattacggagcagctcagtcacattactgacaatcgcctcagcatccgtccccaccagttttacagttcccgcctctactgcttcaggacgttccgtggtatttcgcatcaccaacaccggcttgccaagtgaaggagcctcctcttgtactccaccgctatcggtcagcagcaaagtggagtgctgcatagcgtaaataaacggcagataatccaacggcgaaataagatatacattgtctactcctgacagaagttcgtatacgggtttctgtacattcgggttcagatgtaccggatatacaatatccatctcgggatgcaacgcggctaattctctaatcgctttacaaatatgtaaaaatccttccccaaagttctcacgacgatgcccggtaaccagaatatattcacgttgtcccacttcgtaacctttgtcacgaagttcctgatgcaacttttctttgattcccggcttcttcgaaataatgtcaacagccatcaacaaagcatcgataaccgtattaccagtaacaaatatcttctttgcgtcgatgttttcctgtaacagattctgtttcgatttcccggtaggagcaaaatagtaggtacaaatacggtcggtcacctgacgattcatctcttccggccagggagacagcatatcataggtacgcaaaccggcctcaacatgtcccacggcaacctgccgatagaatgcagccagtgaagcggccatcgacgtagtggtatctccgtgtaccagcaccgtatccggacagaaatctttcagcacatcgcgcaggcccagaagaactttagtggtgatgtcgtacaagtcttggttgggtgccataatattcagatcgtagtcaggaatgatgtcgaacacttcaagtacctggtccaacatctgacgatgttgtgccgtcacacacactttcgtttcaaagtgttcagtatctctttgcaaggctttcaccaacggggccatcttaatggcctcaggacgggtaccgaaaacaagtaatatctttttcattatgcgatcagactatttacgatggttcattaagacgatatgccagttctctttctactttcttactccgcagaagtccaactccaatttactttcttcacggggcaactccacaaacggagtgtgacgtaccagccataccacgatatccgctttctgataagcctcccgatagtcagtcagatgaaaactggcatgtgaagcgacattgggttctacaatcaacacctctgcacgcgactcagatacaatgcgggaagcaatatatttagcaggagattcacgcaaatcatcaatattgggtttaaaggcaagtcccatgcaagccactaccggttcacgatcgttcttctcgacaaattgctgacaagcttccattactttgttggcacaccaatcagctttataatcgttcgtctcacgggcacgtttgatgatttgtgcctgttcgggatagtccgaaacaataaaccagggatctacggctatacagtgtcctcccactccgcagccgggttgcaggatgttcacacgcggatgtttgttagccaattctatcagttcccagacgttgatacccgctttgtcacaaatcatggacaattcgttggcaaacgcaatctgagagtcgcgcgaagagttctcggtcaacttacacatttctgctgtacgagcattcgtcgggtggagtttaccctgtacaaaggcagaataaaactctatggctttagcggtcgactcgggattgacgccaccgatcacccgatcgttatgaaccagttcataaagcgtattacccggcaatacacgttcgggacaataggctatgtatattttgtctttcagttccgggcgctctttataaatgacttcagccatacgttcggtcgtaaataccggtgaagtggactcgataacaaacaggtttccttctctcagataaggaattacggagcgggtagccgattccacataggtgatatctgcacggtggttttgtttgaaaggggtaggcactaccacaaaaaaagcatctgcctgctcaggtttcgaaacggcacggagattacctgttcgcaccacctcttttacaatctgatccagttccggctccacaatatgtattttaccctgattgatggtttctactaccgaaggattaacatccacacctacaacttcataaccatgtccggcggccacggcagcagtaggaagtccgatatagcctaatcctaaaaaaacaacctttttcatacgtatatctccttatctataagtgccgcaaaagtacaaataatatgtgactttgtacggtttctcaccgaaaaccactacttttgccaaaacatttcgatcgaatgagagttttaataatcaatacttccgaacgtttgggcggagcggccgtcgcagcaagccgcttgatggaatcgttgaaaaacaacggtatcaaagccaaaatgttggtgcgcgacaagcaaaccgaccagatcagcgtagtaggtctgcaacgtaactggtggcaagtatggaggtttgtgtgggaacgcattgtcatctggaaagccaaccgctttaagaagaacaatcttttcgcagtcgatatagccaatacaggcacagacattacgagcctgccggagtttcagcaggcagatgtcatccacctgcattgggtgaatcagggaatgttgtcactgaacgatatccggaagattctgaaatccggtaaaccggtagtgtggactatgcacgatatgtggccctgtacaggcatctgccatcacgcccgtgagtgtaccaactaccatcaggagtgtaaccactgtccatacctgtatggagggggaagtaagaaagatctgtccaaccgtatcttccgtaaaaaacaacaactctacaaagaagcacccattaccttcgtcacttgtagccaatggctgaagggacaagctgaaaagagtgctttgctgacaggagaaacggtaatcagtatacctaaccccattaacaccaatctatttaaacccagaaacaagaaagaggcacgcagcaaatgccatttaccccaaaacggaaaactgattcttttcggttcggccaaaatcacggataagcggaaaggcatcgattatttgattgaatcgtgtaaattactggctgagaagcatcctgaactgaaagattctctaagtgtagtcgtttttggcaagcaatcggaacaactcaagccgttgcttccttttaaagtatatccactcaactacgtgagtaacgagcatgaactggtagatgtttacaatgcggtcgaccttttcgttactccctcactggaagagaacctgcccaatactatcatggaagctatggcatgcggagtgccttgtatcggcttcaatgtcggcggcatcccggaaatgatagaccatctgcacaacgggtatgtggcacaatacaaatcatccgaagattttgccaacggcatctattgggcactgaccgacccggattatccgtctctctcggaacaggccaaccgaaaagtaatcgccaactactcggaaggcattattgccaaaagatacattgatgtctacaataaaataacaggaagatatgcatagccaccccagtcccaaattctccgtgatcacagtgacctacaatgccgaaaaggtattggaagatactgtgcaaagcgtaatttcgcagacctatcatcatgtagagtatatcatcatcgacggtgcatcgaaagacgggactttagagattgtcgaccgataccgcgaccgcatccaccaattggtgagtgaaccggacaaaggactttatgacgcaatgaacaaaggaatcgccctggcaacgggcgactatctctgctttctgaatgccggagacagtttccacgaagacgacactttacaaaagatggttcactccatcaatggaaatgagttgcccgacatactgtatggcgaaacagccttagtggatgccgagaggcatttcctccgtatgcgtcggttatcggcaccggagacactgaactggaaaagtttcaagcagggaatgcttgtgtgccatcaggcttttttcccccgccatacacttatcgagccttatgatctgcaatatcgtttctcggcggatttcgattggtgtatccgcatcatgaaaaaagcacgtacttttcacaatactcaccttatcctgattgattatctggcagaaggcatgacgacacaaaatcataaggcatcgcttttggaacgattccgcatcatgacccgccactatggcctgctaagtaccctcgcacatcacgcatggtttgtggtaagaagtttctcccgcaactcagctactccttccgatgcacccttctgaatgacatgtatcggacgggagctatgtacatccaccggcttcggatcaatcagatagatttccgcgtttcggggaacgtagttaagcagccccgccgccggatacacattcatggacgtaccgatgataacaaaaacatcagctttctccacccaatcgatagccgtctctatctccggtacggactcaccgaaccagacaataaacgggcggagttgcgaaccatctccggcaaggtcacctatcttcacttcaaattcttcgggtttcagttctttaatgtaatgcggattgtttgggtcgcggcttgagcagacctttgtcaactctccatgcaaatgaataatatgactgctaccggcccgttcgtgcaagttgtcaatgttttgggtcacaattgttacctggaaatctttctccagttcggccagcagttcatgcccgcgattcggttccacttccagcaactgcttgcggcgttcattatagaaatgggtcaccagttcggggtcgcgtgcataaccttcgggagtggctacttgttctaccggataacgatcccacaatcctcctgcatcacgaaaggtactgatgccactctcagcgctcattccggcgcctgacaatacaaccagatttttcatactagcttttatttttaagtaaaccggcctcactccccacctctcaaaagaaacgtgaaagaaggccttacaaatttaaccaaaatccttgaataaacgaatatatcgtccaacattccatcatcccttaacctacctttcatcactttccgtccttggctctacagccagatatcatacgttaacacacaatgaggcggtatgacatactgacacggagagatttaacgtccaaacaggggatgtcaatcgttctctcttcacggaaaaagcgaaaaaagacagaaagaaatacaaacgatgcttttaaggaaccttatctatcacagtaacgaagttagtcgataataagaatttttaaaaccaaaaagtaaaatcattcaaataaaacacttacttttgccgcttgttaatttgcaactgactgaaagtgaaatagaacattcagtctccaacaaaaaaatatatggataaatttagttatgcaattggtctcggaatcggccagaatttgttaggaatgggtgctaaaggcatcgcagtagatgactttgctcaagctataaaagatgtgctcgaaggaaatcagacagccatcagccatcaggaggctcgagaaatcgtaaacaagtatttcgaagagctggaaaccaaaatgaatgcagcgaacatcgaacaaggaaaagcattcctcgaagaaaacaaaaaaagaccgaacgttgttaccctgccaagtggactacaatacgaagtaatcactgaaggtacaggcaagaaagcacaggctaccgaccaggtaaaatgccactacgaaggtaccctgattgacggaaccctgttcgacagctctatcaaacgtggacagcctgccgtattcggtgtaaaccaagtaatcccgggatgggtagaggctttgcaactgatgccggaaggttcaaaatggaaacttttcatcccttctgaactggcttacggcgcacagggagccggtgaaatgatccctcctcacagcacactcgtgttcgaagtagaattaatcgaagtattataaaaataaaatcgtaaagcaaaatgaaaaaagtaagtattttggctgctgtagccatggcaacaggcttggcttcatgcacggctcaggctcctaaagccactctgaaaacagatgtagattcattgtcatacgctattggcatcagccagactcagggtctgaaagactatctgtcacagcgcatggagatggatacaacatacatggcagatttcctgaaaggtgtgaacgacgctgccaataaaacaagcaaaaaggatcaggcttatctgctcggcttgcagatcggatcacaaatggcaggtcctcaggctatcaaaggcatgaaccaccagttatttgctgatgattcaactatgactgttaacaagggcgatattcttgcaggcgtatttgcaggcgtactcaataaagatatgaagatgcgtcccgaagaagctcaggtattgattcagaaaatgatggaaagcatcaaaggaaaagctgccgaaaagaaatatgctgataacaaagctgccggtgagaagttccttgctgagaataaaactaaagaaggagtaaaaaccactgcaagcggattacagtacaaggtgatcactgaaggtaaaggtgaaattcctaacgatacttgcaaagtgaaagtaaactacagaggtaaactgatcgacggaacagaattcgaaagcacttacgaacgtaaggagccgttcgtgactaacgtcggcggagttatcaaaggttggactgaagccctgaaaatgatgcctgtcggttcaaaatgggaactttatatcccgcaggaactggcttatggctcaagagacatgggacagatcaaaccgttctctacattgatattcgaaatagaattgctggatattgagaaataagaaattaacaggccttatttaaaaagaacaggagagatgccggacgtaatcgtccggcatcttttttatccggataataaaaatagaaagtatacgatttttctgttttttctgacttttatatagagaaattaaaataaatctctatatttgcttactatttgataacaattggaatttacatttattattatggaaaaaatagacaaccttgacaggcagattctggagattatttctcagaacgcccgtatcccttttaaagacgtggcagcagaatgcggcgtttcacgtgcggccatccatcaacgcgtgcagagactgatcgatctgggagtcattgtaggctctggttatcacgtaaacccgaaatctctgggatatcgtacctgtacttatgtcggtatcaaactggaaaaaggatctatgtataaagctgtagtggccgaattacagaaaattcccgagatcgtagagtgccacttcacaaccggcccttacaccatgctgaccaaagtatatgcacgcgacaacgaacacttgatggacctactgaacaacaaaatgcaagagataccgggagtaaccgccaccgagaccctgatttctctggagcaaagcatcaagaaagaaattcctattcacgcagataagtaaccgatggagtggttgaatgaatatcacctgtcagggctgctcattggtatttgcacgttcctgattatcggcttattccaccccgttgtggtaaaagctgaatattactggggaacgaaatgctggtggattttcctggtattaggtatcgcgggagtagctgcctcgttgagcacagacaatatactcgtttcgtctttattgggcgtattcgctttctcttctttctggaccatcaaagaagtctttgagcaagaagagagggtgaaaaaaggttggtttcctaagaatcctaaacgaacatacaagttctgagacatacgggaaagagtcagttttttgactaaaatgcttgcataattcatcagaaagcattaattttgtccccgcatccgatagaaaggatacatcgggcttatagctcagttggttagagcaacagactcataatctggaggtcctaggttcaagccctagttggcccactgaaatcgactatagatcaaatgatttatagtcgatttcgttttatatatactccaaacatttttttcaatgattcagccatagtttaaaagctgaaagtttctcctcgcttatcgtaattttctgtttataaggagggcgcacagttaccactatctttccgttaaagaaaggctcggcatggtcaatggcatcaatgcagacaagaacctggcggttggcgcgaaagaaacgctccggatcgagttgttccatcagtttgtttaaagacaaatctagaatgtattcctgacctttgcgggtaacagcaaacgttactttgttctcggaataaaaataggcaatatctgccacttgtaacgaccagaaacgatctactccggaaataagaaaacgggtacggtaacgtttctctttgtattgaagtgcctcaagcagagtacctaagtaatcttccggcctgggaacagcattggtcagcaagctctcatatttagtgattgcatccgacaggcgtttttcgtctatcggcttaagtatgtaatcgatactattgaccgtaaatgcacgaatggcgtactgatcatacgccgtagtgaaaattatgacggaagaagggtgtgcggcagaaaggaagtcaaaagcattgccatctgccagatgtatatcgagaaagatcagatcgggatgcggatgctcgtcaaaccaggcaacggcttcgtctacactccctggtatcagagtaagctcccattgagggcgaagtccggataccatggaatgtagcaaacgggctgccggaatttcatcttctataatggctacattcattttattcatacagtaaaggtacttttacgataaatactttttcatcgttgtggacaattatctctttgccgagcatcaactggcaacgattggacaggttcttcagccctacacccggcgattcatgactttttttaggctgtatggggttactcaccacaagatatccttcctctaaccgaagatctatcttcataggcttgctgagagtaatagaattatgattgatgacattctctgccagtaactgcaaagtcagcggaggcagcatacaactagtatagccggaagctatacaacagttacaactaatgcaatctcccaaacgaactttatgcagaaagagataagattgcaggaattccagttcttccgtcaacgttaccaatgttttatcctgacattgcaaaacataacggtatacactggacaaatgcttggtgaaatgaacagcattacctgggttatattctatttcagcaatcagtgtattgagactattaaacagaaaatggggattcagttgactttgtaaagccgcataacgtgcagtgtcgttctctgtttgcagttttgcggcctcctgttgcagtttcaggttattctgaatggaacgatttgccaataataagcccacaatgacaagctctacgagccataccacgatcaggatacgccagcctccattggagaaagtaaataggttgtcaatgcctgccaatagcttagcagcaatcagcaggctatagttcaacaacaggaataacaagataacggcaacataaataactattatcttccaacgatggcggatattgagtgcatactgagtgtttatccacgaactgatccgaagcgtagaataaccaagcacattgaaagcggtaataaagaagacgaatgctccctttgaatagagaacatccgctactttaggagtcagctccgtatagttgacaagcaggagataggaaaagatacctaatcccgagaataacagaccatataacaggacattccatttcatgcgaacaaagctatcatatttcgggtaattatcataaactatttaatatttattcaaagctctgatcaattccgaataagccccttgtgccgagacttttgcctgtacatggttcagttgggaagcttgccggtacgtttgggcctcaatcacctctattacagaggccttcccttcagtataccgctccaatgccatacgctcattttcgaaggctttgctcagtgagccttcggtgaggcgcacctgttccatagtctgcgacaatgaaacacgggctgtctccacttccagtttcacctggtcggtgacctgattcaaataatcagtagccattcctactttgaaagaagaggctcgcttttcatcacgtctttttccccactcaaacaaaggaacggatactttggcataaatggcataattgggatccaaatcggaacggaaatcataaccgggagcagaatagcttccatctacacctatataaaactgtggcttatacttagcatccgttaattttttcgaactttctgctattttaatccgggcataggccatcttaagttccggacgatctatttcaccctcaccccacagatctttatccgccctaacggcagaaatcgtatcttctatttcagtcggagcatgaagttccacgccaatcagagaatttagtgccatacgtcctgtttccagatttctttttgcttgcaacagttggtattccgcttcattcagttttacctccgccatcagcaagtcctgcggatcaaccaatcctgcttccacccgctcccgtatgctttgggagaaggtggcaaccgaattgcgatattccgtagttacacggactatttctgcacgcgcaacagtgttccaatattgcatatccgtctgataggatactgcggaacggaaataatctgcctgatgtattgccagactttgctgatgtttagccatccggatactttccaataaccgcccacccgtataaaccggttgtaacaaagagagggaagcaccgtatttcatatttcttccttcaaaagccaacggagtctgcatcgaaggcaagtcgatattcaactgaagaggattaccggtatactgaaaattcgcctctcccgacagtttagggcgtagatccttctgtgccgctttctccaattcgatacttgcagctatatttttgtccgcggctttcaggtcatggttataatctaaagccatcgacctgtacttttgcagcaaactattttgctgagcaaaagcaactgtcggcacacacagcaaaaagataagccatctatttattttcttcatcatcatttctcttttatcttataaaatattgcatataatgccggagtcacaaacaaagtcagcaaagtagcgaatgtcaacccgaaaatgatagtagccgccatcccgccaaatgctatgtcaaacagcaagggaaccatccccagtatggtggttgtggctgccatcagtaccggacgggttcttgaaacagtagattcgatcacggccgtataaggaacgactccttcccggcgttgcacatctatttcgtccaacagtacaatcacattcttaataaccatacccaataatcccaaccaaccggcaatcgggaagaatccgaaatcaaatcccgtcaagagcataccgacagccactccgataatggacagcggaagaacacatagaataatgaccggatcgcgaaagttaccaaacaaggcaaccagaataacgaccagtaccagaaaagccagcggaaagaatttaccgattgcctgcatcgcctctctctgatctttgtattgtgagtcccaaaagaaagtataaccttcgggcaacttcatcgcttcaatctctctacgaatttccccatgcacttccgccatggtatacccggattttactccacacatggcagccatagacaattgacggttataagtacgcatctgaggccactcccatgtcgcctcgattcgttcggtcacttgcgacaaaggtgccgaatgctcaccgttccatacagagaaattacctaaagaacgagtatccgtaatgtcagctccttccgacttcaatagtacaggaacctttttctcatcatcgcgataaacacctaccctggttccgtcgctgatcgatttcacagattccatcatctgtgatttggttataccgagagcacctgccttcacgggatcataaaccggtcgcatcaccatcgacatatttccccattcattgcgtgcatctgcgacttttgggttacgacgcataatctcaatcgcctcacctgccaaagagtctagaacagccggatcgggccccagaaagcgggcttctatcatggcttccgtcagcgggcttaattcgaacttattcaccttaatcagcggttccggatatttcaaacgaatggaatcctgcaacagagcattcagtgcccgcgactctttggaacttttacatttcactagcaactgggcatagttggattgaggaccgaaagatatatttgaaagataatagcgaggcggagtacggccgatataagacgaaaccatttcggtctcttcatgagtacggatataatcggatatttcaccggctatccggtccgtctccccgattgttgttccctcaggcagccacatatcgacagtaaagtattgcttatccagagcgggcacaaaaaccttcggaataaatttgaaactccatgccgaaagcaacaacagaacaaccaacgaagctatagtcatcgtgcgatgccgaagtacccaacgcaatgatttcctgaaaagatgataatattttccatcaaacagagatgctttcagctcttcaggacggggacgtcttacaaactcctgaatgaagaacggagtctgcgttaacgcaaacacccaactgaacattaacgaaacaccgatcactaccaccagtgaggacaacagctcacctgtgatatggggtgaatagtaaatcggaaggaacgtgagaatagcaataaccgttgccgccaataaaggtaaagcagtagacgaacatgcacgcatgatagcaacccgtttacgcattccccgttccatattaatcagagcagaatcggacacgacaatggcgttgtcaaccaacattcccatagcaatgataattgcagcaagcgacatccgttgaagggcaatatcacatgccatcataacaattagagtagcaaaaatggagaacaccagcccgctacctatcaagagcccatttttgaatccgataaagaacagcagaatcgcaacaacagtaataactgatatgatcaggttcaggataaatccctgatttgctaccgccgattcatagccctgatcgtagatagaaatcagttcgtagccatcaggtatcgattgtgacaattcaccgatacgcattttaatatcttcagccatgtccactacatttcctgtaggtacggtagaaatggcgatcccaactgccggactaccatttatgcgcatttgattagccggaggagtctgatatccttcttctatctgtgcaatatcggccagacggaaatgctctccgttacgcgaaacaatggtcagatcacgaatatcatccagcgaatagaaattgccggtagattctatacggatgcgattggtgccggcatcgataccaccggcatcgaccattttattctgggcttcgaaagctcgcataatatccgcagtcgtaactccactttgtgccataacagaaggactgatcaagacatcgattgtcggtgtttgtacaccataaatctcaattttcgctacatccttaacttttagtaattcattctttataaatttagcctggtcttccagttccctatatgtatgcccatcaccggtcagtccgtaaaatacaccgagtacatctccaaagtcatcatttacgatagaagttccggccccggcaggcaatttatcttgtacatcatttactttccgacgtaatttatcccataattgctgcatctcttcggcacggatctcttttttcacataaaccgtgatcttagaaagtccggcacgattctcggttttcagataataaagttctcctagcgactgtatggcttcctctaagatatcagttacttgcgactgcacctctgcgggagaagcccccgggtaggaagtcagtaccaatgcttgtttgatagtaaagggagcatcctccagctttcccattttaaaataagaaaacagacctcctgccagcaccaacaccaataataaaatagtgacggctcttttctgcaaaaaatacttcaccagcttcataatgagtttgtcttagtagagatttccactttcataccatccgataaaaaacgaagtccgctcgtagctaccgtttcactggccctcaatccttcggttatggtaacatagccaccgggaagcagatttccttttttcactgtccgtcgattcacttgtcgggtattcgtatcaataacccacacatattcaccttccgagggacgataacataatgccgtttggggaatggaaacacttgtcagatccgttgatacgggagcatcaaagattgcttttcccgacatacccgccaataatttcccttctttattaggtaaaacagccgttagtaaataagaaagattattgcgggttgtccccttcgatacttccacaatctgtgccttataacacttatcgggctgggcatcaaaatagatccggacactatctgtggggtgtgaggcaaacgcaatattctgagtaacataaatctctatcttcagccgatttatgtcaataaaggatataacaggctgagctggcttcacatcctggtatttttctatataaacttctcccacataaccatcaaaaggagctgtcagacgagtgtctcccagttcattggaagccgtatcgaaagcagttttggcagtagtataatccgccttagtcttttcatatgtactcgccgaaacattattcttctcatacagcttctttatccgctcaaattcagctttagcttggtgatagatggcttcagcccgttctgtgcgaatatggaaatcacgcgggtctatttcagcaataatactgccttgtttgtaatggttaccggcatatacatccaaacgatcaatagggcctccgacacgaaacgatagctcagaggtacgaaaaggttgtgcgataaacgggaactccgttgtcttgatcccggaggccgaaactgcttgtgctgtcttgacaattaagtcctgactctgcttactgtctttatccgtgcaagaaaatagcaacaggagagcagctaataatacacttatcttcatatcttatcttttaaattttcgacaaaaatagataatcggatcattcgataggggagtaaagatactgaagccggaaaactgaaggttgaatctggaatataccggatgaactaagaaagaggtggtcgggaatccttgttaaacagggtatggtataaaacaagtcatcccctccggtctttcgaccgaaggggatgaaccatctgaaaaaaacggcgactacctactctcccactgttacgca

SEQ ID NO: 4987 - DNA, 215023 bp, Unknown
  gut microbiota DNA sequence
agaaaagatctttgaaaacaaatctcaagacaatctcaagtaaaatttaaacagagacttaagaatccgaaaacaaagtcactagaaacacatggatgactatagatttcaatctttccgggttaccaataaccaccgaatgattctctatagtcatccccaaaattatcttgtcaccaactctatgatttataaataaggtataatcgttatataaatgcctgtaatgatggccgaagtgattactcctgaaatgttggctcctaatgcatcacccaaaataaaagaattcggattatctttacttaccaacttttgagccacttttgccgtagtgggtacacagcttacggctgcaatgccgatcaccggattatagttccctttcttaatgaaatacataatgtaccctcccatgatgcctccgatacccgacagtaacaaagcaagcatacctaatactaacagtttaagaatcttcggatcgagtaacaaatgtgcgtcgcaaagtacacccaataataatcctaacataaaagtagaaccatagagcaacggaccgctcacaaaatcatatatatgcttcataccggattcacgtactgccactcccaggaatagcgaaaagaacaatggtgaagcaaccggaaacaagaaacacaatactgcacacaggattgcagaaaaagccagcttcactttcgcatcataatttttaggagctttcttttctaccatcttgatagcacgcagacgtttaggaatcagtaatttcaccaaataaggatatcccccgtaagtcaatcccagataaagataagccaccaccgtaataggtacaaacaggtgtttggccaaagcaagcgatgtaaacaaaaccatcggaccatcagctccgcctaccattgccactgaagcactttcttttaaagacagtcccagaccggaagcaataggcactgtcaagaatgtacccaattcagcacataaagcaagaaaaatgctggcaaacggtttctgcaataggaatcccacatcaagcaatgtaccgattcccataaatacaaagcaggctatcaatccgttactaaaggtcaatgtgtataccggttgcagaaagtcaatctgcatcgtgttcatcaatgcgtcggtatccgacagcatcggatctaaaaaaagattccccaatgttccgtcgggcataatcagtgttccacaattaatagctaccattcccaggcccatcggaatcatcaccattggctcgagtacccctttccagcctaaataaatgagcagaaaccccaaagctattaaaaacatacgggcactggccagaaaccatccgctggctatcattgttccaaatccctgaaacagggttccaaagtctatactttccatactatcaagatttattgttttttattggttgaggatgtcttattattttttttatcatgctgtaacatctgttcttctttccgaagaaacatcgttcttgtgtcttccggataaaaataatccattaaacctctctccgattcaccgggactgacaccatgataaaacccacgattatctccgggatgttttgtgacccccctgctgaagtcttcacgcccatcactgccatactcctcatcactcagagcactttcagttattaacgtagctactttctgatgcagtttccgaatacgcttcagccgggccaattcttcctggtgcgaactataaaaagccaacgaatcagctgcagaggcaatcaactttatcaccccggcaacgaaaaaaccaatgacgaaggtaagccccatcatggcaaaagtggataacaataagctaaacataacacagtatgattttagattgaaaaataaaatgcaatgtataccgaccgccggaaaatacaagacgcaccttcccggcatttatcggaatggataaatggggttacccaatcacttcaatacagaagtgtagaatcggaaagctaaatcaggatatgctctaacgagtatacataatacccgctggaatatttaatgaagttatgattgaagtccggataagtatctcccctctccgattgatggaaaagtgaggcattgagcagccggatagcagtctgcaatttgagtttcaaaattttggaagaacttagttcccgtgaaaaagaactatggggaagaatagcatcacacactttggattcagccgtctcatcattaaataaagaatggtctccggcatattgtgatacaaaggtggcagtaacttcggcgggaagttctgcagcttcttctatagaagcggtataaccggctccatacacaaaaaagatacctatcaatatgcagaatatgtactttatcatagtagttgcaaacgtagcaataaatttgagaaaaaatagaattcgttgtctaattaacgaatattttataatgattgttccggatataaacggataaatgacaaaaaaagcggagaatcatccgattccccgcttcttattcatataatatagattgtgtttaattacatggtaacctgctttgcaagcagtttttgaagtttgccatttaacagctggcacattgttccatttcccattgcttggtaacgtttgatacgatactgcaacatcataatttcatttgcattctttttcataattttggtcctctttttttgctctccacgttttgaagagcggttttacatcttgttttctttattaacactgcaaagatacgaaatgttttcgaaaatatgttctaaaacataagaaaagtgtatcgttagttgatttttctttttataaggcctgatttggcaagtgtatattacaaatatattgcataactttgcgctttatcaagaaaaacgactatgctcaaacggataccccacacatacaccatcatttcttcggtcattctactctgtgcagtgctttcctggatcattcctgccggagaatatatgcgagagacaatcgacgtaaacggtatttcccgcactgtcatcgtagaccattctttccaccgggtagaacagacgccccagacctggcaagtgttcagctcccttcttgaaggcttcgaacgtcaggcaggaattatagctttcttactgattatgggaggtgcctttcaaataatgaatagcagccgtgctattgataccggcattttttcatttctgaacttcacgaaaggacttgaaaaacaccgactgatcaaaatactgggagtaaacaatgtagtgatatccttagtcatcatccttttcagccttttcggttccgtattcggtatgagtgaagagacactggccttcgtcatcatcattgtcccacttgccatatcaatgggatatgactccatcaccgggctgtgtatggtatacgtagctgcccatatcggcttttccggtgcagtactgaatccttttacgatcggcattgcgcaaggtttgtctgatctcccgttgttctcaggatttgaataccgtatgttttgttggctggtactgaccaccgccctgattgtttgtgtactcagatatgccgctgtcgtcaaaaagcatccggaaaaatcacctatgtatcatgctgacgcttattggcggaaacgggaaaaagaaagctgtggagagatatcccatgtaacgactcgccaagcatggatcgtatacctattgttactcgtgtccttggggttgttctccatcatctacccgatcagtactttttcagtaggtgaagcatcagtcacctgctatgcagttcccaccttatctatcttgtttgcagttttcggttggctgggtttacgcaaatccaaccagttctttatattgaccttactcgcattcactattcttttcctgattatcggtgtcatgggtcatggctggtatttaccggagatatccgccatctttctggcaatgggcattctttcggggtttgccaatagtgaacatgcagatgctatcatcaagcaattcatggatggagccaaagacatgttgtcggccgccatagttgtgggactggccggagggattattcaaatactgcaagacggacatatcatcgaccccattttacattctttggcttcactgatgggagaagctggaaaaatagtatctttgggggtgatgtatctgatacagacactcattaacctgattatcccttccgggtccgccaaagcagcgttaaccatgcctatcatggcacccttttccgatgtcatcggactttcgcggcaagctacggtaatggcttatcagtttggtgacggatttaccaatatgatcacccctacttctgctgtattgatgggtgccttaggcattgcccgcataccttatgagatttgggtaaaatggttctggaagatacttcttttattcattatcctaggaatggtactactgattcccacggtacttttcccattgaatggattttagagttccgttctctttccttcacccggaaaatggaaaagagccggactccgaagaatgtaaaccagaattttcataaatgaccataaagataccgaaagattaaagtagaaaacagtaattccggaaagatgaaacaaaaagagaaagaaatcaaaactaaatatatgaaccaaaagcattcactcccccctctccttaagagaggaacgggggtgaggccttacttaacaacaaattgtatgaaaaccctaacccgctttctaatcattccgatgttgtcggttgcgttcttttcatgcagtgagtcccatttcctgaaagatgtggcttaccgaaaccaagtgacgcaagattttgaaatgaagaagcagcaacttcccaatggagagttgtttgcagtgtttaatgaaaagctcaccattcccgaacaagaggctttaatgttcctctatgcctacatgcctacaggtgacgtaacagattatacaggcgactactatctggaaaatgtcagactctccgatcaggcacgtcgggaaatgccttggggaaaagaaatccccgatgacgtattccgtcattttgtgctccccattcgggtaaacaatgaaaacctggatgactcacgccgggtgttttacaatgaactgaaagaccgtgtgaagaatctgtcattgcacgacgctgtactcgaggtaaaccactggtgccacgaaaaggtaatctacaccccaagtgatgcccgtacgagttctccactcgcttccgtaaaaactgcttatggtcgctgtggtgaagaatccaccttcaccgtagcagctctccgctcggtaggtattccggcacgacaggtatatactccgcgttgggcacataccgacgacaaccatgcatgggtagaagcctgggtagatggcaaatggtatttctttggtgcctgcgaaccggaaccggttttgaatctgggttggtttaatgctcccgccagtcgtggtatgctgatgcatacaaaggtattcggacgctataccggacaagaagaaatcatgtacgaaactccgaattatacagagatcaacgtgattgacaattatgctccgactgccaaaggttccgtattcgtgacagatgccgaaggccagccggtagccgatgctaccgtagagttcaaggtctataactacgctgaattttatacggtggccaccaaacatacagaccagagcgggcatgcatcattgactgccggcaagggtgatatgttggtatgggcctccaaagacggacggttcggttattctaaactatcattcggcaaagacaatgaactgaagatcacactggacaaaaacgccggtgaaacctattcgcttccactggacatcgttcctcctgccgaaggcgccaacctgcccgaagtgactccggaacaacgtactgaaaatgatcggcgcatggcacaggaagattctatccgcaacgcatacgtagccactttcattaccgaagagcaagctcggacttttgccaaagagaataagctggatgaaaccgaaacagtacgcttactgatagcttccagaggtaaccaccagactttaaccgatttcctttctgatgctgtaaaagccgataaggccggtcaggctatcagcctgctgaaagtaatctcggccaaagacctgagagacgtaagcccggaagtattgaacgaccatctgaataactccggcctgcccgcttctgaagatttctgtagcaacgtactgaacccgcgtgtagccaatgaaatgatcactccttacaaagcattcttccggaaagagattccggcaagtgaagcagaagccttccgcaaaaatccacaagctttggtagaatggtgtaaaaaagagatcacaatcaataacgaattgaactcacaacgtataccaatgtcaccaatgggtgtatggaaagcccgggtagcagacgagaaatcccgtaacattttctttgtatccatggcccgtagcctgggtattcctgcctggatagatgaagtgaccggcaagattcaatatcggactttcaatgacaacaacctcaagaacggcaaggtctatgatgtcgattttgaagccgcacagcaaacgcaggcaccaaccggaacgctcgtagcccgctaccggccgatcccttcgttgagtgatccaaaatactattcacacttcaccctctcaaagttccgcaatggaaccttccaactcctcaactacgacgaaggtgacgtagatatgggtggaggagccacctggtcgaacttgctgaagaatggtacacgcctggacacaggatactatatgatggtaaccggtactcgcatggcaagcggagctgtattggctaatgtgactttcttcaccattgaagagggaaagacaacaactgtcgatctggtcatgcgcgaaagcaaagatcaggtacaagtaattggtaattttaattccgaatcgacttatctgcctataggaacctccgaaccgcaaagtattcttcagacttgtggccggggatactacgttgtagcagtgctgggagccggacaagaacccactaaccatgcccttcgggatattgcagctttaagcggtgaatttgaaaaatggggacgcaaaatggtgttgctcttccctagtgaagaacagtacaaaaagttccgcccgtcagaattccccggattgccttcaaccattacctatggtatcgacgtagatggagcgatccagaaacaaattgccgaatcgatgaagttgccaaacagcaccatcctgcccatgtttattatcggtgatacattcaaccgggtagtcttcgtgtcacaaggttataccatcggattgggcgaacagttaatgaaagtaatccatggattatagaataaaacgggcacttgcctgaaacatatcctccattaaaaaaggaagaagttcagacttcttccttttttaatatatcatgaaatagaaacagacatcaaagattccctccataccgttcactattccccaaacgtaaatatcccttttataggtgtgtcgcccggagagtaacttgttattcccactcttccctcataataggagctttcaacaataaccgttaccttttcagcattatccaataacaaggttatatcttcttttccatcagcagatagacggatgtcaggagttatttctttcccttcatgatccagcaccccgtccggaagataatgaaagcctacaatatccattgaatatattccataatagatatataccttagctttataatccgtatgtattccgaaatcatccttatatttcacaataaaatctgcggttcgctcatcggactgtgggatatctcctttatcttcatcatggcaactgcagagtaacgccaataatgccaataaaacaatcgaatatttatgcaagctcatagttccttataatttattagttctcaatatgatattacttccaaatatataaaaataatgccggacaaatacgatcatgcaactatttttttcttaggattccacctttaactattttccccaatcactaaattcaaaactcagttgttcccatactccccgatgttcatccgcttcttctctcggattcgataccgaaagcccgatcaagcgaatgggatgctgctcatactccacctctttcagcaattgtttggcaaggggcaagattctctcaagattcgtaagttcctgtgcctgtgtcatgcttcgtgttatctggctaaaatcatgaaacttgatcttcagagttagtgtatttccccggaactctttctgctgcaatcgctctacaagctccgtagctacgtgataaagctctataatcacagacgatcttacatggatgtctttctccaatgtatgctcacatccgattgatttacgtattctcactgcttctaccggtcgaagatcaactccacgtgcaaaatcataataaagcagtcccactttaccaaactgacgtaccagcatttcagacgaacactcccgtaactgaagtccattgtgtatccccagtaaatgcatcttccgggcagtcaccggccctactccccaaaatgactcaataggcaaacgggcaatgaaatcgattgcctgatcaggatgaatagtacaaagtccgtcgggtttacgaaagtccgaagctattttagccagaaatttattatacgacacgcctgccgatgccaccaggctcagttcttcacggatacgttgcttgatagctttagctatatccacagccagcaagatcccctgcttattctccgtcacatcaagaaacgcttcatccaatgacagaggttcaatcagatcggtatactcatgaaatatttcgtgtacctgacgggaaacggatttatacacttccatccgtccgggaacaaaaatcaattgcggacacagacgtttcgccttttgtgacgacatagccgaacgaactccataacgacgagcttcataacttgctgccgctactactccccgctcctcggcatgccccacggcaagcggtttaccacgcaattcaggatgatccctttgctccacagaagcataaaaggcatccatatcgatatgtataattttacgttcattcatctctgcaatccttctgcatcgcagttctcctttcggatagcaaagataagagtaattctctcaatccagtcgaccggattagttaataaaatgaagaccggcaaggtggctcccttaccggtcttctgtcggtctataaattgtttatatacttcgtcggtgagcccccataatatttcttaaacacgatcccgaagtatttaggatcactgaaacccgtcatatccgcaacctcagccaccgtatactttctgctcattaacaaaaccaatgctctgttgagccgcacattacgaacatagtccgcaggagcatgcccggttatctccttaatcttattataaaaactcgaacgactcatattcatgcagtcgctcagttcaccaatcttaaatccggaatcggtcatcctctcttcaatcagacttctcacctgacggataaactcccgatcaccttctgatgactctacctttttatcgatagggtccgaggcctcaccccccaacgccaaacgaatatacctcttacggatcatttcccggttagcaatcaaagctgcaatctcagtctttaaagatgatatggcaaaaggcatccacacataaagatcggcattccgttgaatgtaccggtcatcctctcccggtttcactaacaatattaccggaatatgtgctactctgtcatccgatttaatccgaacggcaagttcctcacccgaaatacgggtaagaacagaagaagccagtactgcatccggacattgttcacacacagtctcaaaggccgcctccgcatcacaaacagacacaatcttatactccttcatcaggatttgcacaagataattacacaaatccttattcctttcaaccaataccagagaatgtttctcttttttcttatccggacgtttctgctcagaagttttcactgtcggcagcattccggtaaccgacaacaactcactattccctgtggagagctccggtacggataatatcccggagaattcagaaactctttccgattgccggatgacaataggaaaaattaaaataagcaccagtttttgttcttctttataagcaaatttgattttacctttatgcaaacagattaatttacgtataaataaccaactcattgtctcggaagaacctcccgaaacgaaccctttataatttagaatttttttttaagaaacccgttatcctcagattccagcctcaactcccacttttgattgttacacgaagtactcagaagaatttcgccacctcgatccatactgtctgtaaaagccattaacaggtttctaagaatggcagacatcttatccttatcgaggcatacggtagcaaaggcaggctcctccgtccaacggagcataatgtccttctcgctgatataatctctaattcgggctactgtctctttcaagaatatggataactcatagtcggcaagcgacagacgccccggagcagcagaaacacgactgatattttccagctcagccaataaattgttcactccctttatctgttgcaatacgttactaacaagttcggaagatgacttttcataaagatattccaaaggaacttttatcagtgtaagtggcagacaaaggttacgtgtcgtattcacaaacaaccgtacttgttctcttgaaaggtttctgtcttgccatacgaaccatgaacgtacggccagagagcccaacataagtgccaaaagaccgtaacataggaaagctccacctgtcttccaaaggggttgacgaatgatgatgtgcatatttctttgcgcaaacggccgaccgttatcaatggataacgcccgcacagaaaagatatattcacccggaggaaggttcgaaaaacgaattctattatctacagacggagcactccaatccgtatgatcgagtttccaactgtaagctatatcctgcttttcagtatagcgaatagcagtagccgtaaacgaaaaagtattttcattgtgctccaactgtaacgtagctgtacagttcagagctttcttcaatggagaattctccgtttcgacggtcacctctttgtccaaaacccgaagttcgtccaagtaaaatcccaaacaagctttacgcagcggtcgagcctcttgtttatcatactcaattgcgccttgataggtgcccagaatgtatcttccattacctaagaaagtacccgatgtaatccgaattcctttactcagaaacctgtaatatgaatgttgtacaagatcgagcgagaaagcaaacccatcactgcttcccattaaccgactgctatcatccgaccaaacagcatatacattaccggttcctaaagcagcaaccgtatccatctgctcatgctccggatgatagaccattaatccgtttccttcagtcccaatataaagacaatcatcggactgatgcaaagcatgaatgtgtaaaccggacaagcgttttacctccacgatactatcgttttccggacaataaaaaaacaccccttcatccgttccaatccaaaaaccgtctttatccttacgacacaatgcgtttactcccgaaatacgtacatacggtgtaaccgaataattactttgctttcggatgaagaacaaaccgtgtacatagttcccggcacatatctctcctggctttacttcacacaatgcagtatacatctgacaaggaagaggcgtaacaatccggttccataagcctgtcgacggatgaaaacaactgataccgtgatccgttgcaaaccagacatccccatccgaatcatgcaggaccgcatttacccgattgttggtcagtgaatgactgtccccggaccgtgccctgtaccatttataatcatcaggagattccacatcgatcattgatacgccttccggataatccgccacccagataagtttctgatcatctacaaacacgtcagcaatccggttggtacgaattgaattatcattctcaaaatcagtttgtataaaagatgtaatatccggattaacgatatccatacgaaatattccctcaccatctgtagctaccaaaacagtccggtcatcccatatcctcagaccactgacccgactattcaacaatcggttccaagtaccaaccaattgctccgacttcatatcccatacccctaatccttccgaataatcaaacacaaccaatctttgggtataaggatgaaaaagtatttcatgtatccggctatatcttttaccggacaattctccggtttgcctgtcgacggcataattctttattgtaattccgaacagcccttcatccgaacctacaaaatactctcccggagccacctctaccatacaggaaatcgttgccaggctatgatccacccgatgaaaagtattagatagtatttgataggctatcaaccggtttccgacagaaaaccagatatgactactgttatctacgcagagaaaatgaagggaaacatcattcggaataaccagatgattcctgcattcgaatttatccaatgatggattgtacatccataaatatccattacgggtgactacccacaacccattccgattatctgtaagcaaccggcaattgcccatataataatccatggttcgcccttcggccggcagtttatagtgttttagcttggtcccatcaaaccgactgattccggcatggttcataaaccacatataacccagagcatccctttggatctgatacactttacgagtattcgtttcacttctttctacaatgtgtttgcaaacgatggcatgacataatgaaccatacaacatcatcatgaagtatataatatatttcattctatttgtttgttataatttaaatggagtagtttataaaaagcaagaatcaaacaagaggtagcgaggggggggggaaaagaaatactaccttcttcacgtcacgtaaggaggtgatcggatttgtagcgctcctacacgctttaaatccctctcagttatcgtagtggatattaacaaaataacagcaatgagatgttcacatagtttatttattagtaacaagacattgagagaggtgacttacatgaaaaatcaatctgatctacattagaacgggataatattcaatttgttttccaaatatggtttctaataaaaaaaagacagattaacggggcattttccagaatatgaattaggaacaaatatgggtagacaataatttccttaaccagacttggaatcagattgtttttcatttgtcgattctctatgacaaattactccgaagccaaatgtagagtgtttattttaaaaaacaaaataaattacccggacaaataattggggataaaatgaagttaatccaatatatttcaacaacttacgttagagaagaactttataacccggacaattgggatcttattaacccaaaaagtccccctgaatttataagttcaggaggacctttttgtcataaagtggagctggagggattcgaaccctcgtccaaacgaggaaatcataagctttctacatgcttatctttgcctaagtttttcgtgcaggagcagaaccaaagccatcaattcctgccttatcctttaaagtttcatcagaagcgcaaggccacttctgactatccccgatgtaactgcaccactaaaccggaatgcttcggagcaacagcttccgagtgatgtctcgtcctggcacctggtgcctggattaagctaatctactatgattcgattaagcagcaagagcgtaattagtttcgccagataaaattttgataactgagattaaagtgcaaatcaccgacgcactgcatgcttacccaccatttctgcccgctgtcaaaaccagtcaaccccttttgaaatgaggaagtggtaaccacttatgtgggtgcaaagatagataatattcgtcatatagaaagaaaaagagggtggattttagatattttattcattccggaaagaaacacaggagattatactaactttgtattttcagaatgtaacaaagacaaccaacaaaatcttaaaacaacatctattcattatggtcaagaaaatcattagtatctgtgctgccggtatgattgtagccagttgctcccccaaaaagacaacagctcagccgacagatccgtcaaccactgacagtgaattaacaatgctggtcggaacttacacttccggcaacagcaaaggcatctacactttccgattcaacgaagaaaccggagaatcgctcccactgagtgatgcggaagtagcaaacccttcatacctcattccatcagcggacggaaagtttgtctactccgtcaatgaatttagcaaagaccaggccgcagtcagcgcctttgccttcgacaaagaaaaaggaactctacacttattgaatacacaaaaaacaatgggagccgatccgtgctatctgaccaccaacggaaagaacatcgtcacagccaattatagcggtggaagtattaccgtctttcctatcggacaagacggagcattgctacccgcctcagacgtaatcgaatttaaaggttccggtccggacaaagaacggcagacgatgcctcacctacactgtgtacgtattacccccgacggtaaatacttactggcagatgacttaggtaccgatcagatacataaattcaatatcaaccctaatgccaatgccgataacaaagagaaattcctcacaaaaggtaccccggaagcttttaaagttgctcccggttccggcccccggcatctgatattcaattcagacggtaagtttgcctaccttattaatgaaatcggagggacggtaatcgcttttcgatatgctgacggaatgttggacgaaattcaaactgttgcggctgacactgtaaacgcacagggaagcggtgacatccaccttagcccggacggaaaatatctctatgccagcaaccgcttgaaagcagacggagtggctatctttaaagttgatgagaccaacggtaccctaaccaaggtaggttatcagttaacgggaatccatccacgcaactttatcatcactcccaacggcaaatacttattggtagcttgccgcgacaccaatgtcattcaaatatttgaaagagatcaggctaccggattattaactgatatcaagaaagatataaaagtagataaacctgtttgcctgaaatttgtagactgatagaaaaagaaggtaaaggagaaacaaacagttttaccctagaataaccgaaaggaagacgtttttttattatttttgcatcactttattaaccctaagagatttcacaaatatgaaaagacacgtcttccttttggtaaccttgtttaccatgagcactgttgcagctcaacaacaaccaattattttccccaaagactctatcccctctgtgatcgaacgcatcaccggaaaagagaacaaaggattttccgctcacatgaatctccaattatatacttcatgtgctgcctcttttactgaaaatgagttagatgaagttgctttcaagttaaaccggtttaagctggaaatcataggaaacatcaaccggaagttctcttaccatttccggcaatcttttaataaatacagcaacccctttgctctggataatctgtcctcttccgtagagtatgcttatctgacctatcacctttccgatcgtttttccatcacggccggaaagcaatttcttatgctgggaggctatgagtactacgtcaatccgattaaagtacgtgaattcagcgagtttaataattatgtaaactgctttctggcgggagtatctgccacttggaatgtgactccgactcaagaactcaattttcagatagtcaacaaccgtaacggtggagacgcagacacttaccttcacggcctgccgacagatgtcgaagctaccaaagtacctctgatatcgaccattaactggaacagttattatctggacaaagccattcagttgagatacgccgcttcatggggacagcaggccaaaggaagaaatataatgtatcttaccgcaggcaatgtttacgaaaaaggtccatggatcgcttatatggatttcatgtactcccgacaaggaatcgataataaaggcattatcagcgccttacctcgcatagacttggaagacccgcagacagcccaacataccgagtatttcaccacgattgccaatgtagactaccgcttccaccctaattggaatgcttacctgaaaggtatttacgaatccggaaaaatttataaagctaacggtatctttgaaaaaggtacctatcgccggacatggtgcggacaagtttgtgtggaatactatccaatgaggaacagcgaactattgatcttcttgcactatcaatacaaacggaataaactattgaaacccgcccgcaatttagatgctatagacccgaatacgcagcggatctcgctagggctggtatattccataccggttttttaatcccgggcagctcatataggaaaggcgaaagagttttatatttaggaaggactttttcgcttttcaaagctttaacaacaattcccttacctttcttcgtacattgcaaataatcagtacgcaaggttcccttcttcatatcaaaaataagaccgggattaaagtgttgtccgttaatccgcgtctcaaaatgcagatgctcggtagtagcccgtccggtacgtccggtcaggccaatagccattccggctttcaccacatccccactctttaccagattcttcacattatgactgtataccgtctccagtccattgggatgtcgtatcacaatcacattgccatacgcaccataaggtttagccatacgtaccaccccgtcaaaagctgcacgaatcgtatcgcgggcgcaagtttttatgtcgtcaccgctatgacctccacgtgttccatagcccgaaatgactttgcctcccggcaaagggaaagagtaattccgtgacagggacttcagatccagcatgacacaattctccttggaaaaaagtcccggtgtagccacccggacatgattgacctccatatccgaaaatttgttctgtgccctacccgatatgttggcacacaaaaagcatacagataaaatcagtaaagtgaatatgtttttcatggggatatccgttattcaaagtaagtaattgttcctccgtccgagtcagcgtattttttcaataaagtttgtatcatttcggcagcttcctgcagtccttctttaccattatagccattaacgatagccaatatatgtgttgtttccagccccatctttgtccgttcgttatcactggtcggagtccctattccccccacagcatcccggtacaccggcagcccttcgatattcagcacaccacgcccgatcccttcgaaaggctcattgatcttaccgatccccagttccagaccagtgcccgctatcttatcagcatcaaaaccacctatcgaatgtccggtccggagagaaaccaggttaatcaaatcgaccaaagtatcaatctgatacaaagcaatcccccgcatcaatctgcgacgtaacgcttcggccgacggccgatatctcccgggatctttcccgcagcgtttgtaggcttcacgtgtggcagctatcacaggttgttttttaatatcttccaaccgggttgttgcagtgagcatttctgtgaaagattgaatctcctcccaaagcccttcacaataagaagtgtttttcacttcagcatatatagcagcccctgcaaaaacaggacatgcttcttttaactctttcgatacaataatggtatacataataaatcaaaattttatctatcagctatttatcataatgcccgacaaaatacgtccggactttatgcccaatcttcgcgctgaaaagaaatcctcatgccggatgtaagtacaaatatccgctatttcaatttgtactcccggtactccaaaatccaaaagctgttgccggttggcttcccataagtcaatatggtacttatgtgtaaccgaatgcctgaaagagatacgcgacatatcaaaaccattcaaacgaaaagcttcataaacttcatcccccacctcgaatgattgcagagagatacccggaccgatacatgcgattacatcttgtccttccgttccaaaaacagcccgcatcttctcaagcgtatgtccaacaatatactccactgtccccctccacccggcatgcacagccgctacagcatgatgtactctatcatacaacaataccggaatacagtctgccgtggaaatacaaatgcagcatcccggctcagtggtaatcaacgcatcaatcccgtttagcatttcctgttgctgctgcccagaagctccaagaaatttttcatcgaccggaagtattttcgttccgtgtgtctgaaaaggaataatcaaatgcctaggagcttgcgatagtgattgaaacaacaacgtctgattcttctctaccctttcaagtttatctcccgaaaaaggtgaacaattaaaagaagcatacgccccctcactataaccgccgtgacgggtcgttacaaaatgagaaatgttggggtatgcgcccaacagcccataccccaacatttttctatcgtcagtgagtgaaatcatttatcttcccaatcctcttcttcgtattcgtaatccaaatcgtcctcatcaccatcatcctcatattcatagtcgagttcttcatcctcacccatatctttgagttcctgctgcaatcggctgacatccttcggacgatgcacaatagcttctattttattgctttccttattcaactccgtccataaaatgtccttcagcaccgagatgcccaaaccggatacagatgaaatgaatacatgaggaattccctccggcaatgtcggttctatttcatccatcagctcctgatccagcatatcactcttagtgatggcaagtacccgttgtttatccagcatttcaggattaaatgttttcagttcgtttagcagcacttcataatctttacggatatcatcgctatccgccggtatcatgaaaagtaacaaagagttgcgctcaatgtgacgcaagaaacgcaatcccaatcccttaccttcactggcaccttcgataattcccggaatatcagccattacaaacgactgtccgtcacgataagatacaatacccaggttaggctccaatgttgtaaacggataatcggcaatctttggttttgcagcagaaatagcagataacaaggtagacttacctgcatttgggaaacctaccagacctacatcagccagcaacttcaattcaaggattacagtcatctcctgcatcggttcgcccggctgggcaaaacggggagcctgacgggtagccgtcttgaagtgccagtttcccaatccgccacgtccaccttttaagagaatgacctcttgtccgtgttctgttacatcacatacatattcacctgtttcggcattgtaaaccaccgtaccacagggaacttcaataatcttatccgctccgtctttaccgaaactacggttcttactgcccgactccccatgaccagccattgcatgacgatcatatctcaagtgaagcaatgtccagtaattccggttaccacgcaggataacatggcctcctcttccgccatctcctccatcaggtccaccgttaggagtatatttttctcgcctcatgtgcgtagagcctcttccgcctttacccgagcggcagtatatctttacgtaatcaacaaaattcgattcagccataaccaattatttttttcgatgtaatcatgtgccaatatgtccattggctataaacagcgcatggagcatatcagcacacatattttataattataatgtatctaccgctttacaaatatcttcgaagataccttccatggttccaagaccattgatatgctggtatttgccttcgcctttataatattctttcaacggtgaagtctgtgtattatatacaaccaaacgttttttgatggtctcttcattatcatctgcacggcccgattccttaccacgtttaatcagacgagtcatcagttcttcttccggaacatccagatccaacatcacagagatgtcctgaccacgttctttcaacatcactttcaacgcctcagcctgtggaatagttcttgggaaaccgtcaaaaataacccctttgctatctttgaaactatcaaacacacttgccagaatgtctaccatcaattcatccggaatcaactgtccctgatcaatgtagcctttagctgttttacccagttctgtgccgtttttaatttctgcacgcaatacatctcctgttgaaatgtgattaattccgtatttctcaacaatacgttcgctttgtgttccctttcctgaaccgggagcaccgaaaattacaatgttcagcatcttgttaatttataattctacattttaccattactggtatacctattattttatgttagtctacaactgtataaatatccggatagttacggccgaaaccatcataatcgagaccgtatcctacaatgaaatcattgggaatattcattgccacatattcaatattcaagtccaccttcagtttatccggtttcaccagcaacgaagcaatatgaatttcttttggtccgcgtgttcccaatgtttccagcagacgctgcatagtcagtcccgtatccacaatatcttctacaataacgatcgtacgtcccgctatgtcttcattaataccgatcacttccttaatggaaccggtagatgatactccctgataagaagccagcttcacaaaagagatctcgcaagggatcgtaatgtgtttcagcaagtcggcagtaaacataaacgagccattcaacacactgaggaacaacgggttcttacctgccaaatcacgattaatttcgttcgccacgcgaatcacttctttctgaatctcttgttccctgatagaaacagtgaatagtttatcttttatctgaatggtatccataaccggttattttaaaaaagttggttgcaaaaatacgatttttattccactccttacaccatctcctgcaaattctttaagagaagtcacagaatccctccgatatgcaaggtgtgaaaagccattcggaagttgaactaataattttaatggaattagtaccaaccggcatccgtcttttacctatttttaggtatttcacactctttaaggaccctctatctttgctgtctcaaaaacaaagattatgatgaaagtaaaattagcattactacttactcttataggaacacttcctttagcagcacagaatgtacggcaagaacaggacacagtctcttatatgaacgatgatcctttcaatcttgaacaaattgtggttacggcaacccgaacagaaaagaagattaagaacacaccggtcatcactcagataatcacctctaagcaaatagaagaaagaggaaccggtaacattcaggaccttctgactcaagaggttcccggacttaactttcaggaggttggctatggaaccagcatcgatatacagggattaggttccaaacacatccttttcctgatagacggcgaacgtatagcgggcgaaaacggtggcaacatcgactattcgcgaatcaatctttataatatcgaccatatcgaaatagtcaaaggagcttcttcggccctctatggttctcaagcgatgggcggagttatcaacatcattacgcgtaaagccaaaaagaaattcgaggcttccgcaggcatacgctatgcaggaagaaaccagcaaaactataaagatactcccaaagatcattcgcaatacaaatatcggattcatctggataaacccaatctgaacaccaatctgtctcttggattgaacctgggcaagttcaccatgaacaccgacgtactttacaaaagtttcgatggataccaattattcgataaaaaacctctcgtgaaatattttccggcctataacaccacaattaccgaagaactcagtaaaaccccgaccagtatatcgggatacgaagacgtacaagtagcccataaaatggactatcgtttcagcaaacggctcaaagtccagttaaaaggaagctattatatgctgaacaaatatgattttcaagcagataatatattcgagaaatcagaggactatacctatggcggaagcatagattacacgatttccgacaaatcctctttggtagcctctgttcataccgatcactacaaccgatatgataaatacgaactgaagagcggtcgtcgtctcgaatataaaaacaatattatccagccccgtatcgtatatagcactacggcgctcgataaacagaccattacggcaggattggaatattacagagaatcattattcagtgataaatttgaaaccggtgtgaaagaaaacaaaagccaatggtatgccaccgctttcctccaggatgactggagcatcaacaagcaattctccgtaatagcgggactccgctgcgactatcacgagaaatacggtaccaacctcactcccaaagcttccgtgatgtataagatctttccattcactgtccgctttaactatgcacgcggctaccgttcacccagcattaaagagttgtacatgaactgggaccatctgggcatgttctggatatatggcaacagtaaactgaaacccgaaaccaacaattatatctctctttcgggagaatatgtgaacagttggatcaatatcaatgccaacgtttatagcaactggttccgaaacaaaatagaaggaatgtggagcaatgaccaaacggaactccattatatcaatataggaaaaagccgcctggcaggagtagagaccatgtgcaaaatacaaataaacagacatatcaatgtgcatggagcatacaattatctgtacacaagcaaagatgctgatggagtccggttgagctcttccagtccacattccggtaatattcgtgctgaatataacacacgcatcccacgctatgccaccgttgtcaacctgtccggcaatattatggggaaaaagaaattcgatgtgttggatgaactggaaatagacggaaagaaggtagaagcctactatcaggctaaagtaaacccttattgtctttgggatctgacagtatctcaatatatcatgcagaatctgagaatcacagcaggaataaccaatttattcgattatacttcagatcgagtgactttcaatacttccacttcaccgggaagaaactattttatcgcatgtaattatacactttaattaaactaaaacaataatgaacaacaaaaacaaattcagattcgccattctattatttggcgtactttcagcgtttatcatcaccgcttgctcagacaacaatagtcccgacgacccttcacaaggagaaaacacgttgccggtaaaacaagtaagcctgagtcggaaaacagcatacggaaacgactggatctattattcacttgaaaaaggaaaagaagtaagcgtcagtgaagaatcccatgccgaaaatacagactgggacatcgcattcaatcgttacaatgtgcgtaccaacagcggtgcatccggcaaaggaaaaggtggagcattactcactaacattaaagatttggcagcctgtacgacagttccgcagggaacatttactgtcgacgcagcctataccatcactgctcccggcacaggtttccctcctcctaccatggagtccaccgctaatgaggttctctgtaaagcaatcacttttgccggccctcctcccacttacaccccaagcgattacgtatttatcgttcgcacagccagtgggaaatatgccaagttgaaagccaagagtttttatgatgacgaaggcaaaagcggtatttattcatttgaatatgccattcagccggatggcagtacaaatttaaactaagcaaaaatctctaatgaaaaatttctggaagaaataccataaatgggtaggtttattctttagcttttttatcctgatgttctgcttttccggtattgtactcaatcatcgtacactcttttcaaaagctgaagtcagcagaaactggatgccggaaagctatcactacaaaaattggaataatggaatcataaagggaacactacgcctacccgatgggaaaattctggcatatggtaatgcaggagtctggaaaacagactcctgctttgctacatttgccgatttcaaccgaggtctggccgaaggaatcgacaatcgtaaaataagtaatatcgtccgtgtagccaataacgatatctggtgtgccggattatattctatctatctcctgaaccatgacagttggaaagaatatccgatagccggcaatgacgaacgaatctcagatatcactcaacgtggggataccttagtcatattgacacgctcttatctttatacgagtgtttctccttatgacgaattccggaaaacagaattgaaaacaccggaaaactattcacccaagacctctttgttccggaccatctggctactgcatagcggagagttattcggtacccccggcaaactggcagtcgattttctgggagtagtattaatcgttctcagtgctacaggaatcatatacacccttcttcccccattcattcgccggagacacagaaaaaggcttcctgtcaagacacaggcaaaggctctgaaaacttcactgaactggcacaataaattgggtacatggttgatcggactgaccctattgctatctgtcacaggcatgtgtctgcgacctccattaatgataccttttgttctggtcaatacccggcctgtccccgggagtacactcgattcggataatccctggcacgacaagcttcgcagtattcgttgggacgcatcccggaatgtctggctgttatcttcgtcaatgggattctaccggataaacgatttacaacttccaccggttaagttaaaacaaactccaccggtaagccctatgggagtaaatgtatttcatccccaaagtccggacgaatggctgatcggatctttcagtggcctcttcgtctggaatccttccaccggcaccgtcctcgattattatacgggacaacctcctgcagccgttcacggacgaccactcggcggcagtctcgtcaacggattcactgacgatttagttacccgtgaagtaatcttcgaatacgacaacggagcacgcaataaagagaacaatttagtattaccggcaatgccggaccttataaaacagcaacccatgtcgttatggaatttctgtttggaacttcatgtcggtcgttgttattccccattcttaggtgttttttcagatctattcgtttttatttccggccttctgctaacgttaatccttatttcgggatatatcgtatataaaagacaccataaacgaagcaaaaaaataaggatgcattaatgcatccttatttttttgcttatagaaccccaaaaagctagttatagtttttagaaggaattaataacggtcataactaaaattattatagatacaataattatcttttagataaaagatgcaagtgaaaatatttgtgcataaacacaatatatattccactcagcaagaggatacagcccaataaataccaataaccataattttggcaatataaatatccgatgataattataatttgcgcaatcatatacaccaacgatactactacgtgcggtattcccagttcattagccattatctgatataaatgtttccggtgaggcaaaccaatattttcgtgaagcatcaatcgatgaacgatcgtcaacacactatctactccatatacagcaagcaatataagccagccaaaattctctgttttgataattaaacttccgatcaggaacaggattacaaaagctatactgaccgaaccgacatcaccggcaaaacatctcgcttgtttgcggaaattaaaaaaattaaagaccaatactgcgcaaagcatagtataaataaggtccggttcaacaaatgggacatatatcctatttatgtaggccaatgccatcagaatgatcaatgaatatccgcctgttatgccattaatgccatccataaagttgtaagcattgataatcccagtacaaatgatcagggcaacaaggatcgtccaccaaggcaagctaaacagcccccattgataaaacatcaaagccattgccgtaaaatgaaagaccagacgaagtccttgcgaagtagaacggatgtcatctataaaactgataaaggttatcagactcaaagccagcataaaccatggatattcaaagtggtttgtgagaaaataagccaacgccccaaaataaaagatgatccctccaccacgcagtgtaatccgggtatgtgaactacgttcgttaggcttatcgataatgttacacttatccgcaatacggaaataaaaaagttctgccaggaatagcagaactaagattattagatagtacataagttatttagtttcttcaaatgaacgaatggtcttcatcaatccttctttagccgttacaggtaatttatcaatgcccaaagcggccttgatcttagcgttgcttaccacataattttccgtcagtttacgaagtctttccgtattcaaaggtaaatgcatcaaagtacccaggccggcacatccttccataacccttttgttcatcttccagatatgcggcttttttcccattgcttcacacataatgccaatcagttcattcgttgaaagagcttcatcatctcccatatggtagatacccgtaggcacatcctgattcaaaagcccctcaatcacataacaaaggttatcgattgaagtaaacgaacggcgattatcaaaatcgccaagaggccaagggattccttttttcactacattatataataaattcagattccctttatttcccggtccgtgaatcatgcagggacgaagaatatacacctgtttattcttgggtatcctccccttatctttctccaaccgcaaagaccgatcttcactaatagaagcagttggaaacataaaatgattttttatatattcttccgccttaatcttactctccccataaggaccaaccggagtcggaatcacgtcttcggtaagcacgtctcctactacactatcagcagcagctttcaccgaactaaagaaaatgaatttcttggcagaagactccaaaaagaagtcgaatatcttttgagtcagaccggtattgatgtcaaaataggactgagcggctgattggtttttcgtatcatgggcctttccggcaagatgaataatggcatcgaattggggaagagtttgaaaaggaaaagatgtgggttcgatatctagccaagaaaaagtagttacgactccctctttagcaggagaaacaatatcaagcccataaaagatacaattctcttttaaagcttcaaccaagttagaacccacaaagccatgaatccctgttactaatatattcatcattactgtccaatacacgtatattcaaaacccatatcatgcagttctttcttatcataaatattcctgccatcgataatcaaagcacgattcatcgtctttttcaatacaccccagctaggcatacgaaactctttccactctgtaaccagtaacaaggcatccgcatcaagaaccgcatcatacatatcattggcatgctctatgctgtcccctatccgccgtttacattcttcaacagcaataggatcataagctttaacaagaccgccacaagacaatatcttatctattagaaccagagcaggagcctcgcgcatgtcatccgtttccggtttaaaagacagcccccacaacgcaatacgctttcccgaaagatttccatcaaaatatctgatcaacttattaaaaagaatacttttctgagaattattaacttcttcaacagccttaagcacacgcatggaatacccattcttatcggccgtttttatcagggcttttacatccttaggaaaacaagaaccaccatatccacaacccggatataggaatttactacctattcgggaatcagcaccgatccccttacggaccatatttacatttgcaccaaccaactcacaaagattcgcaatatcgttcataaaactaatacgagtggccaacatagaatttgccgcatattttatcatctcggcagaagggatatcagtaaagatcaaacgataattattcatcatgaacggtttatacaaacgctccatgatagatttggctctctcagactcaactcccacaactacccgatccggcttcatgaagtcatcaacggcatctccctctttcagaaattcaggattggaggccacgtcaaattcaagattcaaaccgcgtttatccaattcaccccggatcgtagctttcacctgttgcgctgtgccgacaggaacagtactcttcgttaccaccagtacataatggttcatcgttttaccaatcgtacgggcaacttcaagcacatactttaaatccgcactgccatcttcatcaggaggagtaccaactgcactaaacacaacctcaacatcatccaaacatgaggctaaggaagtagtgaacttcaaacgccccgcattgtaattgcggtgcaccatgtcttcaagtcccggctcatagatcggaattatgccttttttaagattatcaattttagattcaatcacatcaacgcatgtgacgtctactcccatctcagagaaacaggtacctgtaaccaaaccgacgtaacctgtaccaactatagcaatcttcataattatagattataaaattctttataccaacttattgtttccttaacgcccgcctccaaggacgtattgggttgaaaaccaatttcccgcgaaagagaagaagtatccgcataggtctgatacacatccccgggctgcatcggaagatagatcttgtcagcttccctcccgattgacatttctatagcacgtataaaatccatcaattttacaggacgggaattaccaatattataaatcttatagggagcacaggacatgcttggatccgcaacctcagcatcccagcactggttcccttccggaatagaatcagccactctcaagacaccttccacaatatcatctatatatgtaaaatcacgaagcatgttgccattgttaaagaccttgatggggcgaccatgcaagatagcatccgcaaatagaaaaggagacatatccggtctaccccagggaccatataccgtgaagaaacgaagacccgtagaaggtatattatataaatggctataagtatgtgccataagttcattcgacttcttggttgcggcatacagactcaccggatgggctatgccatctttctctgaaaaaggaacctgtccattcaaaccatatacactactggaactggcataaaccaaatgtttcacttgactgtgacgacaaccctcgagaacattcagaaaaccgtctatattactttcaacataagcatatggattctcaatggagtagcgcactcccgcttgtgcggccaaattgattactacatcaaaatttccattagcaaacagcatttgcatagcctgcctatcctcgaggttcatccgcacaaaactaaatcgaggataaacattactccgtgtgaacttataccatgacagttcagattgagaaacacctaagctcgaaaggcgtccatactttaaattaatatcataatacgaattgatattatccaaacccacaacttcatccccacgttgcaaaagacgcttacaaacatgcgaacctataaatccggcagcaccggttactaataatttcataaagttccaataactaatgttctataaatatccaaatgtttctttattacgtcatcaatagaaaagtccttctcagccagcttccgggaattacgtcccatactctgtcttacatctttattttcaaataaaaaacttaatcgggaagccaacgtatcactgtcttttatgggaatcagatatccattataaccatcaattacagtctctttacatccgatcgaattagtagttataataggccgtcctatagcggttgcctcaatcaaggatttaggcagtccctccttatagtaagaagggaaagcgacaatatggcagtcctttaacaaatccaaaacatccgtccgataacctaaccacttgatatacttcccgtcacataccgcttgtaattcactttcttttattgccatgggattatcatcaagtccgccacacaataagaactgaaccttaccctggtattgcttcctaagttttatagcggaatctgtcaggataaagatacctttctctacaatcatacgagctgttaacagaactttaatcttcccctcctccggttcaggagtataattatactgtttcaagtcaaccccggaccccttaattttataagcttgagattcctttatgatctgatgttttaaaaacaatgacttgtcttcatcattttgaaaaataacagcgacattattacgataatgagaaaaacgaagtactttaggaagtaatttcgaaataatagaccggtttccctctgaaaaaaatatacctaaaccgctaacggcattaacgatcccatggatattagccaatttcgcagccaaagtaccccaaagaatcgttttcaaaccgacatgatgcacaatatccggattctcacgacgataaagatggtaaaggaaccaacaagtatgcagctcctctaacaggttttgtcccgaacgattcatgggtaaatcgatcaccttcaggccaagtgactcaatatctttcttttttccggtatccttggttacgatagtgacattgtaaccagacttttgagcagttagtgcaatatctttgcgatgagagagaaaaaaccaatcaacgttaactacgatgaaaaggttatacattaatattattaaataaaagatgaaatatcaaactgttgaccaagttcaaaatcaaaagaatctgggacgaatccccaatacccacttcctgaataaaaagtcatctcaccaaaaataatattaccatcaatattatatagatcaatacgaacatgtggaaaatcctctgataaaacctctgctatttctatcatacgatcaaaatttttaggcttcaatattaattgattagaagtaggataactatctgattttacattcaaaggattccaattccgatcaaagaaatttatcttagcacctttatccctatctgttagaacaaataaactatggacatgtccacaaaaacaatacattttataatctgtaagtgaagtttccgaattaatatttttaataagtttttcaataataactcttggccttcctcccaaatatccccactctcttcccggattaacttttctatttaattttagccatgagttcactgtcttaattgtttcaaatatatttaattcatctttattcttacatataataatattattgcttcctcctccatccgtggattttattacaaactcattaggtaaactatcaaaacagatatcttcagcagagtcatatatgccatacaattcattgaggtatttagccattccttttgaagctacatagtctctgaccatatatttatcagaacagaccttcagtaaagggtttctatagaagcatttataagattgtattttttcagtataacgttgaggtttatttagattcaatttatgccctgtttttatccaatattgcaatcttaacataatagcatctggaataaaagacaaagctcttaacatcgcaagacgcgttgtctggttcttcaaaattcttttataattcattttcgatttatctttatcacttctttcacaatatcatgatgagattcacagtccataaagttttggataaataaccttgttttagaaaataaaaaagatggtaaataccccatacgataaatatacttgagataacgccccggataaggttcaaataaagacagatataaacgcctcttggtcatacagaaagcataaaaggagtctttcaacatatccggactctggataattttatttaaagaagaaattttatcaaaaaaaacagctttttcactttccttcaataaacgaaccttaggcaactgatcacattgtatatatggtataagagagaaatcaatctttccatagtcagaaaaattaagacttaacatatatccttcattccaaatactatttcttttaacaggattatcaaagcaaaaattacccaacccataaaaaatatatttattgttataaatctcataaccactaaaacaatgttgatgatggtttaccacaacatccgctccagcatctataaaaaagcgatatgtctcttgcatacgcaaactaggcaattgataatgttcatgtcctccatgcactatgataataacataatcagctgttgctctagctttttgtatatcataataattagatataggattcaatgggtttgagccaccagtcgtttgtgttgctatagagaattcatgttcacaaacattgataaatgcaaaacgttttccgaacaaatttttaaatttaatagctcgagctgcagataaagactcaccaccaccaacaaaatctaaatccaaatttttgcaacattcaagtgtatgcttaacacctccgtctccataatcataaaaatgattattagccaaggtaagaagattaaaatccaataatttcaaaatttctacagctctcaaagacgaagacaaatttggaccttgcttcttaatagcacaatcgtcatgctcaacaacaggacactctaaattcactatagaataatcatgtcccttcactataggaataatatcttcaaaaacagactgatattttcctagattaatcagatcatcaatcctatttctaggacaataatctcctgttattaatattctaatcataataaaaatattgtccaatatatcatagaaagtactcctcagacagagaaagcactaattagcagataattaaaatactacaactcttttaaaaattctgtcacagaatctttataagaaattaaattgaaaactctacgccccaataaataagagttctttttaattcgtgctgtctgatccatattgtcatatagccagtctaactgttcggctattgatgccacgttaaaatcatctgcaatcaatgcatttattttatcctcaaagtaataaggtatttccccataccgagttgtcaccactacgccatgacacgctgtatattcacatattttattaggaaatcgggcaatatcttgaatggtatttctcagtggtataaatagagctaaagcacccttaaacatagaaatcaaatctgtatattttaaattttgaagaatctccattttaggacaatatctcctaatctcagaaatcactacaggattaccatttattaccatctttaatgaagccacttctttaatcctagatttattataagcgtctattatcatataaattatctcagaatagcttgtatagccacaaaaaagcaaataaggagaggcttctttttcacaaataatatgatcaaaataatcataatcacagatgggagggatttgaattattttaataaatttattaacttcttttgtcttagataccaaaaaatgactaatacaaatagcaccgtcccaaaacttcggagcatagcaattgatcaatttaccattaatccgatggtatacatttcttgatttaaaggaagatctatattcacaataatgataaacaaccttagcacctatacaacgtgcaattataacataatagaaaatatctataaaatgtcctgaagccacatggagaacatctattttctttttcttattcaagaatataagtttccagaattcaattattattgtataaattaataagaactttgacatacatttgggtattcccttcaaattacaaagttctattacactaactctatcatcaataaattgagcatcatattcccaattaggtttcaatgccgaataacgatttaatattacaacatcgtgattcgatgaagtaaacaagtttgcaaatgagagtaatcttgtgtcaatagctctacgcgcatatggaactccagaaagtcctacaaaaactatattcatcttctttttgtcttaaaaatatcaatcaaatgaaggcagtatcctaaagggaatagtaaaatagtagacttattaaccaatttcaatttgcatgcaaatcctctttgtttatcgcaacaaaaaaatctccaaaaattaataatatacctgatcctactattaaaaggaacattcattttagagagctcactatatgtagccaaagtcgttttaggactttccatccttttattcactcctaatgcagtaagaccatcaggataatattcagtcaatattattggatgtgcaaaatatcgtaatttatagtgcaaagctattttataccaaataagtccttccccacaatatttctctccttcaaaaatcggaaatggatatttctgcaaaatcttagtcctatatgcaacagccatctccccaccatatttatatttcaggttataatctattgcagaacaatctaaataagtataattaagctctccccctatagttttaccactaaaaaaacttttcagccctgtcactcctgcaaagttatcattatcagatacttgtttataaacatctactatagtctgtaacccagattcaatcataacctcatcactatctacaataaaaaaaagatcgcctttagctagctctactccccaattaatagcagcatgtttaccagcattattctgatagtaatattgtatatcaatcttatcgttttccttaattgattctataaagttaaatgtatcatcagtacttccatcatctacaataagccactcaaaatcaagaaatgtttgattaactaaactttcatataatctaggtaacagagtggcccgattaaatgtcggcgtaaacactgttatagtcatattcactcacattaatattatttcctttgtcatttattcaataatttcaaaataggagaaatccatcttgaaaatttactatatgaagattcgtaactatattcttgcaaatatatttcacgagccttactattaaacacagtatgtgttttatctacaaataactcatttagtattttcacaaatgcatacttgtcattacattcatacataactccagaacaattgacatatccagtaaatgcttctttggtaccaacaacaacctttccatacataaatgcctccgcaactttagttttcattccaccaccagaaaatataggagatataacaacagaagccatagaataatactctgataaattttgtacatagccataaacttcaactctttcactagcgaattcttctctatacaaatccatccctttaccaacgataattaattttccatgtacttcagggagcacattagaaataaaccattttataccttgaatatttgcaaagaacgcagcaccgacaaataagtaaacaaattcttttcttatattacaattttctattttactacattggtctttaaatgaagtaggtaaaatcaagtcagcacttttattatatatcttttgtaacaaattactctccctctgatttaagactattagataatctgaatatttcacagattgaaattcgaaataacttgcggccaaataaaaaagataatgagtaaagcctgacactctcaaaagttctaaagcataatacttttcaatattatgaaaaaatgtaatgattttaatattggggaaatcacatttaatatgctttgaaatcctacccatcaaagactgactgacaaataccaactgataatcacctgtttgtaattcagcaaatactttttggatcaaaagagaatcaattccaaataaataacgtttataaaaagatcgtgtttctaaaaccggcaatacttttacatatggaatactatcatacaatagctctaaattcctaatatcaatttgatcagctccacttttaactaacttcttatcgtatccgatatacaataccttcatgttaatatgctttaaatgataaatattctaccacattagagaataaaatctgaaaaatagaattattcatatagctcgaacaatacccaccagacaatgtcctagaatatgtcatttggaaatttgtaacaataaaaacaactatgaataaaaaaatcactagactatatctctttttatcacgtaacaattggataaattcaaataaaaaaaggaaatgggcaaaattagcaaatcggatatatccatcaggattattataatttaagtacataataattaaatatataaatattatgttcatatatttattacttacattaaacaatttatttattgaaagatatattgcagacaacaacattacgcaagaaataccaatatatctgatagaagattgagcatcaccaacaatagaataagtttccgctttcttcaacaataaacttccaaacccaacatctggaagaataatagaaaacaaactcattatatttatgcgagaagatattaatacagctagtataaaaagtaatattaatatttgggtatttatttttttatataaaaacaaaggaagcaacatcagaattgaactatgtatgccaacccctataatgtataataaaataatcttaagtttattttcattacatataaaacagataaatgcataaaagaaaatagcaaatgaagcagcattttttatagtatctgttacttgagtaaaaaggataaatccaaaaatagaaataaaagtaactaataatatatttataggagaaattgatatgccttcatgctcaaataacttaagtaaagatagaaaataaaaatagtatatacaaaaaacccaaaaaatagaaattatctgaacattagcaaaagtacacactaaaagaacattaattaaattaaacgaaaatgtaagattattctctaatacaaacattagtgagaataaatcaaaagactgatcgataaatggataataagcgttatagtatcttataatatcagtatcaagataaaacagagacttttgagtatatgctaataaagcaaatgacatagagatcactaaaaacatgcacttgtattgacatatggaaagtcgtttacagaataataaaagaactagaaatatcgtcaaaaatggagcaaataaccaaaataacaatattaatataataaatatggtatttttatcaaaaacaagaaattttttagtatacataaagcagaagtaaacccaaatttcgcattagtattttaactactgcttttgaggcaaaacaaatatttttcaatacaaacattaattgtcttttataaatattatccgagaatttatagtaactttgaatattcttccaattctttttaagaaagtaccaattattagcaattgtcgataagtaccatttaatgcgtcctctactatgcgctccccctgttgctacttgacgaggtaagttaacctgtacagcacgtgaatcatacatcacctttgctccttgtaaagtacatcttatgaagaaatctgtttcttctcgataagcattacctgtaaagttttcatcgaataagatctgaatcgctaactcttttttgactaaagcgcaagcttgacaaaaaggaacaactataggtaatgcagtagagtaattaaatgaagcttttatcttttttatatcaacaatctcattcttatcaactaattgaatatcattaagttgaacatattcatctattttattaacatattccattggaagataaagagcttttgcaccacagatatccgcattatatttatacattgtttcttttaaataacggatagaattaggcattaaaatactatcatcatcacccaaataaatatagtccccctttgatattttaattcctatattcttagaataggtttgtttcttatttaccgcattgcgtatatattttacttgtggatatttttcctgaatcttctttacaacttcagctgtattatcaactgatgcgtcatctactataataacttcaattacgtcctcttgcaaatatgtaggaatcgtctccaataacaacttagccctattatatgagggaattaccacagatactctcattaaatcttaatcctataagttagttaacgatattacattccccaaatgaagcaagtaaacatacatcgtattaaacacatttatataaacttagttattaactattgacttaaataaatccatccagatattgcataatctggagacctcatatttacgagtgtttagcactgatttttttgacatttcacgaagaatatcattatgtgacatcaaatattttaatccctccaaaaaagtatttaaatcattatttgaaataatcaatccgtcctcaccattattaattagttcatgaacagattcaaaactatccattgcaattggtacacatgcacactgtttagcttcatttaaaaccagaggaaatccttcaaaagcacttgtaagaagtaatattttagcttttttataaacatcaaatgaattgacttgcccaagtaaacgaactcttttaagccctaaggaacaaatagtatcctgaattaaataaaagtcgggaccatctccagctatatcaaaattccaagaatcaaattgttcacagttttctatctccttccagattctcaaagctaatataatgcgtttatgaaaatcactaatacgccctaccatcacaacagtattacatttgctctgatagcaatcatcctcaaaaaagaaagaagaagataatgggtttggaatagccattacttttttatctattcctaattgatctttataacactctgccaaaaaaacatatacatcacataccttgatattatatcgatgatgcaaattattccttactttagtagcaagcacaaaaaaaggaaaaaatatttttttaagacatacacgcaaactatatttatctttcaaaatagcccattgtgacttccatggcaaatatatttgtccatgatgaagtgttactacaggaatatttatctttttcttcactcttctgcagagttcaatactatctttcacagaatcatggttaaacagcaattcgattttatattcacataaatgtgttattagaaaattcacattttcttttgactccaatatttttttttgaggtaaacaaattatttcaatagaagaatccagggaataagcattaagtccttgctctaaagaataaataactactttactcccttgctttaccatttcatttgccaaaatgactataaccctttcaacccctcccaatgaaggaaaatttcgataaacaaatgcaatagtcatttcttttgcaatagatatgaattaataatactccaaaagtcaaatacctctttaattcggaatatgatacacatggatatatacaaccctattccaaccaaagttcctataaaaattttgagaagatcagactccacaaatatattaacaacaaacactactcctccaataactaaagacagaataaagaatgcataaatatttctcatttcatcccagaaaccaagtccaataatccttttcacataatatgttgaaaccaataaatctataatacaatataaagctaacccgatacacataacatctattccaaaaggtatagtaataaatagtacaataaccgagataacctttttaattatttcacttttcaacgaataatctgttcggccaacaacacttaaaatattagcatttattctcattaatggatcccacatataagcaatacacaatatttgaacataaaaaaccgatggtaaccatttatcggttaatacaattttaattattggttcagataatacagcaagaattatcattataggaaaaaaaataaaacaaaccaatcgaatatacaccttaaatgtctttttcaatttaacataatcatcctgaatagaacataatattggatacatagccattgttacaatatttgtcatattagaaggtacaaaataggccatagtttgtccacgactaaaaaagccaagatcaacagatgaaaattttctaccaattactattgtatacagattagaatagattgtatgtaaaactccagctaataataattttgatccaaaagagaataactcctgaaatgattgtatagagaaagtccataatggcatccatcttgaatatatccaaaaggaaactgttgagataaaagcagatactaaggactgtacgactaaagcccatacaccaaattggtgatacgccatataaataccgattagcccgcttacaacaactgctattactgaaaatactgcctgaattctaaaattgagtgctattactaatttagcctgctgaacaattctgaacgcagatataattaaactaacccccattaccctagtgatctgtttaagttcaggctgagaataaaaactggcaatatatggagcgctccaataaagaaaaaaatatacaacaacactaatcaacacatttgaataaaacatagtagaatagtcaacttctgtccgatcctgtttctgaaccagagcgttgtaaaaaccacaatcaatgaaagattgagctacagataaaaaaatagacaacattgctatcaatccaaaatcagctggagaaactaatctagctataacaatggtcaatataaagcgtaatgcttgccccgacattttctcaacagcattccacattaaactatttaatgctgccaattttaaatttttaatcatcatatacaatcatcatctccaagttattaacaatataaaagcattgatcattcaaaaatacaatcaatatttagtatagaaaacgtctgcaacaactaactttttcaaatctcaaataccacaactctcaaaagtaaatttcacttctcttatcagttcctcatctcccgtctgctcaaagcactccagcagcaactgacatttcaatacagaggctggtagtttttctaaaacagtcattgaacgatccaataattcttgaataacctgttcattctcagaggagaaattaaacagcatggtatcgtaacctttgaacaaagtaacaagtatttccgcctcttcttcgggagattctcctttctgaagaagaagatcggcacacaagttacggagttcttgatttaacgcagtaagttcattcacatagacaggagtaccgtcctcgccatactccaagagtttcttcactacggaggacacagaattacacagagaatttttcattttaaaaaggaatgaattatgattcgtcgattcttttcggtttttatttgtatagaagagtaataatatccaatagaattgtatctaacgacgtaacggggcattacatatattgttatcgccattacatatattgttatcgccattacatataatggtattttctttacatatatactttttatttctctttccggacgtagctagccggaattgtaaccatagcgctaccgaacatatcgatacgtactaaaatatgatatttattattatagcggaccaattctccccgcaagccttgtaaatcgcccttggcaactactacacgagtacctttgggaatggactctcctgtcaggatcacctgatcctgggagtaatcgagcatatagcgaaaatcagccatttgcgcatcagggatacaggtaggagccccggtggaacgatcacgaaggaaatcgtatacattcagtgtacttcggacggcagccatttcctgacgggagatatgaacgaaaaccatacggggcaacaaaaggcgctcacgctcaatgcgttttccttcacgctctatgacacggttttgtacaggaagaaaggtatctacctcctgcaattgaaaataatcccgaactttacgttctgagttagttcgtgtcagtacgacataccaatgtttatcgctatctgttgtctccaagactacgttcgtaagaaaaagtttcagtaatgactaagaatgaaaatttgttaaaaacaagaacattcaaaaaacatgccttattttcagtaatttacaaattaagttttatgataatcgggtacagaaaaagtattcgcaccggatttgaatactatccgatacgttgaattattttattttaaacatatatcggacataaagaaaagtatatttgtccgcctatatatttacgggtgcaaaggtaaaaccttcttttgagtctccaaaacttttcacaggttattttcatcataggaagttatataactgaatatcaaagatataatttatctctttgcaaataaggaaagcagcaatatacataatactaatgtggctcataaaagaatgtggaaataagtggagaggcaggctatggagagtcttaacggtaacttgataaacagacaactacgcacatcttgaatgtaagagaagaattttacggcagaacgcatccagaatataagcaattgattatcaaacaataatatcttaataagagaactgtaggaagttaacattaacagtacgttaatattaacttcgtaattgcaagatattaattctttagagatacgaagttaataagctattgataaggagggaaagcacttttacgggcattaacattgttaacgtattcgttggtaagagcgtcccggcattggttacaaccgcacagtttgccgatggcttaccaggcacagttcttctttcttcgtccggaatatggccgtatcggtaaaaccacttttggaaagaatcgccttcagttcatcacaggaatgaatctccatcccttcaacaagtcccgtccaagccttattggcaggatcgcttatctcacaacagataagaaacgatccaccgggctttaacacacgcgccacttccgtaaaagcatgctgcaggttaccccagaagtagacagtctcgaaagcagtgaccgcatcgaacgcataatcaggatagggaagtcggtggactcctccctgctcgataaagcagcgtgtaccgagatactttttattttttttacgcgcaaaggtgacactctccggtgaaatatctatgccatacgctttcccttgcgggcaacgttgcaatatctgtagcaaattggcaccaccaccgcaaccgatgtcgagtacactccattccggttgccattgcaagcatgacattccccattgcgccaatgatgcatgtcctgtattcatcccccaaagtatcattcttccgaaaaaaccttcaggcttccggaaattctgtaagatcctgcttacaaagcctctcttattcatttgtctgctgatttaatatttcaggcaaaagtacagtttctgcccaaacaggcaatacccagaaatagggaatttatttcctaaaagatatttgcaggtatgcatctgcttcccgttaaaattatgacgaacagatgcccggaggtgcgatgctcttttcgttttcgtttcataaatattacataaacattacaacataacagattcattatcaatatctattaataataaacattcatatattcagtaacaggtctgtaacactaccctcctatttttgcaccggaaaacaacaagcagatgttatgaacaatgtacagcaagtaaaaacttattcgcagagaaaaatttctgatttccttttcattctttgggcaggcggagcagcgctgctctcctattcattggtatatgcactgagaaagccttatacagcagccggatttgacggacttgaagcgtttggaatggactacaaagtggtagttaccatcgcgcaaatattaggatatgtactttctaaattcatcggaattaaattaatctccgaattaaaacgagaaaaccagatgaagtttattctgatctccataattctggctgaagcttcgttaatattgttcggactgttgcccgcaccttataatataggagccatgtttctgaacggactttcactgggatgtatgtggggaatcatttttagctttatcgagggaagacgaatgacggacattcttgccagcttactcggagtcagtatggtcatcagctcgggtaccgccaagtcggccggtttgtatgtcatggacactttgaacgtcagcgaattctggatgcctgccctgataggcggagttgcccttcctctacttgccttgttgggatatgcactcaaccggcttccacagccaacagccgaagacattgccatgaaatcgaaacgggaaacactgaacggcaagcaacgatgggagctatttaagaatttcatgcctttcctcactctgctctttatagccaatgtggtactgactatcttgagagatataaaggaggacttcctggtaaaaattatcgatgtctctcaatactcttcgtggatgtttgcacaggtagacagcgtagtaaccctcattactctgataattttcggattaatggtgttcgtcagaagcaacttgaaagcactgtcgatattactgggattgatcattgccagcatggtagtgatggcagtcgtttcgtttggttacgaacaattgcagctggacgccatcgtctggctattcatccagagtctgtgtctctatctggcttttctcactttccagactatcttcttcgaccgttttatcgcttgcttcaaaattcgaggtaacgtgggtttcttcattgctatgaatgattttctgggctatacgggaacagtcatagtattggctgtcaaagaattcttttcaccggacattaactggacagctttctacaatctgatggcagggtatgtgggaataatctgtttcgttgcttttgtatgctctttcatctacctgcaccaacgctaccgcagggagaattacggaaagacaggggtattcagaaaaaaagaagaagaaaaagaagttcccgatttcgtatattaattgctatctttgtgggtcaaaaaacttaaaatgaaagttcaccatgaagatttttccaagtagcagcatcaagaaactggatgcttacaccatagaacatgaaccgattgcatcgatcgacctgatggagcgggccgcacaggcactgaccaaagccatcaccgaacgctgggacatcacaactcccgtcacggtatttgccggaccgggcaacaatggcggagatgcccttgccgtggcccgaatgttggcggaaaaggaatacaaggtcgaagcctatctgtttaacccgaaaggggaactgtctgccgactgccagaccaacaaggagctggtagagatgatggataatgtgaagttcagcgaagtaagcacacagtttgtacctcctaccctgacaatggatcatctggtagtggacggactttttggttcgggacttaataagccgctaagtggcggttttgcggcagtagtgaaatatatcaatgcatcgcctgccaccgtagtcgccatcgatatcccctcgggactgatgggagaagagaacacatttaatgtaaaagccaatatcatccgtgcccaattgacattgagcctgcaattgccgaaactggctttcctctttgccgaaaattccgaattcgtaggcgaatggaaactgttggatatcaacctcagtcgtgaagcgattgaagaaacggaaagcaattatgccttattggaagcggaagaaatacacgctctgatcaaaccccgtaacactttctcacacaaaggaaactttgggcatgctctgctgattgccggttcgtacggcatggcaggcgcgtcgatactggcagcccgcgcctgtatgcgttcgggtgtaggcttactgacagtccatgcacctatacgcaacaatgatatcctgcagatttcggttccggaggcaattatcgaatcggatgccagcgatacctactttgcctgccctacagatacggatgactatcaggctgtaggaatcggtccgggcatcggacgctcggaagagaccgaagctgcactgcttgaacaactcagtggttgccagacacctctggtactggatgccgatgcactaaacatattggccaaccaccgccacgcactgaccacattgcccaaaggctctattctgactccccatcccaaagaactggaacgcatggtgggcaaatgccagaactcatacgaacgactgatgaaggcctgtgaactggcccgaaccgccaaagtacatatcatattaaaaggagcctattcggcaattatcaccccctcgggcaagtgctatttcaactctacgggtaatccgggtatggcaacagccggaagcggagatgtattgacaggtgtcgtgctggctttgctcgcacagggatatccggctgaagaagctgccaaaatcggtacttatgtacatggcctggcaggtgatttcgcacgcaaaaagcaaggcgttatcagcatgacggcaggagacattatcagtaatctgccattggcttggcgtctggtaagcgaataaaagttaacaacttatgattttccaaataacttcattaactttgttttttaaaccagttaaaataaaccggaaatgaaaaagctaattatactgacagggctgttactctctacctcggcttatgcccagaccgaagttacagcgggagttacccggggaaaagattacggtgtaacctatgcacttcctaaaacagcaatcaatattgaagtcaaagtcaataaagtgacatatactccgggagaattcagcaagtatgccgaccgttatctccggttgaccgatgtgtcgggtgagcctcaggaatattgggaactggtcagcgtcaaagcaaaatctgtcggtatccccgatagcgaacatacctattttgtcaagctgaaagataaaacagtagctccgctaatagaattgaccgaagatggtatcgtaaaatcaatcaacgtaccgctatctcctaaaaaatcggctccgatgcaacccgccacgacacagaaaaagaagataaatccacgtgattttctgaccgaagagattctgatggcaggttctacagctaaaatggcggagttggttgccaaagagatttataacattcgtgaaagtaaaaatgccctggtacgcggacaggcagacaacatgcccaaagatggggagcaactgaagattatgcttgccaacctggaagaacaagaggctgccatgaccgaaatgttctcgggtaccttgaataaagacgaaaagatattcaacatccgcctcactccggataaggaaatggacaacgaagtagccttccgcttttcgaagaagctgggcatagttgctaataacgatcttgcaggagagccggtttatatcacgctgaagaatctgaaaaccgtcaacgtaccggaagacgatggcaaaaagaaggtggacggcattgcctataatgtgcccggcaaagcacaagtaacactaacggaggggaaaaagcaatggtttaacggagaacttcctgtcacacaattcggtaccatcgaatatctggctccggcgcttttcaataagaaatcgactgttcaggttactttcaacccggatacaggaggcttgatcaaggtagatagagaagaaggagaataaaacataatcaaaaactccggccgatcttaaatgaagtgcaccccaaaagttcatgtttaacttttagggtgcacttcatttttaaatcagccggagtctctttattatattccgatagtatatcgtaatgcaatcagttctcaatcactaatttcacaaatccgtctttctgcaactgagtgatataagccgtaatacgtgattcgtaattttcttcataattgaagtgttctgccagctcttcaataatccggcgtacggttctctttccgtcaatcaactcccatacggcagtgccatgatcttccagccggacatgaatatccgcagacattcctttaggcaacaagaatcgccgcatccactcgtatttaaaccgggggaaagcaatggtaacggtaccatcgcttcccttttcggccgtaatattttcactacggaaaggaattacatccagaagatttattttctctttcacgtctgccatatactgttattttttgatatttgcttcctgcagtccgtatcccttcttcttgtcttccgctttcaacattaaagctacaatcagagccaaaacaccgaaacaagcaaagatagccataggcaaagtatagtcataagtctgcgctccatccacaacaggacctttgcaataggtattcaacacccatccgatcaacagaggtacccccatcaatccccagttctgcacccagaaaatcaaagcataggcagtacccagttgtttctccggaataattttcggaacagaaggccacatggccgaaggcaccagtgaaaaagcaatacccagaacaatcataatcacagtggcaaaccaccatacgttcagaatgggaagcgcaaacaaagtatgcacaccaatcagcatgacggcaccgataatcatcaacgtcgctcccttaccgatacggtcataaagagtaccaaacaacggagtcaggaagatggtacctatcggtagtaatcccggaatatttccggccagcttagggtctacgttatacttctgcaccatcaagtcggttgcatatttaataaaggggaaaacagcagaatagaatagtacacacaataaagcaatcagccagaagcctttattggtgacaatcagcataacgtccttcatacggaacggttcttccggttcttctccctgagcatctaaagaagcgtcaagtttcttatcataaaaggtataaatgaaaaaggcgatagtaccgatgcacagcatgatcaggcacaacaaaataggcatcggaatattggtatggaaactgccgctttcatccgtatagccgaaataatcggcaatgggaacggtaagcaccatagccaaagtggtaccgatacgtgcggttgccatctcaagtcccatagccaaagccatctctttacctttaaaccatttcacgataatcttagagacggtgataccggcgatctctacgccgacaccaaagatagcgtatcctaaagccgccagaaagacctgagtcttgaaacccataatcaaagctccctcaggaaaagtagtagagatagcataatattttagtccacaacccaacaccatcagtatacaagctcccataccggtgaaacgaactcccatcttatcgagaataataccaccgaaaatcaacatgagcaggaatacattgaaccatccgtaagcactggtaaagaatccgtagtccaaactatcccagagaagctctttctcgagcataggctttaaaggggacattacatcggtgaggaaatagccgcaaagcatagtaaacgcgaccagagcgagcacactccaacgaagtgttttggagtcactcaatttgtttttcaattgttctgtcattgtaatatttaaactcagaaattagtaaaagtgttattgcgaacaaaggtaactaaatctgccttgtatgcctaacaaaaagatgcattttacggcaaaaaataagcgaagctgcaagtttcggtttgaaattgcagcttcgcttatcgtttcttaaaaagaatctgttgttagtttgccggagtagccggagtttctgtggcaggtgcttcaaccggagcagcagcgtctgtcttcggtgcagtagtacctacgggcaggttataagggttggtctgctcttcctgctgtgcctgttccataatgacatcttgtgttttagaagaagaagtcggaacgacatacgcagtagcaatgctcatcacaaccataaatgcagctaagccccaagttgctttttccagaaagtctgtagttttgcgtacacccataatctggttagatgatgagaaccctgaagcaagaccaccgccttttgagttctgaatcaacacaatgaagcacatcagtatggctgcaataaccattaagataactaataataagtacattttgttattttgatttagcgttaataatcaatttctctaaaaatctgatttggtctgcaaagtaagcatttttttttggatatttcaaacttaattttttaataatttcaagtgccttggaatatcgatgctgtttgacgtatattttggccaatgtttcggtgaaacagctatcatcttcatcttcttcatgatgcgtctcgctctcttcctcttcggagatagctttattttcatctgccggttgcaaacggatggatgtttcttcttcacttctttcgataaagccgtcaatcaattcatgaccgcgaagtttgggagtttcttccagttccggtgtatcgtcttcttgcagcaaataggtggtatagtccgttgcatagtccaggcttgtctgggctgaaacctcttcgggcacggtggccagaaaagcatcgatcagggaaagcgtacgatcgaggctgggctcttcctctaaaacttctgtttcgggaagtgcgttctttttccgaggtttcaaaatatatcgttcaccctcaatcagataaaacagcttccggcgatcagccacatgcaatatggctttacgaagctcggcaccgaaagagatatcgtgcaacaaatatagatttttaagatagagtaatcgcagtgactgaaaataaggatagcgtgtgacaagcgttcgcaactcgtacaaagtatctttattcagcgtttccggatgctgaatccattgttgtaagttagcagaaatcattctaattaccagtttgctaccgttgcgttaaatatttgatctgtaatctctttagtcatctccgcaatcagtccgtcctgaacggctgtcagcaactccctcgaatcataaacacggaaagccgagaactgttgctcgaagtcctgttcatgattcgtattgttcacaaaacgaacattcactgtgatggtcagcttggtttcagaagagtatccgtcggccgaaacagcctggttatactggttatatccggtaatctctccatcaatctcgaggtcggcattgttattcaccagtttcagacgggtctgacgaaggaaaatgtctttcaggtcctcgttgaacttagtgcctaacggtgcataaacatagtccgacttaataggaaagtcggcaatagagatagtctttaccttatcgtaattgatattaccaccattaaacttataagaaacagtacacgaaattcctactaccagtgtgaaaaccagcagtgaaattcgcattatctttttattccaatccatattcttttatttttcggtaaagggtacgctcggatatattaagatcctttgccgcgctttttcgtttgccatgatgcttttcaagggctttacgtatcatttctttctcgacttcgtccaacgaaagcgactcttccacatactcttcggtatcttgtatgtcatcgtcatcgggacaattgggcttgaccggatgaatgatggcaggcactgagggcgtaggggctactaccggagccggcgtataaaacgtaccgacattggaggttaccgctccgcgctcggacatgatttcgtgtacaagctttttcagttcggtcacatcttgtcgcatgtcaaaaaggacctgatataagatttcacgttcactttcgaagctcttccctgtctttacaccgaacagggcaggcaatcgctgcgtactctgagcaggcagataagattgcaagataggggcattaatctcacggttagtctcaattatagagatttgctccgtgatattcttcaactgacgcacattacccggccaggaataagacagcaaaacccgtttggcatcttcggtcagctgtatggcgggcatacgatacttctctgcaaagtcacttgcaaacttacggaacagtaacagcacatcttctccacgctcccgcaaaggagggatctggatgggcaccgtattgagacgatagtataaatcctcacggaaacgtccctctgcaatggcctgggtcaaattgacattggtagcagccacaatgcggacatccgttttctgtactttggaggagcctacttttataaactccccactctcgagtacacgaagcaaacgtgcctgcgtgggcaaaggcaattctccgacttcatccagaaaaatagttccgccgtcggcttcaccaaaatagccctttcgctcaccgatggctcccgtaaaagcccctttttcatgaccgaacagttccgaatcgatggttccttcaggaatagcaccacagttgacagcaatatactgtccatgctttcggcgactgtattggtgaatgatctgagggaaactttccttaccaacaccactctctccggttattagcacggacaaatcggtaggtgccacctgtatggcaacatctatcgcacgcgtcaaagcttcagtgttaccaataataccgaaccttagttttacctgttgtatttccgcttttgtcatattcgcactaaactcccttcctgattaaatatcatcatctactgtatcgagcttcagtttatcactgtcgtctcgtttctcgtaatactgtttacgtaacggattggcatgtgcttccttctcacgttgacggttacggaatacgtcgatcgctacataaatagcctgacggaatgaatcttcgcaagcaacgccttttcctgcaatatcataggctgtaccatgcgcgggagaagtgcgtatcaccggcaaacccgccgtgtagttcacaccttcatccatggccaatgccttgaaaggagccaatccctgatcgtgatacatggccagtactccgtcaaaatgggtgaaattgcccgatcccataaatccgtcagccggataagggccatagcacaagattcccttggcagccatttcctgaatagcaggagaaatgatttcctgttcttccgtaccgagcaatccgtcgtctccggcatgcggattcagtgccaacactgcgatgcgcggcgcaccaatcccgaaatcctgtttcaacgaccggttgaatatggcaagtttctcctgaatcagttccttggttattgaagaggctatctcacggaccggaatatgtcctgttaccaaagctacccgaaaatcctctttcatcaggatcatcagtgattttgaaccattccccagacgttgttcgatatattccgtatgtccgggaaaagcaaatccttcggactgaatcgtatgcttattgataggagccgtcactatgacatcgatcaagccttccctgaactcctctatcgccttctcaagtgctcccaaagctgctttaccggcttccggatcgggttttgagaactctactttcacctcgtcatccgtacagttgaccacgctcaggcgattgtgggcagcttctgcagcggtattgacaatactgaagttagtaggcaaatcgagcgacttgcggtgatatgcagccactttcggagagccgtaaatgaccggtgtacagagttccaacatgacggggtcggcaaacgtttttaaaatgacttcgtatcctaccccatttatgtctccctgagtgataccaatttttattttgttatcttccattttgttatttgttagttttctcctcctgctctatgcccatcggaatctgttcctgcgccttctcggtaggaagttgcaaagtatacagagatgcttccaatcggcgcatcaggtcacgtttcattttatcgggtgagtaaataaatacttctgtagtgataatacggtggctggctttatccagacgggtgtgcgaaacaaacgggccacccatgaaatcgccctttatgcgccacagtccgcgtgcttccattgtgtaatctccatgaatatcaatcggacgaacctctacggtagacgaatcagtcgccatgtacataccctctttggcacccggaatattagccttcatcactgaatcgcgcttatggataaagaactctttcgtaaaggtatccttatctgtatacgggtaagagtagattacaaagttctggtctccggtagcggcattagtacctgcccagaaaaagtcttctcctgtcttcgaactgctcagttcagccggaagccagatatcactgttgaacatactacctactttcgtcgaaatatagtcattatgatttttctccaggaaagagatctgacggttcatttcggcacgggtaaagaagtctataatcggctgtttgttctcttcgacaaacttctcaaacgatgcctcgtccggagcctggatagtcaaaatcatctggggagatgcatatacatccttggcatacttgaatttaggttgggtataaatgtcctgtatatctacgataataatgttgcgcaccaacttcaggatggcatcaaaatctttgggagaagtagacatgatcctgaacgaacgttccgattgcggaagtccgggcacatctgtatcgagcacattgtacaaagctctaccggcaggacgctcccacacaggcttctcaaccacaacgaggacttcataagcacgtccgctggaagttggagtaaacacacttttcttgccgcttttacaagaaaacaacactactgctacaagagccatactgaggtaaaacaggtactttttcatatgcatcaattttaatgttttcacaaatctacgaaatggtcgtatactttcatccaatgtgctgataatttatattaattcttgttactctcctcctgtttagccgtcgataacatcccgcaagcggcaaaaatatcttctccccgggaagcccgaatggtagtgaacagtccatgtgaggtcaggtagtcacgaaatgacgtcatagtctccataccggcaccctcgaggtctaccccgggaatggcatgaaaccggattaagttcacccggcagtcaagcccacgcagcaatttcaacagttccttagcataaatcagcgaatcattgacgcccttaaaaacaatgtattcaaacgaaagtctgcgctgtttactaaaatcatagttttttaacagatcgaccatttctttaatcgagaaagccctttcggccggcatcagctcagaacgttgtgaaggaaaaggagaatgcaggctgatagccagatgacattcgctttcttcaataaagcgttgaagtcctttccgcaatcctacagacgacaaagtaatacgcttggggctccatccgtatccatacgaagcggtcaggatatgcagtgcttttaatacttcatccaaattatcgagaggctcgcccatccccatcatcacgacattagtcaacttatcccgctctggcaatgctgcgatttgattcaagatctgattggctgtcagacttgcggtaaatccttgtttacccgtcatgcagaacttacagttcattttacagcctacctgagaagacacgcacaatgtcgcccgatcctcgtccggaatatacaccgcttcaacaaaatgattgtcactcacctgataaagatacttcaccgtaccatctacggaacgcatctcatcaacaggcgcggatatccccaaatcatactctcccttgagcaactctctatgcttcaacgacagattggtcatttcatcaatagaagtcacttttttatcgtataaccaggaagcgatctgtttggctgcaaaagcaggcatccccaaatctttggtgacagattgcaattcggtaagggtcattcctaaaagcggatatttgggcatatttactacaaatatttatttattcatgcaaatgtaaggaataaaagtcgattttaaaaaagagaagggacaaaagttaataggaagagggaaagagatagcaaaaagaaaggccgttccgtgcggaacagcctttcgtatattaaaacgacgttatctaaaaaaacaaatccgtttttagaagaacaggtatcgtttatcttttacatcgcctttcagataaagatcgttcataaaacgacttgccagacgggcatgcatgttttccaatgtagcctcttctgattgggcatcgaatgtttcgttcagcttatctttggcatatacctgcaacacaaatacaccgccattacccttgataggagcgctcagcttattgatatccgaaaccgaagcgtatgcgcctaccagcggctcactactacgcaaagcggctacataagcaggcgctgcaaatgttacgtgttttacagaatcacttactgcattggccatcgatgtgtactgggcaattgtagttgcattggcagccttcatgtcggccatgatcttctcagctttcttatcacgaatgatttcagctctcaactgatcctgaacctgggccaaaggacgataaccttcttcgatcacgctaaccagaccaacaaccaacatgcggtcgctttcgccacattcatataagccggaaacttcacccggttttgcagcaaaggcccatttcagtgcttctttagtccctctgataccaccgattccgtgttctgagctatacagatcatttctttcgagcaatttatagcctgattcttcagcattggccgcaaccttgtctactgtcgggttagctgcaataaactggctgaattcattataagctttattataagtttctttgctgaactcaaccgcacgcttgataacggcaactttatatttatctttcacagctttcttgtcagtcacctgcaaaatgatattgccttgtcccaatgctacgttagagagttcgtttactcccagattgttgatagtgctgataaatttcaagttatcgccatcaacctgtgcattttcgtagttagcagacgaaatccagttggattcacctgtttgtccgtacttcttagccagagctgtaaagtcggccccacccttaatagcagtatagatgctgtcagccaaagcctttgttttagcagcgtcttctgtgtaaacctgaatctgacggaactgtacagaatcggcagcagccactttagacaacaccttgaacgaattgatagtattgtcgcctgcattgtagtaagggccatatacttgtccaatcgaagctgaatccatgcgtgcaactacatctgacgggaaagctttcttggtatagtacaaatcaacatacggatattccgatccggtagaacggatgaaagtagtataatcaccattggcagtagccagttggtttgtataatcagtcacttcttgctggatagcagctctgtcttctgcactggctgtcacctgtacatcgatgtatttgatgttgcgtgtttcaacatattgtttgaactgttctttcttcttgttatagagatctttcagttcagactctttcactgtgatagtagagtctacaatagaagaataaggaacagcagccaacagaacatccgactggtttactcttgcgtcgaatgcatcctgtgcttcaaccggattagagaaaagagctttagtcaccagtgcctggtatttttccgccaaacggctctggatcagtgtcttttctacaaatgaccaaagtttgtgcattccttcatagtattccacatattgagacggcatcttggtcttgtccattttagagtagtcagccaagaatttcttcaacatatctttatcgaaagcgcccgtttgaggattgcggaacggagtctgctgcagcaacggattcacaccttcgttaatgattgattgaatttcagccttcgaaacagtaataccgagcttcttcgcttctttttcaatcagtttattgttcacatagctacgccatacttcgtctttcacctgattggtctgttcatcattcaatgaactcattccgcttgagaacttgataacctcggtatattcttctaccatgttctggtagtcctgagcagaaagagtttctccattgacttcgcctacatcatgcgattggtgtggctggagaactttccaggcatcgcccgcaatgaaagcaaacaaagccaaaccaataacgatcaccaacaggggtcctttggatctaatgttttgtaatgttgccattttgattaatacgatttatttgttattattattttcttcatctttggttttagcgcacgaagatacaaaaaatgctaatatgcatctatttattagctaaaaaattacagctatcgatcattattccattactttcagtcggacaagttcgattttcgttgctgtaaccttaattatcttaaactgatatttaccgacagagaccaattcgtgcaatttcggaaagctctggtattgattcaagattaatcctcctaccgtcagatagtcatcggattcgggaagctccaaattaaaagtttcgtttactttttctatttccaaacgggccgaaagcacgtattcatgctcaccgatctgcttacaaatataggaagtgttatcgtgttcgtcttcgatatcaccgaaaatttcttcaacaaggtcttcaaggctgacaatgcccgaagttcctccaaattcatccactaccacggcaatggtctttttctgctgcataaacagcttcatcagtttatgggccgccatcgtttcaggcacaatgggaacttctttcacatgatcgcgccaatctttcgggctacgaaacatttcggacgaatgaatgtatcccaccacattgtctatattaccatcatagacaattatttttgatataccggactcaacaaaccggcctttaagttcttcaagggatgtatccagcgcaactgctaccacttctgtccgtggaacgatgcagtcgcgtatcttgaccgccgagaagtcgagtgcattctgaaagattttcacttccgtgtccagagtttcctcactttcggcattgtctatactcgactggacaaaataatccagatctaccttaccaaaggctttcgcagaggcttccttgttcactttcatcccaaacaggcgaagaaagaggtaagagactcccgacgaaaatttagatataggatagagaacaacataacagatgaaaagaggaactgcacagacattcagggccagattgggattgatcttaaaaagcgtcttgggcagaaactctcctgtcaccaagatgatcagtgtggagatcacggtctgtaccaataccattacaaaatgattggtgatccatccggccagcaaattgtcgccgataatctgtgccatcaatataccatagataaccagagcgatgttattcccgaccagcatggtcgaaataaaatcattgggattccggaagaatagcgaaaggatacgcgatgatacccctcctttccggtccatttcaaaacgaagtttgtctaccgaaacaaaagcaatctccattcccgaaaagaaagcagaaaatgccatcgtaatcaacaggtaaataatgatgctcatagttagtttacagaatctgtttttgccttttcggcatcttcatcgatatatactataccggatatgttatgaacaaccggcttcataaactgatcgtctgactcaaagccatatccggtcataatctgatccggtttttccatccggacaaacttatcggtatacactttcttggtggcttcattccaatataacaactcggtggtcacatgatcgcccttcagactcttaatatctacatttccaataagtttccaaagccggtcacgatcataataataagccgtatccgcctttatactcgcatctatatgaaatagcgaatcgaactgttccagataaatgcccttctcaaaagcccaatacgagggtttcttcttatcaaagatcaaccattcttcagtgttgacccggtaacgtgtgacaccggaatcggatataagggtcgttaccccccgtgtatccataacaggcagtgaatcccgctcggtaatggcatcggccatcgccttatttctcccgccacaggaagaaaataaaagaagcataacaattgccccgaagacaattgttatgctcaaacttttatttaataaactgttactttgttgtcgcaacatagatttatctgatcgttgtagactctccaatccaaccaccgatagtgatgcggtcgccggctttgtagcccaacataaacaagtctttagcctgcggagtataagcggaatatctgctgatcattttgttaacttcttctgttacactcggatctacagatttagctttctgcaatttgtcgataacagcaaaataagtacacttgttcaaagccgattcatcactccagttaggactcatagcatacaagttggcgataaggatataaggagcaccatagttttcattgaagctgattgctttctgagcataagatcttgcctgagacaatttcttggcagtagtcaaaacactggcagcagcataagccttttctgctttctttgcattgtctgtctcaaggttgatcgcttcgtcaaagaacttcacagaaccatcgatatcccctttcttataggcctggtatgcacatccggtagcagcctcagccgaaggctcaatcttgtatacatagaatgaagcctgctgataagcgtcgctatccgtacacttcatcatcttcataatgctgatgactttcttcaaataattcaaatcagtctgattcgtttctaccttaggtccatagataccttgcagtgattcgcaatcggcagtaccgctgttaatgaacagagctaccagattatctttgatacctccgaaagctttcttcacactctctttatcagcagcagctatagcatcgtctgcatattcggatgcagccagatagtcctgaataaactgctctttgtgagccggatcttccttcagtttatcgtgagacatctgcaagaaatagaacaatgtagcagctgcagactcagctttcgcagcgtccaccgattttttcaaccaatcataagcttgatttacatccaccttcggagcaaatgcaatataatcgacagctttaatgcccagtgcttcatcttccgacgatacttttacaccttttcccaagaattcctgagtatacttcatacgcaaatcgtgcgtattcatcaactcatcaaaatactttttgtattctgcagagtttctgtctttgatctgccccagcaaccctttcagaattttataaccgtctgtgaaggtatagaaacgaagagtcgggcagttctccaaaacagctttccacggagtataagcatctttaaagttaccagctttcactgcttcgtgagaaatactactgttcgaattacaattagcgtcgtcctgtgctaccacagttgttgctcccgccgaaagaaacaacacagccacaagcgttttaattttcattgtatctaaattttagttgttatataataccgtctattctctctattatttaactttacgtttgaagaaccagccttcattgaacgtgattccaatgctcaaacgcaatgtattttcatctaccataccggctttcagaccatgtactttaatatattgagccgaaacgttgattagcgagcgtgaacccggaagaggtaatcccaaaccggccgttactccatactcacgagaggctctctcccctcctattttataataaggttccgaataatatcctccgacgcggtatttgatatgcgccagataactacgcgagaaacgactcggcatatactcggcacccactgaaattttcatcgcatcacaaaaagcattcggctgattcatataggtcacgtcgccccacttctgcaaattaaaatcagctcccacgatcagacgtttgtcatactcgtacgtaagtcccaccccaaagctattgggcattccaaaggtagccaccgtatcgaccgtattcgtagtgacggcctgcgtgctgttggagttcgtaagcgtcgatctttgtacataagcttcgttatgcaaatcttttttaggcgagaacactacacctaatgtaaccgcatgcttcctacccagctgctgtgtgtattgcgcgccgaagtccagcttataatcgcgcacggacaaatagtctacatgctgaaaagcgaaagcgttgtcattataaggaaaagtaatacgcgcctgacgcgtgatctccccccagaagtacgatacgttggcaccgactgaaaggtttttcagcacctttactcccagacctacgtaaagctgatgcaagcctccgtctccggcaaatgaagtgacgctccgcgcttcttccgacgcaacgtcgttgttcgccttggccatattatagcctacactcgagtagggcagcagaccgatactcatggccacgcgctggtgtagacgaaactgcatcgctatgtagtcaaaacttgaatttttcgcattcaacttggtgccttcactactaaagtttgtattttgcatcgaaaaccctccgtcaaaaagaaaggtcaacgaatcaatagccgtataagaagcaggattcaacggattgatatgtgatccatcgcgcaatccgtaagcgatccctcccattgctttactgtttgcaaatgactgatcagccaactgaccatagccatatcgtgtataaggagagtttgtattattttgagcgattgccactccgggtaataatatcgtgagcagaagcgcacaaagtgtctgtttatatcctaccattattatagtttaatattctatttaatcctttcaacactaaaaatctatctgcaaagatgacactttttaatttcgtatcaaaagaaaaatcatctccgcccgttaaaaaaaccaaaagttcaggatatttatgcttcatagccgtaatataccctgtaatttcgtattctatccctttctttacacctgcacgaatagcagtttcagtatcttttcccatatccggcatgcgtccttcggcatgaaccaacggcaaacgtccggtaaattgatggagtgctttcagccgcatccagagtccgggcgaaatattgcccccatgatactgtcccaaagaatcaacaaattcgtaagtgatgcaagtacccgcatcaatcaccaaaatgtctttacccgggaactgatcatgggccgccaccacggcagccatccggtcataaccgagagtttcgggggtttcatacaaatttattaccggaagcggcgtatggctgtctaaccataagacggggacaggaagcttgttcaactgagccagcacacactcgtttaagtctataaccgtagcaacaattgctttccgaacatcatacttattacaaacagcctccaaggaatccagagactgattagagtcgtaaacaacttctaccatagaagtccggtcgaaaagcgctactttggctactgtatttccaatatcgataattaagttcactttctctctgtttgagggcgcaaagataagagataaaatttattcaaataccgaaatagcgaataaaaaagcagcggcatagagagaaaaataaaaaaaacgtcccgacagccgattcggtaaaactactttcctctcccaaaatcttcgctggaaaagtgcggaaaagagagccggaaggcataaacaaagacaagcagaaaatccaaaaaccagcaacgagttttcattactgattaataagcatatagagacaaaaaaacagaatatcccccaatagcctacaatacaaaacaaaacagaatataacaagaagaatggacggaagctcaaaaaactgttgctgccgctgacgacagtctccccaaaacgcaccccgaggaaacgcgtcacgaacaaatcgaagtccggcgatcaacaggacgaagtccggctattcacaaaccgcagcccggcagccgaaggcctgcagcccgacgctcggggaagcacagccctgcgctcaggaacaaattgccccgcgattgacgaaaagagacaaataaattcattgaaccagccattttattcccacaaaagcagtatctttgccacatgaactcaaagttgcgacatttactcctgattgttttttcaatcttcccgattctgacatggggaacggaaaatctgtccaccgctgattccatccggatcagcctgttgacatgcgctccgggtgaagaaatctattcgctcttcgggcacacggctatccgttacgaagaaccggcacgaggcatcgaccgggtatacaattatggcttgttcagtttcaacacccccaacttcatcctgcgtttcgcactcggcaagaccgattatcaattgggggtggaagattaccgccgttttgccgccgaatacgaatacttcggacgtagtgtatggcagcagacgctcaatctgacagccgaagaacaacgacagctaatcacccttctggaaaaaaattaccgcccggaaaaccggatataccgctataactttttctacgacaactgcgctacccgtccacgggacaaggtggaagagagtctgcaaaaaagcggtagccaactgctcttcagcaatgcacacaccgaaaatggcgaaacgaaatcttatcgggatattgtccatcaatacacgaaaggacatccttgggcacaattcggaatcgatttctgcataggcagccaagccgaccaccccatcaacgatagacaaatgatgttcgctccgttttatctgatggatgcttttgccggagcacgcatagccaacacttcagacaacaaagcactggtggcttccaccaaaaaaattattgactgtgaaccggatgtatccgactccgcagaaaatgatatctggaatatgctaacccccatccgattgtcccttcttgtgtttatcgcaatcggaatggctaccgtctatggtctacgcaagaaaaagagtctttggggactggatatcgcagtgtttgcggcagcgggtatcgcaggatgcatcatcgctttccttgctcttttctccgaacaccccacggtaggctccaattacttgctgtttgtcttccatccggggcatctgctctgcctccctttctttataaacgatgaacgaaagcgacgcaaaagcaggtatcatctgctgaactgcatagttttaacactttttatagtgctttttccggtaataccacaaaatttcgacttagcagtattacctttggcactctgtttgctgatacgttctgcaagcaatcttattctgacatacaaaaaagctaaatgaaaggactattaacctccatactgaccgtacttacctttaccggactgcaagcccagccacttccatctaccccgaaattagtggtaggtctcaccatagaccagttacgtacggactatctcgaagctttttcaacactgtatggcgacaggggattcagaaggctctggaaagaaggacgtgtgttccggaatgccgaatatactttcagcggcacggaccgcgcatcagccatagccgctatttatacaggcaccactccttcgatcaacggcattatcggcaaacgatggatggatgtatcgacactgcgtactgtgagttgtgtcgacgaccccgctttcatgggcaattatacaaacgaaagctcttcgccttcccatctcctgacctctacgatagccgatgaactgaagatagccacccgtaacgagggattggtatatgccatcgctccattccgcgacgctgccattcttgcagcaggacatgccggaaatggcgcattctggctcaacaacacaaccggaaaatggtgtggaacgacctattatagcgagtttccatggtgggtaagccagtataacgaccggaatgccatcgacttccgcattgctgatatgacatggactcctgtccatccggtacaaagctacagtttccttcccgaatggagagatgctgcttttaaatacaaatttgacgacgatcgtgtcaataaatacaaacgactgattacaagcccttttatcaacgatgaaatcaatacgctgacagaagaactgctggataagagcacaatgggcaaagatcatatccccgacatgctggcactgacctactatgcaggcaactacgcccataagagcgtacaggaatgtgccatggagatgcaggatacatacgtacgactcgatcggagcatcgcctctttactggacatcattgacaagaaagtgggtctgcagaatgttgttttctttattacctccaccggatataccgataccgaatcacccgacctgggactctaccgggttccgaccggcgaatttcacctgaaccgctgcgcagctttgctgaacatgtatctgatggctacctacgggcagggacagtatgtggaagcgtactacgatcagcagatttatctgaatcacaaactgatcgaagaaaaacaactgaatctggcggatatacaggaaaaagccgccgaatttttgatccaattcagcggagtgaatgaagtatattccggcaaacgcctgttattggggtcctggacaccggacatctcgatgatacgcaacagtttccaccgtaaacgctcgggcgacctactgatcgatatattgccgggctggagcatcgtcaacgaaaatacatccgaccataaggtggtacggaaagcgcatattccgtctccccttatttttatgggcagcggcgtaaaaccagccgtaatcaacacgcccgtaaccattgaccacatagctcccaccgtagctcacatattgagaatacgatctcccaatgcctgttcggcaactccgattaccgacatccggtaatactttccgcacaaaaaacaaggtgcaaagcgcaaataaatcagcattttaatgtaactttgcgcaattaaatcaatttagtaaataataaacataaataatagataatgggatttaatgaatttttaagctcgattttcggaaacaaatccacacgagacatgaaagaaatccaaccctgggtagacaagatcaaagccgcttacccggaggttgctaagcttgacaatgacggcctccgtgcaaaaacagaggaacttaaagaatacatccgtaactcggcaagtaaagaacgcgccaaggccgatgaactcagagccggcatcgaaaatgtagagctggaagaccgcgaagaggtatttgctcagatcgacaaaatcgaaaaagaaatattggaaatatatgaaaaagcactcgatgaagtattaccggttgctttctctattgtaaaagaatcggccaagcgtttctctgaaaacgaagaaatagtggtgacggccactgactttgaccgcacattggcagcaaccaaggactttgtccgcatcgaaggtgacaaagccatctggcaaaaccattggaacgccggcggcaacgacacggtgtggaacatggttcactatgacgtacagttgttcggtggcgtggtactgcacaaaggtaaaattgccgaaatggcaacaggtgaaggtaaaaccttggtggctaccctccccgtattcctgaatgcactgaccggaaacggcgtacacgtagtaaccgtgaacgactacctggcaaaacgtgactccgaatggatgggaccgctttacatgttccacggactcagcgtagactgcatcgaccgtcatcagcctaattccgatgcacgccgccaggcctatctggcagatatcacattcggaacgaacaatgaattcggtttcgactacttgcgtgataacatggccatcagcccgaaggacctggtacagcgccagcacaattatgctatcgtcgacgaggtggactcagtattgatcgatgatgcccgtactccgttgattatctccggtccggtgcctaaaggcgaagaccaactttttgatcaactccgcccattggtagagcgactcgtggaagcacaaaaagtattagcaaccaaatacctctcagaagccaagaaacttatcaactcggacgataagaaagaggtggaagaaggattccttgcgctgttccgcagccacaaggcactgcctaaaaacaaggcgttgattaaattcctcagtgaacagggtatcaaagccggtatgctgaagacagaagagatctacatggaacaaaacaacaagcgcatgcacgaagcaacagatccattgtacttcgttattgatgaaaagctgaacagcgtagacctgacagacaaaggtgtcgatctgatcacaggcaactcggaagatccgactctattcgttttgccggacattgccgcccaactttccgaactggaaaatgaacatggattgagcgacgaacaaaagcttgaaaagaaagatgccttattgaccaattatgccatcaagtcagaacgcgtacacaccatcaaccagttgttgaaggcatataccatgtttgaaaaagacgatgaatatgtagtgatcgacggacaggtgaagattgttgacgagcagacaggacgtatcatggaaggccgccgttactcggacggactgcaccaggccatcgaagccaaagaaggtgtgaaagtggaagctgccacacagacatttgctaccatcacgctgcagaactacttccgcatgtaccacaaactctcgggtatgaccggtacggccgaaacagaagccggtgagttgtgggacatctacaaactggatgtagtagtgattccgaccaaccgcccgatagcccgtaaggatatgaacgaccgcgtttacaagacgaaacgtgaaaaatataaagccgtaatcgaagagattgaacagttggttcaagcaggacgcccggtattggtgggtactacttcggtagaaatttccgagatgctgagcaaaatgctgacaatgcgcaagatcgaacacaacgtactgaatgcgaaactccaccagaaggaagcagacattgttgccaaggccggtttgagcggtacagttactattgctaccaacatggcgggccgtggaacggacatcaagctgagccccgaagtaaaagcggcaggcggtctggcaatcatcggtaccgaacgtcacgagtcacgtcgtgtagaccgtcagttgcgtggccgtgcaggacgtcagggtgacccgggttcatctgtattcttcgtttcactggaagatgacctgatgcgtctcttctcttctgaccgcatcgccagcgtgatggataaactgggattccaggaaggtgaaatgatcgaacataaaatgatttcaaactctatcgaacgtgcacagaagaaagtagaagaaaacaacttcggtatccgtaaacgtctgttggaatatgacgatgtgatgaacaaacagcgtacggtggtttacaccaaacgccgccacgcccttatgggtgagcgtatcggaatggatatcgtcaatatgatctgggaccgttgcgcggccgcaatcgaaaacaatgcagactacgaagaatgtaaactggacttgctccaaacactcgcaatggaggcccctttcacagaagaggagttccgcaacgagaaaaaggacaagctggcagacaaaacattcgatgtggcaatggctaacttcaagcgcaagacagaacgtctggcacaaatagccaaccctgtcatcaaacaggtgtacgagaatcaagggcatatgtacgaaaacattctgattccgattacagacggaaaacgcatgtataacatctcttgcaacctgaaagcggcttacgaaagtgaatcgaaagaagtagtgaaatcatttgaaaaatcaattcttcttcatgtcattgacgaatcctggaaagaaaatttacgcgaactggatgaactgaaacactcggtgcagaacgcaagttatgaacagaaagacccgctgttgatctacaaactggaatctgtgactctgtttgacaacatggtaaacaagatcaataaccagacagtgtctatcctgatgcgcggccagattcccgtagccgagcctacagaggaacagcaagaagcagccagacgcgtagaagtacgtcaggcagctcctgagcaacgccaggacatgagcaaatatcgcgaacaaaaacaagacctgaatgatccgaatcagcaggccgctgcccagcaggatactcgcgaagccgtaaaacgcgaaccgatccgcgctgaaaagacagtgggtcgcaatgatccttgtccgtgcggaagtggaaagaagtacaaaaactgccacggacggaacagttaagtaacaaagaacttacaactccttaataaaagcctcgaacggttaaaaactgttcgaggcttttctatattcaaccaaaatcgtatttttgttcttttagaaaagtaaaaaaacaggctatgacaaaatatccgtatatactgttcgtattgctcctcgcgtctttcagttcctgccagactgttgagcaactttccatcgattatatgctccccgcagagatcagttttcctaacgaactgaaacgagtggcagtcgtaaacaatgtgagcgacactccggataacaccttaccacccaaggataatacaataaaaaataaaaatgaactcagccgtgcagtagcctatcacgagggacaacccgcactcactaccgaagcattggccaaagctattgccgaacagaactatttcaatgaagtcgtaatctgcgattcggccctgcgtgcacgtgatttcacaccccgtgaatcgactctcagccaagaggaagttcagaccttggcacagtttctggacgtggattgcatcatctcactggaaaacctgcagatgaaatcgacacgggttctcagttacatccccgaatggaacacttattacggcacattggatacgaaggtttacccaacgctgaaaatctatctgccgggacgaaaaagcccgatggtaaccatcaatacccatgacagtattttttgggaagaatatggaaataccgaagggtttgtccgctcacgcctgccggatgaaagacaaatgatacgcgaagcttctgaatttgccggttccgtgccggtaaacagaatattaccttattggaaaacggccaatcgatattatttcatcaatggctctgtagctatgcgcgatgctgccgtttatgtgaaagaaaacgaatgggaaaaagcatccaaactgtgggaacaggcttttaaagcagccaagaacgacaaaaagaaaatgcgtgcagccttcaacctggctctatattacgagatgaaagacagtgtggaagaagcacacaaatgggctgtcactgcacaggaactggcccgtaaaatagacaaaatcgacacgttgaagagaaacgatatagacttgagcgaaatccccaactactacctgaccagcctttatgtgaatgaattaaaggaaaggagcaacggattgggcaaattaaaaggccaaatgagtagatttaatgaggatttttaaagaaatcatgcaagggttcttattttttttatacctttgagctaaataaaaagagctaaaagatatgaaacttagtcagcaatcacaagccattatcgaatctgcgattcaaaaagcaatcaacaaatatacctgtggatgcgaacagaccatcgtcacagatatccatattcaaccgaatcagaattccggtgaactctttatctatgacgatgaagatgaagaactatccagtgtaaccatcgatgaatggacagcctacgaaggggacgacttttacgaagatgctgaaagaattttccgtaccgtgctttgccgcatgaaagagaacgggagcttcgataagttaaccatcctcaaaccctactcctttgtgttggtagatgaagacaaagagacgatctcagagcttctgcttgtagatgacgacacactgttggtgaacgatgaactattgaagggactggacaaagaattggacgacttcctgaaagacctgttggagaaataatcctctttttttcattatatagtaaaagaggccatccgaatgattcggatagcctctttttgatatacagtttgtataatcaaaatctcgtcactttgtcggagtgagctttcagatactcaaaacgattgatcagttcacccaactttttaggatacttctcggccagattcttttgttgaccgatgtctgacttcaaattatacaacttataaccgtaacccaaaccgatgaagtcaccgtcttccttgctataaggattgtaatatggaggaatcagcgcccaatctccctgacgataggcataattgaacattccctcaataaccaactctttacgcccttttttactcttgcccagaaaagcatcgagtgtgttttcgctatctaccttgtccggataagtctgtcccaaaagagaagcaaacgaggccaataggtccatctgacagacaaatacatctgacacctgaggcttcacctttgcaggccaacgaagcatgaacggtatacgggtaccaccgtcgaacatacttgttttaccccctctcaacggaccggctattttgtgatcacccaccaactctaccgcatcatcttgataaccatcatcgagcaccggaccattgtcactcgtcaggatcacaatggtattctccgccaatcccaacttatccaactctttcaggaactgatcaacacaccagtctgcctccagaatcacatcaccacggggtcccatgcctgactttcctacaaaacgttcgttgggaacacgaggtacatgcggttggtgaagtccgtaataaaggaagaaaggcttgtctttattgtcatctacaaactgcctggccttgtccaggaataatcctgccatttcttcatctttccattgtgcagccttcccgcctttctggaaaccaatgcggggaactccattcacaatagagcctgcatgtcccacactgggatgcatgcgcaacaattcggggttctctttaccggtaggttcgccggggaagtttttccggtaatccacataaagagggtcattcggatccaatccgacaactcttccattttccagaaagacgcaaggaacgcgatcattggttgctgcctgaataaacgaatagtcgtaaccgatctcagcggctccgggatgcacctccttattccagtccacatgcccatctcctaggccgatgtgccatttaccgacagaaccggtagtatatcccgcctgcttcataagtttaggcaacgttattttttgagtatcgataatcaatgcggcgttacccggtaagattttagcatccacattgctccagggatatttcccggtcatcaccgaataacggctgggggtagatgtggccgcagtacaaaatccctgcgtaaaccgaataccttcgttggctatacgatccatacccggagtttgaatccggtgtgcgccataacaacttaaatctccgtatcccaagtcatcggcgacaatcaggatgatgttgggttgtttctctgtttgttcctgggcaggctgaggtacggccaaggcacttaccggcaaagacacccctgccactaatcccaatgtgcagttcagcaatttcattcgttcgtttgtcatatcaattttgttcatgagtaatttccaataaggtctgtcagatccggatacaaagatagccaacaatcttattcagatacgaaaatagtgagattaaatcgaaatgatatcccttaaaaaacgagagtgtgcctcacgagacacaccctcttcaatacctcagcggctattttgtttagggcttcaggtttttcatccggacatgtcttaatatattctggagttcaaaaaccagatccggatggagagaagctacattcttctgttctgccacatcgtctaccacgtgatataactgcggtgtactcagatttccggtttctatcttcggtccccaggtaatcatggccggtccgtcattgggctcaatgtacttccagtccttggtgcggactgataatgtatgattggaagcctgctctatcacccaggatcggtcggactggtttttgcccaaccaagtatcgaggtagttaaagctatcgggtgccgctcccttcggcagcccggctcctaccaatgaagccaaagaggcaaaccagtcgatctgcgagaccaaagcgttggaaacctgtgatgaagcagctcccttcggccatcttacaatggcaggaatacgagttcctccttcaaaagcactgtacttattaccacgcaacggtcctgcgggactatgaccgttcagcaattcttccgcacgatcctgatagccgtcatcgacaaccggaccattgtcactggacagaataattagcgtattttctgacagtcccagtttatcaagggtttccatgatctggcctacactccagtcgaactgcacgatggcatctccacgcaatcccatcgggttctttccacgaaaacggtcgtgcgggaaacggggaacatgtacatcgtttgtagcaaaatacataaagaaaggttcgtctttatgctcacggataaagccgatggcatgtgaagtgattgaatcggcaatattttcatctttccacaaagccttgccgccccctttcatatatccgatacggccgataccattgacgatggccatgtcgtgtccatggctcgatttcagattgaacagcaattccgggtgatcttttcccaacggttccccctcgatcggcttacgatagctgacttcaatcggagcagaagggtcataattggccactttaccattttctataaagacacacggaacacgatcggctgttgcagccattatataagaataatcaaaacctatatctcctaaagcagtcggcagaggagcattccaatcctgttctccatccttatcgcccaaccccaaatgccatttgccgatggccgccgtagcgtaaccggcattcttaaacatatcagccatcgtatagcgttcgggacggataatcatccctgcattgcctgctgcaatatcagtgcccggacgacgccaggcatattctccggtaagcatagagtaacgcgaaggagtactggtagcagccgtagcatgcgcgttgttaaagcgaataccttcagctgccaaacggtttacattcggagtctgcacattctttgcaccataacactccaagtcgccataaccgaggtcgtcggcatagataaacacgacattaggaagttgccgatcattgattttttgcttggcttttcctcccttctgaccggtagcagccatcaggcatgctaccggagagagacaagccaataatacatattgtctcattttttaaactattaaattagtcacgtaaattcgggttaatattttgctcggactgagggatcggccatgtataatccgtcggattacggaaagcacgtttgcccacataccagcggtagtttcctgtcgggtcaacctctttggtcgtagtcgcatactgagtcgaacccgggtaaggcgcaccccaaattttctgggacaatacttcgtgtgcaatcccccatctcatgatatcccagtaacggataccttccatagccaactcgatgcggcgttcgtgacgcaggatttcacgaagcttcgcaggagttacctcggttaccggaggcatgttcacacttgcacgtcctctcactgcattgatagtctcgtccaatattccttgagtgatcgtttgattatcttcaaccaggcattccagatagcccaacaacacttcggcataacgaataaccggagtcagtccgtttgcgctctgtacatcgtttataggtgtcgattcttcaaaatatttcctcatcataaagccagttctggaagcctcgctcgtataatcgagcttctccttcttggctgcactgtagtcaggactcatcttatactctgtacccataaagatggcaccgttatagtaaattgtataatccagacgcggatcgcgatcctttcctaaattagacgggtcatatctcggatcatcatagctgaaaggagttccatccttaaattcatacgattcgtataaatcagcagccggattgaccaggctccatcccccgtctttagcagaaagtgcatgctgcggcagaccggtacccagatagttttccaaatactggatgtagaaaatattctccttgttcgaagttccggtagaaggataaaacagctcctgatagttggcgtttatcgcattatctcccaattccataatatcgtggaaagcctttgctccacttttccagtctttctgcaacatgcaggtacgtccgagaaaagcaagagccgcctgcttacaagcacgtccggcttctcccgccggaatggcggagaaacggggtaaatcgaccgcagctgctgtaaattcggttacacaccatttcaggatatcggcctgtgaggtctttgtcacattgttggcttcttcacccgtcagcacattctctaccaaaggaacatttttgaaatagctggcaaggtaaaaatactgtgtcgcacgcaggaaacgggcttccgcaatcatccgtgttttcttttccgattccgagctattctggataccgaccaagaaacggttacaataaccgatccgcttataagacgtctcccaataccttttaataaaagcattgtctgcagtcaggtttccactcgaaatcttaaagaaaggattgttctctccccgacggtcaaaagcgttatccgaaagatgctccatcataatcattccgtgataggaccaccaatccgaagggttatactctacgccgtctgtcaggcttcctctatacagagaagtcaatgccaattccgcattcgattcgctattccaaaaagtctcttcggacaagtctgtcagtggatagcgctctaaatcacaagcttgaaacagtcctgccgccaatgccaatgctactatatattttaaactcttcatcttacatcaaaattttaaggttaaaccaaatgtataagttgacagaataggataataactaccgtctgtattaatttccggatcccagcctttacgatatccgctgatggagaatggattatcaagtgatatataaaaacgaaggttggaagaaccgaacttctgagttatacgtttgggcaatgtatatcctaactggatatttctcactttgagataagaggcatccaaaatccagaagtcagagcccagcgtattgttgctacctgcattcgacatcacttcgagacgaggatatttaggatatcggttcgactgattattcgtccaggtttcttctgcctgccatttctgaatattgccttcctggaagaaagcataaccggcataattggtcaactggccttttaccttggccactccctgaagcaatatattgaaatcaaatcccttatactccgcacccagtcctaagccaaacgtatactgaggtatctttgatcctaaataagttttatcggattcgtccacctttccgtcaccggagatgtccacatagcgtaaatcaccggctttggagttaggagcaatcttgctctgatcgtgccattcttttacttcgtcatcggtcaggaatacgccatccgtcttatagccataaaacatattcatcggataacccaggaacaggtcgctaccgttacctatcattccgcttttctgttccacatctcctacacccaggctgatcaccttgtttttaattatcgagaagtttccattcacatgataactaaactcaccaatcttgttctgatgaccgatctcaaactcccatcctttgttctcaaggcttcctgtattgacctgcgaaagtcccagaccaaagatagaagagtaacttgcactcggtttatagagaatatctgtcgttttacgatagaagtaagcagcgttgaatgtcaatttattgttccagaaagctgtttcaataccgacatcggtggtacgggtcttttcccatttcagtgtaggatcgacataagtggtcactgcggctccttgtgtatacacacctccgaatacatagttcatcgcctttccaagtgcgtaagtggactgataaggatagttaccgatattattattacccaggataccgtatgatgctttcagtttcaagttatcaataaaactcagtgactctgcttctttgaagaactgctcttccgacagacgccatcctacagcaacagatgggaagaaaccgaatttattatctgtcgggaaacgggaagaaccatcataacgcatagtagtttcaaacaggtagcgttggtcatagttataggtcaaacgtccgaagacagacataatagcccaatcgtaacctccgccagagttagtctggccatcggctcctcctgcattcaaataaggaacttcatccgaaggaaagttcaagcggcttccccctacagttctctgtgattcgtcttcccaagtataaccgaccaacacagacaaatcatttttgctgaacttcacgttatagtcggccaatgcctggaatgtcttatagaccgttttgtacatggtatccgatagagaagaaggtcccagcttcttgccgcccgtaatctccattgccgaacgatagtgacgaatctgctgaccggtatagttatatcctccgatagctttcagcgttaagcctttcacaggtgtgaatgccaactcgacattagaacggaacttatcgaagttttcatcataaaaagagccgctgtccagccatgccaatggtgttccgagtaccttcggtcctaagccgtaagatccgtcttccaatttagttgcccataatccgggaaaacgaagtgcattacttgagaaagctttaaatccggcagagtccattccacccggagtagaaggttcgctccgtttagaaacgactccacccaaacgggtagtcagtgtcaggtttttagccaactctgtagtcagattcactctgccgttgtaacggtcgtagtgattgtgttccatcagaccattctgttttacatagccgaaagaaaccatatactgtgtcttatcatttcctccgttcacggtcagttcatgaccggtttgcagtcctttgttgcccagaagtttatccagataatgttcattaggataattatacggatctgatccatccttatacttctgaatctcctccgccgaataaacttccttacccatagccttattatataattccgcatattcccaggaatcgcacatttccggtagttcggtagcttgattgaagcctacatatccgttataacttacggtaactttacctttctggccaccttttgtttttaccagtacaaccccattcgcagcacgcgaaccataaatggcggccgacgaggcatctttcaatatagagatactttcaatatctgccgggttcaaatcattcagactgccgggaagtccatcgaccagtaccaaaggatcgggagtcgctccgaaagagcctacaccacgtacccgaatcgtaccctggtcttgtcccggattaccgctcgactgtgtgatcgtcactccggagagttgtccggtcagcatattcgaaacactgggtgcagttctggattcaagttttttgctatccacagcagcaattgaaccaatcacattcaccttcttctgtgaaccgtaacctaccacaacaacttcttccaaagcctgggcatcttctttcattgtcacattcaatggttttcctgcaatgaccttcagttcctgaggctggtatccgatgtaggaaatctcgatcactgccttatctgaactgaccgatagagagaaatcaccctgcaaattggtaaccgtaccattggtggtccctttctcaacgatactggcaccaatcaccggttctccgttgacatcgactacttttcccgagattttcaccgcttgttgttgcttcgatgtcatttcagtagacaaaataatctttttgtccaaaacggagtatttcacgtcagtcccttcaaagattttatccagtactttaaatatattacttttatcaaccgaaacagaaacaactcttttcagattgacatgtttgttattaaagaaaaagccaaagcccgattgcttttctatttctttcagaactttctctacagtttgattctgtgcatcaatactgatttccaccttttgtgcgaagctgtctgtcgcatgcacaaaactcatagagcaaattaggaataggatgaatagtcgcatagttcttggaatttttttcgaggtcagccaaagcgaagactttaccacccgtaacaattggatgctaaaataattttgcataattttgtattgacttaaagttaaaaaatagtttatctcagcttgtcgccaaacaagctcacaaggtttactcttttacgtatggattagatacgccaatatctttccatacgtttttggcattttaaggaggtttgtctttcataagcatttcattttaaaggttaatcaataaacttctattatacttcgttcatcccgaatatcaggactttccaaatatctccactgtatcttggacgagattttaaaatactccagaatacgttccaaccgctgttcagtaaatgtgcctgtaaaggcattagtcttcaaacgggcattctttagtttaaatgttacattaaagcgcttctcgagcatcctcagtgctacatccaacggagtgttattaaatataatcttaccatctttccaggcggtttcggacaggcaggatgttgcgtacaactgtacatcaccattggtcgaactgtagaccaacctttgtccgggtttcataaccactttcttggccagatagtctttatcactaaaatgaaagcagacctgcccttccaccaatgttgtcgaaacatccggctcgtcttcataagcctccacattgaagtgtgtacccagcacttctatctgcgatgaatgcggggcggaaactacaaacttctttttcaaatcctttgctaccgcaaaataagcttctccctttaattcgacatttcgtatatcgccctcaaaaacagaaggataacgcaaagaagactccgaattgagatagacaaccgtactatcgggcaataccaccgaggttgtcatccccggattggtttttatttccatcatctggcacacagcagatttcccattgtgcatatattgcaccagaaaagcaacggacaacgggataaataagatagcagcgacacgctgcatccactcccaccaagttgttttcctgacgatcattctgctactgacctttttcagagctttttccgtatccaccttacgcattacgttgaccgtatctacagctatataaagagtattgatttgatccactatctttcggttatcttccgattcttccatccagctttccacctgccggcattcttcttccgtagccagtccttcacaatatcgaggcagtaaatggtctatatcttcgtagttcatatttgtaattcaacccttttattaataagacaggtggaaaaataagattcctaaacttaaatccattttttttatagaaatctttgttttaataagaaaagactatctttgtatataaattaaatttctaaatctatgaagccgaatcggacaaaagaagacattttactgctttcccaacttcagcaaggagataaaaaagccttcaatactttgttcagaaggtattatccgatattatgcgcttatgcccaccgttttgtagacttggaagatgcggaagaaatagttcaggatgtaatgttgtggttatgggagaatcgagaaatcttattgatagaatcatcccttagtcaatacctgttgaaaatgatatatcaccgttcattaaaccgcatcgcacaaaaggaggtaaagtatcgtgccgatacattattttatgagaaaagccaggcaatgatttatgacgtggatttctatcagattgaggagttgaccaaacggattcacaccgcgatagcggagttaccggaatcttaccgggaagcgtttatcatgcaccggttcagagatatgagctacaaagaaatcgcacaaactcttaacacctctaccaaaacagtagattaccgcatacaacaggcactaaaattattacgtaaagaactcaaagagttcctgtcgttcgccttgatatttctggcagcgtaatatgcagggaagtatgtggagaataaatataagcagtggggagggaccaaaaaagagaagatacattaaaaaacgtcttcaccacagaataacatagagtgccacagagtgagcttaatctattgataactaataatatctatctgtgtaatctgcggtgaagacgacttttgatgtatcccctctataatatataccggacttactctatcgtaatgtcgaactgatcataagaatctgttctccacgatttatcacaagtaagaggagaaagtgcaaagagaggagagaatgttttgattttaatcgtttttccatcaggcatgaattccataatcctcaaccatccgtctccaccgttaccgaaccattgcttatcggcagtctgcgcattaaacatcatctgaggaacattcttgcctgaagcatttttatcaatccggaaactgacattatccttataatcggcaatctcacattcgtgaccgcaaatcaccatacaaatattctttgccggatagaccaacttatcccaaatagcttttccataattggcaggagtcactttgtagttctcgctttcaatgacttttcctgtccatgccagatatgaatgtgtcagcaatatcactttatggtctttatagcggggagcatcgaccactttcttagcccacgccaaagcctcatcacgtggagcaaattccagagaaacaaccagaattttgccccaggtatcggttataaattcataggcagcattttccagtgtcggtataccctgataattgttgcctacggcaaccaggctcttgcgccaacaggagtttctctccgcaggaaagtaatcagggaaatgacacaaacgattttccgctttctgatatccataatcatgattaccggtacaaatcacataaggcaattttccatccagtcgctcaaacgcacgcgaagcagcacgccattgctcctcacttgtctggttgccgttcaccccatccggaatgcgaatttcattttgctccaccaaatcaccggtacaaagcacaccttttatattcagagattcaatgctattggctacccatgctgtctgtaactcaaaaagtggctgattggcatcgaactttgtataactctgcggatcgggtaaaagaatcattgaaaaagacttttcatcggtcaactttgcgcggaccggatagacttgcgcagaaacaaacagcgtctgcacacaaagaatgaaagctaataagtagtttttcctgttcataagtattacatttaaatatctcaaataaaaattaagtagcaaagatataaatacttgccggcaatagcccctgtattctccgaattatttcagggaaaaagtagccattacggctttatggtctgtcggccatacgcctagcggagttataaacgaatctttaccactctcctccacacgttcactacggacgatcgattttgaaggacctaccaccgatacatcttttaatttcaatttcctgtccggcatgaaataaataaagtcgatacgatcccgttcgtcagcatcgggtgcccacgacagtttctgcaccggcactccttcattatcagacgggaatgtaaagcccggatgtgtaaccggattagggtatttcgtccggtaagcatctttaaatccggcattttcaagtaatacggagcaatcccaccgaactaccgtcccattatgatcccacaaattctttgtattttctttccaatccagatgtgaaggttcgttgaaatcacctcccagcaaaatgatatttcctttttcctttcgggcatcttctatgacatggcaaatagcttcatcacgcatagattcattattagccttttcaatggctaccgcatccagcaccggagcatccagttttttccaggtaaccccgctatagcctctcggcaaataacaagcataatgcgtataatccagatgggcagaataaacaaccacatctcttccgttaatacgaatacgggctttcagcaccgaaccggcatcatcttccaaagggcaattaggggcttgttcttcaatcttatattttgataaaatacctacatccaacttactgttttcaccataatacttctttccacgctcttccaaagcctgcaatatacgcgaaatgaattgtttcccatgataatttctcacctcactgaacaacacaatatccggttccaggcgggccacttcatccgctatggcttcaaagccccctttcaccatggtgccctcctgccagatattcatttggagcactttgagttcgctccctttgccataggccattacggcaaacagccataaagttatatttaataaactatatcttaacatatcaatatattctaatccaacagaggtgagaacagggagtgtttctctccattctgcactcacctctcctatttttattttattgcaaaatccacatcagtttatttacatcgtccactcctccgaactgacgttcaagagcctcgttctgatgttccaggttataatcggactctgatttgggatacatccagcgcatcggcaacctgtcattcatcgtattacggttggttgcaggattaatcggcaacaccggataacctgtacgtcgataatcataataaacatcatacggatgctgcatgaacgaagccagataacgttgcgtcaatatcttctcaatatccgcttctttctcaccactcaattggatagcgggtgtttcaaggaaagctgcaatcgcttcctctgtaatcggatgtccatgatgatatacctcttcatccggagtattggaagctataaactccatatgggctctgatcgcctttttatagtaagcagacgcatctcccgaaatccatccccgcacggctgcttcggccagaataaaattctgctcggcatatcctaatcgaacgaccggttctccggaaggataatcggtataacgtgcattaaatccggagtattgttcagttgcataagctttttctatctgctcgaaaggcagtgaagggtctgtaccgatataagcatcccaactgtcggctgtcaccccttcattaagtttggcctttgccggctttgcataatagaacatgcgaatatctcctgtcgccttgaatttatcaatcagcatggtagacagcatggcataacccgcatgcttggtattcgtgttatggaaaggatacactgtattcgctttatccgcatatttcatctgcagattatcttcattcgattccatcaggctgcccgatgctacgatccgtgcaaaacgttccttcaccttcaggtcggcatcgctctctttcttcgagaggtgcatcagcactttcagttgaaaagccgtagtcgctttcttccacttgctgatacttcctcccaggatcggatcgccatcaaaatctttagctgtcgaaaacagttcataagctgtttccagatcgctcagaataaagttcatcacttccttctgggtattgtacttaggacgtaccaatcctaattcgccttgcaaagcttcttcataaggaagatctcccatctccatcgacatataaaatatcttataggccttgatgaaatgtgccagtccgtcgtatgcatttacgttatcgtccgaaacggattcgaccatcttctgggcattgatcagggtagtatacccgccaaaaccggaacgcccgaagacattatactggtaatcttccatactttcaccccatgccatctgcttggcaagcaattcgtcgtatataaaggatttactggcactggaagaggtaatgtccagcagtaatccggttgccagcaatgaagaggtcaccttagtggttgcgtcgggatctgtattgatttcatcgaacttatcacaagacgccaacaaagcggttgccagcaacagcgatatgtatttattaattcgtttcatattattctatcttttaaaaatccaattttacattaaaacctaaataacgggtggaaggagagctcaggttatccgagtcactgtcgggatcggtaaaacggaactctttggtccagacaaacaggttttgtccgacaaaggccagtgtcagccctttcatatgaagcttgtcacaaaccgatttaggcatttgatagctcagtgagaggtcacgcaatttaaagaaagtttcatcaaatacattctgacgggtgacggtgcctatatacggattggtactcttcatatacgattcgtaggatacctgtacatcattcggagcaaacacacggttgtcatggatgatttttccattcgagtcataatctacacttcccgaaactacttttactccactgcccacaaagttggtcttcttgttcactacctcgtcataccgccactggttgtccgaatcgatatgtgctcccgaattccacatggcctgattggtcttcgaatgtgccatacctcccactcgcccgtcaagtgtaaaagaaagagtaaagttcttataagttaccgtattggtccagccccatatccaatcgggatattcatagccgataaccgactggtagtcgctctgtttgggataaccattataattaactaaatttccctgtgaatcacgctcccaatcgtaaataccgtaccagtcccaacgtttcccgacggctacccaaggtttttgtgtagaatacaccgggtctattttggtataataccaacggtcacgcgaccagttgaaggacgactcccatttcaggtctctcgtcctgataatatcgcccgataaagtcaactctactccccgtcccacatattcttcatcgatattgatcaatgtagacgtaaatccggaagagttactgatacctgcactgcgggtcaagttgtaatagagtttattataatatgtaaaatccagtttcaggcgattcttaaacatgtgaattgccgtaccgatttcataagaacgcgtggccgagggtttcaccgctacaccacggatagatgtcggataatatgcggcactctcaccgttccataaatcggtagaaacactgtaagtattgttggtatcgtatactcccaagtcactcttggtctgcgtccatgcccctctcactttccagaagtcaatcacttcgggcattggaatgaactgtgaaagaaccacactgccggctacagaaggatagaaataagaacgtgtctccgacggcaatgaagaagaccagtcattacgtcctgtcacatccagaaacagtgtacttttccaggaaacagaggcttttgcatatacactggtcaccagttttttggtaataccgctggttgtcttcaccggatcaatcgatgacttcaatgaataataccccggaattttcaacccattctgcgtttcgcccaggatattgtcactcttccaataataaacgtttccaccaataaaaccatcgacattaaaatcaccgaatttgtgatcggcagacaagatcaggtcattgtttaagctgtatcctcctaaacgttgcagcccgtaataaccttgtttatgccagccacctacggcactgacggcattccgccactctttcttctgcgagtatgaatccagacccgaacgcagcgacaggttcaaccagggagtaaaatcatagttggcagaaagatatccgttaatcaaatcgtaatcactcgaacggacaatttcatttgctatgaaataagggttgtcataccacttggtatccatccagttctgctgttcgtcctgcttgatccagtagttcttatagtcgcgtatatcatattcggcacccgaccacaccaacaggttataaaggaatccgctaccaccgtatccggctcccatgtcattgggataaaagcgcttattataagtcaatcctccgtcaaaagagaatttcttccacttcatatcacccgacaccgaataagtgatcttattcagtttctggttcggatactgtcctttattatacacatgggtcaatgaagtgcgtacacttccatatttacctttctgagagacacttacgttgttgtttgtcaccatactcaactcctggaagttcttcagattgtttttgcctttcgataccaaaggcatgtctacccattcgtgcgtatacggatcatactgcaatgccgtacgcccgatgtccagcttatctccccatacatatcctccggtagaataggtaccctgtgatccggaactgtatgacgtttgcacttccggctttctcagatatccggccgcaaacatcgtactgctattcacagtcacattcagtccctcttcttttccttttttggtagtaatcatcaccgcaccggctcctccacgtgcaccatatagggccgaagccgtagctcctttcaagacatcgaccgactcgatatcatcagcagctatatcatttaatcctacgttaccataaggcactccgtcgataaccagcaaaggagcagatgcacgcaacgaaagtgaaggtgaagtattgaactccgtactgttttttacattcaatccggcaatcttaccggtcagcgatgtagctacatttacggtcttgacagcagccagtttgtcaccgtctaccttttgcacggcatagcccagagctttttcctcgcgcttgatacccaaggccgtcaccacaacttcgtcgagttgtttcgtattttcggccaactgaacagtaagtgaggtattattacctaccggaacttctttagtgatatatccgatatatgaaatgataatcgtactcttagttcctacagaaaggctgaaattaccgttgatgtcggtaatcgttccgtttccggtttctttctccttaatattggctccgataacgggcgacccggtttcatcagtcaccagcccctttatctttttagtggtctgctgttgtgcagcggttgtttccaaaatctgttttggagacaggattatgctgttctccaatatcttatacccgatattcgttccggcaaacaattggttcagaacctgactgatctctttctggttacttttgattgtcacattccgggagatatccacttgcttgttgttatagaagaagtgaaactccgactgcttttctatttcatccagcactttctgaagactactgttgttgacatttaaagtcacacgtactgactggctataacctttagccgcaaatgccatgctggcaaagacaaacaacattattgctgatagtttcatacacaaaggtatttttttcaagagcgaaaatgtattctgcctcccgaaaaattggaagtttaagtaaattgtcatagatttgtagtgattttgatttaaaaaattctatttgccgcacagtttgtcgccaaacaaactgacggtggactttcatacaggtagatacgccaatatcttcctgtatgtttttttgttttagggagagcgtgctgtcatagtagtaataaaaatgattttaaagtttcatactcaaacggttaatataattctatctttgttttttcctgtattgccttgtgtgtggcatcatactccagatcaaggtatttatactgtattccggatgcatatctgaagtgttcaaggatcaacggcaaatactgcctgctgaacacaccggtgaaagaattggcatatagtgtggaatctttcacgataaactctacattaaacctcttgctgagtatcttcagcgtttcggccaatgatgtgtttttaagcactacctgaccgttcttccaggctgtatagatctccacatacgatttttcggcccgtgcctcgtgtgtcgccgtattatatacaaattcttcatcgggcttcatgacgaatgtttcttttgtatcgcctttccccaaaaatgacaacctgaccgatcccgataccaacgttgtcctgactacactatccgtccggtatgcttccatattgaactccgtacccaatacttcggtctgtatattgaaaggagtattgaccacaaaccgtttactcctgtctttacggacagagaagtaagcctccccgtcaagttccaccgtacgcgtatcccctgtaaacttaacaggatgtttcagtgaagatccggagttaagccagactttggtaccgtccggtaaatttgcctcagccaccataccgggattggtccgtatctccacatattcttgcggcggatttttcagaattaaataaagggtggtggcaagcagcggtaacgccatacaagcagcaatacgctgcccccaaaccatccaggagattctatgtcgatgtttgtgtattctgcccttcacctgctgtaaggctgcggaagcatccacccgattcatatagtccagtgtgtctgccgcgcggtagagccggaaaatatctcgtgccatcttctcgttatcttccgaagccgctatccattcctccacctctttccggcgatcggctgggagctcccccgcaaaataatttaaaagaaccgactcattaatgtaacaggattcatccataattcgtgcttttatagataagacgaaccaaaatagaaatctcctaaccaaaaaacgtattttttttgaaaataatattatttttgcccaaaacgaaggtctacatgtataacgacacctcgcgcacagtaagcgatgaaactctgttcttccaggttcagcagggaaacgaaggcgcattcgaagcattgtttctcaggcattacccggctctttgtgcctatgcccggctctttgtcgaaccggatgacggccaggagatcgtatcggacgtcatggtctggctttgggaaaataaagaaatgcaggcattcgagagttccttaaaaagttatttgttcaaggctgttaaaaaccgctgcctgactctcatcaaccggaacgaagtgaaacaacggatcgaaaaaatgatattcgataatctccaatcgcagtatgatgatcccgacttctacgttatacaggagttaaccgaaaaaatagaagaagctctggcacgacttcccgagaatgtacgcgaagcattcgaactcaaccgctttcagaatctgacatacaatgaaatagccgaacgactgggagtgtctcccaaaacaatcgattaccggattcaacaggccttaaaacagttgcgcatcgacctgaaggagtatctccccttattacttcctttcctcctgcattgaaaggacgaaacagttcttagtttcgttgcagatctccttatctttacgtacatttggcagtagcatacgatatctgacacccgggtgtcggatagtctgacatgggggtgtcacacactgcgacacccccatgtcagcactcctaaagtctatgcttcccgtacagagagtacagagaaaacgataactaaccttaaagataaaagtatatgcctataaactatgtagtcaggaagaaaaaagatcagagcggtaatgaagttaaagagctctactatgccgtgcccagtgccattcagaacaaaggagtcagtgaaaaacaattagcggaggacctgcacgacaacagttcactctcggcaggcgacgtactgtctgtactcgaacaactcccgaaagccatcgcacgacatatgaaagaaggaagaaccgtcactatccgcggattgggaactttctacccggccttaagcagcgagggctgcgaaactcccgaagaatgtacgcccaacaaagtcagattgacacgcatttgcttccgggccgatactgcgttcacctacgacgtgaaacattgcgaattcgaaagcatgcaactgcgatttacaaagaggccgaagcccggtaaggaagagtgaaccaaaagacagaaccttttccggactcggactgaaccccgatctcgccccccaacttctcaataatcattttacagatagacagtcccaatccggtgccttgtataaaagtgttgtatttgacaaagcgctcaaaaacatgttcgcattgctcgacggacataccacaaccggtatcggatacatagaagtataacgtatgggcatcttgcagccgatacccgatctgaatctctccctgcgaagtgaactttatggcattgacaaccaaattggtaagaacctgtatcaagcggttcttatcagtatggaaaacacattggggtaaacgttcggcaaacgagagggagacttcgtctgtcctgatacgcaaacgggctacctgttcgacttccgacatcaactgattggcatccacctgagtcacatgaaagtcatacattccggattctatcttcgacatatccagaatatcgttaatcagttgaagcaaaagttcggtattggtttcgataataccggcatactccagcatttcttctttatcttctaccatagaaagcagattcgagaaaccgacaatggcatttagaggagtacgtatctcatgactcatattagccagaaaggccgacttaagctgattggcttcctcggctttcagctgcgcttctttcattcgctgatgggctcttttaagaatatgaatataatagcctacggcactgaccaccaccaacagcaagacaacagtcatcagaatctccttcttatactgctcgaagaagctgacaggcagattgatgtacacagcctctttcggataaagggaaaccggtatgtcatacgactgcaaagccggataacagaggtaagcagcaggttttcctccgagagcgggaggaatgtctcgcggaaactcaccttccaggacccgatgaatcagctgtaacaatgaatcgccgaaggactccactgaaacataatatcctccagcgaaagtattgttggacagatcctcgggagccaacaaaaacagaggggaatgtacgaagcgggtaataatctcctgaatatgatcgaacagataattgttatcatcctggttatgagtctcgaaccaggaataataaatgagtcccgtggttttatcataactcttcaaggtatcgagtaacatctcggtagaaatattcctggtggacagttgttcaaaggccaactccggaaaagatccggtcattgcctgctctacatctccgcgaactgcctcactgatgtatctgtcgtctgagatgaaagccagacgcttcatatccggcatcagctgccgcatcagcccgatggtttctttcacataatatacttgccccagagtagtcacgttatatcctttccgccattcataagcgggaacagtattcgattcggtcagctcttcgtgtgaaagcaagatgtcgagtgtagccggcagacggtcgcgggcgttggtaatgatgaccggtacatctttccagacatcatcaaaaagttcacggcaaacaatccatcccggatcgccgataaagacgatcagtcggggaggcacatcgtatttccgccgtaactgctctactacggctgctgcttctttacggttacacaaagcgggcaccgaaagggactcggcctttacggagatattcttcttttgcagggcttggtgcgtataccagaacacatcctttgcccatggaaggttgaaattgatagaatttagaaacaatacgtcttcccttgttttatctgcatgggcagatagccgggaatgaacagctcccaacaatataagaaggaggcaaaggcatctgaatggtgtctgtttcatttgtatgttcgtttcttttgagcggaaacaaaggtatgactatttctccgtatacgaaaaaaggtactctgttatttttagagtacctttctgtttttatcttcgtaagaagtggatcttatacatttttcagggaagcaatactttccttgagcgactggatgatgctttcggcatccgcctgtttcttgcgctccatctcgataacggctgccggagcgttatttacaaacttttcattgctcaatttctttaaaactccctgcaagaaaccttctttgtgtttcagctcggcttccatgcgtgctatctcggcatcgacatcgatcatattgcccaggggcaccgcaaattcagtggttcctatcatgaacgaagaagctccgtcggcctttgcgtccactacctcgatggcagacagattacacattttacgaatgacaggattcatcttttctaccggattggctccgactacctgcaattcaagcggttctttcaatgcgatattcttctgcaaacgaatggtacgtacactgctgatgatttctttggctgtttcgaactgctggaggaattcttcgtttacctctcccggttctcccaaaggctgtaccatcaggcttgcacccggttcacgctcgcgcaactgctgccacaactcttccgtaataaacggcatgaaaggatggagcatagccagcagacgttcgaaagcacttaacgtcatcgagtaaatgaatccgttaaccggctgtccgtaagccggcttcacaatctcgagcaaccatgaagagaattcgtcccagaacagtttataaatcagcatcaatgcttcgctcagacgatatttgctaaacaaatcggcaacttcgacagcagcggcatccagtctctggtcaaaccactgtacagccaggtgagcatctgccggaatatcgattgttcccattccgttctcccaacctttcaccaatcggaaagcattccatatcttattgcagaaatttcgtccctgctcgcaaagcgcgtcatcaaagagaatgtcattcccggcaggagccgagagcatcatgcccatacgtacaccatctgctccgtacttttcaatcaattccaacggatcgggcgagttaccgagtgacttagacattttacgtcccagtttatcgcgaacgatacccgtgaaatatacattcttgaacggcatttttccttcatattcgtaaccggccataatcatacgggctacccagaagaagatgatatccggtccggtcaccagatcgcttgtcggatagtaataattgatttcttcattacccggattattgatgccgtcgaacagagagataggccataaccaggaagagaaccaagtgtccagacagtcttcatcctgacgaagatcggtcatcttcaagttaggattgccagtcttttcccgagccagcttcaaggcttcctcatccgtcacagctaccacatatccgccttcgggcaggaaatatgccgggatgcggtgtccccaccacaattgacggctgatacaccaatccttgatattctccatccaatgacggtaggtattcttatacttggcaggatagaatttaatatcatccttcatcaccggttcaagagcgatctgggccagatgttccatcttgaggaaccattgcatagacaacttcggttcgatgaccacgttggtacgctctgaatatcccactttgttggtgtaagcctctgtcttctccagcagtccggctgcttcaagatccttctcaatctgcttacggacgtcaaagcgatccataccgatatacattccggcagcttcgctgatcgtaccgttatcattgaatatatcgatactcggcaaattatatttttcgcccagcatatagtcgtttacgtcatgtgccggagtcactttcaggcaaccggtaccaaattcgatatccacatagtcatcttcgataacaggaatcacacggcctaccaagggaactattactttctttcctttgagatgctgattcttcggatcgttcgggttgatacacatggccgtgtcacccataatcgtttccggacgggtagtggcaaccactgcatatccgtcttctccttcaatcttgtatctcaggtaaaacagctttccatgttcttctttataaatcacctcctcgtccgacagggctgtcagtgctttcgggtcccagttaaccatacgtactccccggtagataagtcccttattatagagatcgacaaataccttcagcacactttcactgcgcttttcatccatagtaaaagccgtacggtcccagtcacacgatgcacctaacttacgaagctgcttcaggatgataccaccgtgttcgtctgtccatgcccaggcatgcttcagaaactcgtcacggctcagatcggttttcttaataccctgtgcggccaacttattcactaccttggcttcggtagcaatagaggcatggtcggttcccggcacccagcaagcattcttaccttccatacgtgcacgacgaacaagaatatcctgaatggtattattaagcatatgtcccatgtgcaacacaccggtgacgttagggggcggaatgacgatggtgtaaggttcacgtccatcgggtttcgaactgaataatttatggtccagccaatactgataccacttcccctccacgtcagcagggttgtacttacttgctaattccatgttatatctatctattttattagtttattgcgaaagattggcgcaaaattaataaaaataagtagaatataggggcaggaatatgtacttttgttccccgaaaggaagaagaagcaatgaaaaacaggaaacgaatcatacggtactctgttttagggactttaatagcccttgtctggctcactcagatgctcccggcattgggcgaagggtatgcccgtacggcctatccggtcatttcatatatcttgtccggtttttcgaacattatcccctttgcattgggtgacttatttatagcactgagcattggaggaatgatcgcctatccgttttatgcacgaatccggctgaaattaagctggaaaaaaatactgagaagggatgtggaatatttgctatggatctatgtttggttctatctggcatggggactcaactattcacaaaagaatttttatgaacgaaccggaattccatatactgcctacactcccgagattttcaatgaatttgtagacaactatatctcaaaactgaacgaatcgtatgtgccggtcaatcggatcgataaagaagtaatccgcaaagaggcagtccgacaatataacctgatcagtgatacactaggtatacaccgtcccccacactcccgtcctcgggtaaaaaccatgatgttcactccattgatttcgatggtgggcgtgacgggtagtatgggacctttcttctgtgagttcacactgaacggagacctgcttcccccacaatatccggcaacctatactcatgagctggcacatttgctaggtatcaccagcgaagcggaagcaaacttttatgcatatcaggtctgcacccgctccgtaaataaagaaatccgtttcagcggttatttttctattttaggccatgtacttgccaatgcccgccaattgatgacagaagaggaatataaaaagttattcggcagtatacgtccggaaatcattgagctggccagaaaagaccaggaatactggatggcaaagtatagtccgcttataggtgatattcaggattggatatatgatttgtatctgaaagggaacaaaatagaaagtggacgtaagaactattcggaagtgatcggtctgctgatttcatataatgaatggaaaaaagaatcaaataaataataaacatgcatacaagagaagaacaaatggaagcgttcggacgctttctggacatcctcgacgaacttcgggtaaaatgtccatgggaccgcaagcagactaacgaaagcctgcgccccaacactattgaagaaacttacgaactttgcgatgcattaatgcggaacgacaaaaaagatatctgcaaagaactgggagacgtcctgctgcacgtagctttttatgctaaaatcggttccgaaaccggtgatttcgacatgaaagatgtatgcgacaaactttgtgagaaattgatattccgtcatccccatgtattcggggaagtaaaagcagaaacagccggacaagtatccgaaaactgggaacaattgaaactgaaggagaaagacggcaataaaagtgtgttaagcggtgtacctgctgctttaccctcacttataaaagcttacagaatacaggacaaagcacgcaacgtaggattcgattgggaagaaagagagcaggtttgggataaagtaaaagaagaaatagccgaatttcaggtggaagtagccaatatggataaggataaggcagaagcagaattcggagatgtcatgttcagcctcatcaatgctgcccgactttataaaatcaacccggacaatgcattggaacgtaccaaccaaaaattcatccgacgatttaactatctagaagatcataccattaaagaaggtaaaaatctaaaagatatgagcctggatgaaatggatgccatctggaacgaagctaaaaagaaaggattatagtccgacacccccggattcaaaaaaagatgagggtatgtcaccactcaccacagagtcttgatacaccctcatctatataatgatttgctaaaaggataagctatttcctctttccctgtggacgttcgtttccacctttattatcacgtactcctttcagcagttcgcggtggaaacgcatctcggctctttgcaccagataaattttcttgcacgaaaggattttcttaaacttctcaaaataagtcttatccagccggtccgaagcgatgcgggcatcataaactccttccaggatttctccgtattgagtgtcggtagtcttttcatctttaccgctacgaagcaatttccatgcttcgtcattcaattgctttttccgatcctgcagttcaaaataaaccggaaaaaacttcgcagcctcttcttgagtcaggccagccttttctgttataaatgcttgttgtttggccctgaattctttgggtgacaaatgttgattaggacttcccacggcacgcagcgcaggggtaaagccacaaactataatcaatagaataatcagtttcttcatttcgctttattaaatcagtttagtttacttattcggctgtcgcatcactaaggtagacgtacaatgagtaatcgtccaacatcgagcgatctaatgctacatcaatatattcatccgaaaccacttctgtcgctgcttcatttgcagtgagatgatcaccggcagttgtcggttggtggttcgaagaagctacacggatgatcaatgcagcccctataaacatagccgccatatagagcaagggcttcatcctgatccacatcgtgggttgcttcacttcttcaaaggcaggaccttctttttccggcagtttccccatgacctctgaagtcaagttttcaaagtacccttcaggcactttaaaggaattcttcttccccactttcttcaatatgttatcttcttctttcatacgttcttctcctctcttcttcttagacattgtacatattaaaaggtttaattggcctcttccaaaaacttctcgatttttttcacggcatgatggtaagaagctttcaaagctcctactgaagtgccgaatatctccgacatctcttcatacttcatctcctgatagtatttcaggttaaacaccatccgctgcttctcaggaagggtcagcagtgctttctgaagcaaaagttctgcacgatctcccgaaaagtaaggatcactctccagtttctgggtgacatcagcctccggatcgtcaatggcgaccgtattcatagcccgctgtttattcaggaaagtgatacattcgttcagggcaatacggtaaagccaggtagatagctttgcctcagcccggaaataatcaatgtttatccacgccttaatgaaagtgttttgaagaagatcattggcatcatcgtgtgaaagcaccatccgccggatttgccagtataactgttcgctatattgtgagacaatcctttcaaatccctgcttctgtgttctctcatcctgaaggagcgccaaaacctctcgttcattataagggttcataggttcgtttgtaattcgtatatgttattttagacaattctattcagcaatagtttaatcacttccccggaattaaagacttatacacaaattttcttttgccagaatcgtattcgggaataccgccgaagcttctttcagcaaaatactctcgtcttcgtaacgggcagaaaagtgaccgattaccaactggcgtaccccggcctccaaagctatccgtgccgcctgagcagctgtagtatgataggtctctttggcacgtgccaactctgattcggcaaaggtcgcttcatgaaaaagtaagtcgacaccggaaagttgtttcactatttccggcctaaaaatcgtatcggaacaataggcatactttctgggaggatccgaaggccgggtcaaacgtgtattggcaatcacttctccctcgggagtcacgtaatcagatccattctttatccggtttagttcgtaaacaggcaccttataaaaatcgaccatatcacgtataatatgattagggcgtgctttttcggcaaacagaaagccacaacaaggaatacggtgctgaagcggaatagtagtgaccgtcatcgaacgatcttcgtaaaccactgaagtctgcctggtatcgaattcatgaaaaatgactttataggccaatgtatggcaaaagaaattgagcatgggagtcaacaactcctccaatccttttggagaatgaatgtgtaattcagctgtacgtcccagtaacccgaaagtggaaataagtcccatcaatccgaagcaatggtcaccatgcagatgcgagataaagatatgattcaaccgtgagaatttcaaccgtgatttacgcaattgcatttgtgctccttctccgcaatcgatcataaaaagtttatcacgcaaattaactacctgtgaggtagcaaaatgccgggtagtaggcaatgcggacccgcaacccaatatatgtaattcaaatttttccatctttcaaactgtatctgcaaagatagacaattaaaattcagtgcaaagtctcaccgaataaaaaaataatgaaggggtctgccaagatacaaaaaagaaagggtactcctttgcaggaatacccttcagtttatctgagaaaatatgaattacttcttaccttccaactgttctttcagagcagccaaagcatcgatatcacccagagttgtagaagcagcctggttctggatagcaggagtttcttctctcttagaagatttctttgcgttagaagcagccttcttttcagctctttcttctgccttagcaacatcttcgaaaatgcggctgtgagacaagatgattctcttagcatctttattgaactcgatcactttgaattccagtttctcgtccatctgagcctgtgaaccgtcttctttaacgagatgtttcggagtagcgaaaccttcaacgccgtaaggaagagcaactacagcgcctttatccagcatttcgataattgtaccttcgtgtacagaacctacagtaaatactgtttcgaatacatcccacggattctcttcaagttgtttgtgaccaaggctcaaacgacggttttctttatcgatttccaatacctgaacttcgatatcagcaccaatctgagtaaattctgacgggtgtttaaccttcttagtccaagaaaggtcagagatgtggatcagtccgtcaacaccttcttcgatttctacaaatacaccgaagttagtgaaattacgaaccttagcagtatgcttagaacctacaggatacttctcttcgatagtttcccatggatcttgtttcagttgtttgatacccaaagacatcttacgttcttcgcgatccaaagtcagaactacagcttctacttcgtcaccgactttcatgaagtcttgtgcagaacgcaaatgctgtgaccatgacatttctgaaacgtggatcagaccttcaacacccggagcgatttcgatgaatgcaccgtagtcagccataaccactactttacctttcactttgtcacctacctgaaggttcggatccaaagcatcccatgggtgcggagtcagttgtttcagacccaaagcgatacgtttcttctcgtcatcgaagtcgaggataacaacgttcaacttctgatccagttcaaccacttctttcggatcgcttacgcggccccaagacaggtcagtgatgtggatcaatccgtctacgccacccaggtcgatgaatacaccataagatgtgatattcttaacggttccttcaagaacttgtcctttttcgagcttaccgataatttctttcttctgttgttccagttcagcttcgataagagctttgtgagaaacaaccacgtttttgaattcctggttgattttaaccactttgaattccattgttttgccaacgaatacatcatagtcacggatcggtttcacgtcgatctgagaacccggcaagaatgcttcgataccgaatacgtcaacgatcataccacccttagtgcgacacttgatgtaacccttgataatttcttcgttttccagagcagcattaacgcgatcccaagagcgagtagcgcgagcttttctgtgtgacagaaccaactgtccttttttgtcttcctgattttcgatgtatacttcaacagtatcacctactttcaaatcaggattgtagcggaattcattcaaaggaatgataccgtctgatttgtaaccgatgttcacaacaacttcacgtttgttcattgcgattacagttccgtcaacaacctcacggtcatttactttgttaagcgtaccgtcgtaagctttttcgagttcttcgtggctggcaccagcgaagctctcgccgttttcatacgcatcccagttgaagtcttcaataggagcaacgttctttaagttttccattaataattaattgtttagtaattctttaattaaataagacattatattgattatataaatcgggcgcaaagatagaactattttcttgaattagaaaagaatagcaaaaaaaatatcaaaaggaactacaatcgacatacctcacattaatctcttcaaagctgtgatggaatcggatacatatcggttgtccggttctatggaacgccagtaacacaaactgcccagtaaacgcttcaagtaaacgggatcggtagaaccaatatgttcctgatgtccgaccaacccttttgtcaggacgtagtgcacattcttacgaatctcccgcttcttcactttaggcagagtcatcttcttgcctgagctaaccgatactcccgtaataatcttacgtttatgttcagacaagaagcgggtctttttgacattcatcgtgaaaccttcttcccgaataatcctgtggattcgtaccaaaacttcatctttcggcaaataatcacccgaaaaggtaagatcatcggcatatctcgtataaaccaacccgtattcaccggccaacgccatcatttttttatccatcggataggctataatattactgagagccggactggtaggcgctccctgcggaagacaacatctgagacaacaaagttccgccaaaactttcgcgatgggacgtgagtaccccatctccctaaaagctgctctcaccctgggtgaacgtatggaaggaaaaaagtcgtgaagatctacttttaatacattctttcgccccagatgcacccgtgcattatcggatacggactttcccagacaaaatccggtaacagcgggatgtatgttagctaacaataaaatacggtgatagatagtttgttgcatggaacgaaaatcacctgcgggagccgaaatataacgaaatccgccacttcttttccgaacatgaaaacaggtatattggcgcggtatataatccaacacttccctcaatctggattcttcggttgccagcagattggcacaccacctgatagctccgtcatcgaaccgcctcgcaccggtagttctgactctcttactaaaaagaccttgggaaagcggaccacttgctttttctttggcataaggattttcactggcatagttaccggccctccaccttttatatccttcctgatttttgcttgaacgaataatacgaacaaccatccaacaggtaacgacaatcacaatacccaaaagtagttccatccttatacattattatatatagaagcaataaaagaagaggatgagagtatttacttttctttattatgagtatcttaataaagaaaccagaaagaacctgagttcatgaggcgactgcacctcttttttgctaaatctttatctcatcctcttgaccgcaaaggtagaaatattcttctctgctaacaaaaatagtaagaataaagttagcggttaaacagctcgaacgtaaacttgcagccgacctcggtatacttccagttctcactacctacaaaaacgccaaaatcaaagatgtgagtaccgattccatatcccaattccacatacggctgaagatggggtactgacaatatactcgcatacaaccgctcgttctgtacataacgtgtgtatttaatcagatgttttaataataggaaaggagcttcataagtaaaatgtccccgtatatatttccgtgaagcattataccaacgacggtcgagaagctgaaatactcctccgatttcgtcattccaaccttcaggaagattacttcgagtaaagttattaaagtcgacaaaatacatttctttttgattggtaaacataccaaatccaaaacgataatagatattacgcatcagtcccaagggtatatgatgctgcaaatcaaactccaaacgttcatattgtccggtactgccaaatacccccttgattcccctctcccagtctatcgaaaaagtgggatacttagaacggagattaatcttacggtgtccgttcatgtaatagtataaacaaggggtccactccaaccgaacccgaggggcaaaactcaaataggtattcctgattttgttctggatatcttcattgagtgtctcccgactctttgtcagtggaaccaacttagaggactttaccgcctttcgcctatgggtagataagcctacacttaactctaatccattaataatctcgatactgtgtcggaagttaaaatataaatcgtaaaagtagtccaaatgaatctgattaaaatcaaatacactgtcgggtatggctttcaaatcatcaagcacatcgctactgtaaatccggttgccgttaccaaagtcaatgtgaacagctcccatcttctcgggcaggtaattaaattcggtattgacagaccaatagaattcttttcgtgtaaagttgtagcccaacttaggtaccacacgcaatagcctatcatgcttaaaaagtcggttatatttaaacgattgcctataggaaagcccattgctcccgctataactcaacaagaaagggttgataagtggtgagcacttcacgcttcccagattggagaggttcaatttatagtcactgatcagtacgtctcccacctgtccccaaaacacctgactcttactctttggtttgatgttgcgttgaatggtatctttacgcaacgcatcttctttgtatagtctgcgctcagcctccgacaaaggaataggcctcaatgtttcaaaataagcactatccgtatggaaagaggtagtctcgcattgcaagttataagagtctgaaagatcatatttactttttccttttattctcgccctcaccttctctttccatttattctgattttcttcaagcacaatatcgtgatagttgagcgatgccacataaactccattaatacggttacccaaaaaattaaactgtccttcgacattatagctgaccggaagaaactcatcatcctttcctacacgacccatttttatcaggcaactgaacaatagcagttccgacctgccggaaaaacgtatttcgcggacactccacacgtcactactcacaatcatatatccacccaccaactgatcactcttacttctggggataaaccgtatcttatattgtcggttgtccgtcccacccattatggaatcgatcaggtacttataatatttccgcccgtttttggccaaaggcgaaagcaatcggtcgtaaagcagcgttgaagaataaagattgatattgaaatactcaagcatccccggtactccccggctattatgcacagtgcccatagaagctttcaccttctggtcataaatattaggggctgtaaaatgcagatcactatacgtctccaccatatactgccgtacacctttttgaagacggaacatggaaggtacataccggagaataaaattctttcgtttgatgtccatcgtaccttttatatatagatcggcccgatagtcggtcactaacttttcgtaaaaaggagcgaaagtcatcacattattcaaaatagaatcggcagagatgggacgattggtctgaggatcaagaacaacgttagccactcccttttgaacaaaacagagcgagaataaccaaaaacaccatattaatatattgcacctcaaatactaatctccttattgaaggcaaatataaaaaaaatccgattatgcgactaataaattcatattttatagtaatctccggataggtaaagtatacaaaaaagttctttcgcccacaaacaaataggggtatacaaagaaaaaacatatttattttgcaaaatacccctataaaaataggggtatattagaaaaaacatataattttgtgcccaacaaccaataaaagagacaccatcatgtcaaaaatgagatttttcgcactacaagagctatctaacagaaagcccttagaaattactactccctctaataaactatccgattattatgccagccatgtattcgatcgtaagaagatgcaagagtaccttcccaaagaagcatacaaagcagtagtagacgctaccgaaaaaggcacccctatcagccgagaaatggccgacctgatagccaacggcatgaaaagctgggcaaaatcgctcaatgtgacacactacacgcactggtttcagccactgacagacggaacggccgagaaacatgacggctttatcgaattcggtgaagacggtgaagtaatcgaacgtttttccggcaaattactgatccagcaggaaccggacgcttcttctttccctaatggtggaatccgtaatacattcgaagcccgcggttacactgcatgggacgtttcgtcaccggctttcgtagtagacaccactctttgtatcccgacgatttttatctcatatacaggtgaagcactcgactacaaaactccattattaaaagcattggcagccgttgacaaagctgctaccgaagtatgccagcttttcgacaaaaacatcacccgggtattcaccaatttgggttgggaacaggaatattttttggttgacacctctttatataatgcccgccccgaccttcgactaacaggacgcaccttgatgggacattcttcggccaaggaccaacagttggaagatcattacttcggttctattccaccacgcgtcacagctttcatgaaagaacttgaaatagagtgtcacaagctgggcataccggtaaagacccgccacaatgaagttgctcccaaccagtttgaattggctcccatttttgaaaactgtaatctggcgaatgaccacaatcagctggtaatggacctgatgaaacgtatcgcacgcaaacatcattttgctgttcttttccatgaaaaaccctacaatggcgttaatggttcgggcaaacataacaactggtcgctctgcaccgatacaggcatcaacctctttgcaccgggtaaaaatccaaaaggaaacatgctattccttacttttctggtaaacgtattaatgatggtccacaagaatcaggatctgttgcgtgcttctattatgagtgccggaaacagtcaccgtttgggagccaacgaagcacctcccgctatcttgtccattttcctgggttcacaactgtcagctacactcgatgaaattgtccgtcaggtgaccaactcaaaaatgactccggaggagaagacaactttgaaattaggtatcgggcgtatacccgaaatcctgctcgataccaccgaccgtaatcgcacttctccttttgcattcacgggaaatcgttttgagttccgtgccgccggatcctcagccaactgtgctgctgccatgattgccataaatgctgccatggccaaccagttgaatgaatttaaagcatcggtagacaaactgatggaagagggtatcggtaaggacgaagcaatcttccgcatcctgaaagaaaatatcatagcctccgaacctatccgttttgagggtgacggctactcagaagagtggaaacaggaagcagcccgccgcggactaaccaacatctgccatgttccggaggccctgatgcattatatggataaccaatcgagagccgtactgataggcgaacgtatcttcaacgaaaccgaactcgcctgtcgtctggaagtggaattggaaaaatataccatgaaggtacagattgaaagccgcgtattgggtgatctggccatcaaccacatcgtccctatcgctgtcagctaccagaaccgtcttttggaaaacctttgcagaatgaaggaaatcttctctgaagaagaatacgaagtaatgagtgccgatcggaaagaacttattaaagaaatctctcaccgtgtatctgctattaaagtactggtacgcgacatgacagaagcccgcaaagtagccaatcacaaagagaacttcaaagaaaaagcatttgcttacgaagagaccgtacgtccttacctggaaagcatacgcgaccatatagaccatctcgagatggaaattgacgatgaaatctggccgttgcccaaatacagagaactgttattcacgaagtaagccatacttgatgtctccccgtaagaaggtccttttcaaagatctcttatggggagcttttcatttcccgggtttcctctacccaaccctactttcctgccggcaaacatcccagcgtctgtcaacaaaagattgaaagagatcaatgttcaatttgaaagatagataaaccggagttccatatcgcgcttcttgctctcagaaagagtatgctcactctcctaaatagtccgcccgacttccaaaatgtaaagcatacatagcaaacttttcgataaactattctgtttttcattttttctttctacatttgtgctttataacacagttttgcaacagatatggtaaagatgaatttgtcagaaataaacgttcccgaacgtattgcagagatgtgggctcctctaaacgcagagcaaagggagttcctggccaataatttcacccttcaaaattacaaaaagaatgaaacaatttattgtgaaggtgaatcacctacctatctgatgtgtctgcttagcggcaaagtaaaaatctataaagacggtgtaggaggcagaagtcagattatacgcatgataaagcctacagaatatttcggttaccgagcttactttgccaaagaagactatgtgactgccgcttctgcgttcgaaccttcaaccatctgcctgattcccatgagtgctatcatgacactggtaagccagaacaatgacctgggtatgtttttcattcgtcaattgtctatcgacctcggtattgccgatgaaagaaccgtcaatctgacccaaaaacacattcgcggacgcttggccgaatcactgcttttcctcaaagaaagctatggactggaagaagatggctctacgttaagtatctatctttcacgcgaggatttggctaacctatcgaatatgactacttctaatgccatccgtacattatccaacttcgcaaccgaacgactgatcaccatcgacggacgaaaaatcaagatcatcgacgaggaaaaacttaagaagatcagcaaaataggataaaagcgctttgtcgccattcaataacttaacacacatttattaccatgaaaaaaggaattactctttttcttttgtctctgcttttcatcacccccggatgtaaacagtcaaaagaaaccatcgtgaacgaatacaatatcgttccgttgccaaaccaaatgattccccaacagggacggttcgaaataagtaaaaaagtaagagtcataacaaccgcttgtacaccggacgtacaaatcattgccgacagcctcatcaaccgattgaagctgacatcaggaattaccataaagcaaactttcgagaacgtaacggacgagcctgttattcgtttcgtgccgcaagacggaatgcccgaagaaggatataaactctctgtcactcctcaaaatatcacccttacagcttctacccccaagggatttttctatgcagtgcaaacactttatcagttattgccacccgttgtatatggtaatcaaaaggtgaagaacgccgaatggtcggtaccggctgtcgaaatagaagatgctccgcgctttgcataccgtggtctgatgctggacgtatgtcgccacttctccccggtggaatatatatataaattcatcgatatgctagccatgcacaagatgaacactttccactggcatctgaccgacgaccagggatggagaatcgaaatcaaaaaatatcctaaactgactgagataggttccaaacgtaaagagacactagtagattattactatgtaaactacccgcaagtctttgacggcaaagagcatggcggatactatacacaggagcagatcaaagccattgtagactatgcagccagcaaatttatcacggtgatccccgaaatcgagatgccggggcatgcaatagcagccattgcttcttatccggaactttcatgtacaccggacagcacatgcgatgtgacaggaacctggggtgtatttgagcaggtattctgcccttcagacaccactttccaattccttgaaggagtgatggatgaagttatggatctcttccccagcaaatacatccatatcggtggtgatgaatgcccgaaaacagcctggatcaacagtgaatactgccagtcgttgatcaaacaactgggactgaaagacgatgttacccccaacgttatcgatgggaagaaacataccaaagaagagaagttacaaagctactttatcacccgcatggagaaatacttgaatagtaaagggcgtaacatcatcggatgggacgaaattctggaaggcggactggccccgaatgccaccgttatgtcctggagaggagtagagggtggattaaatgcagccaaagccggacacaacgccattatgacaccaaatccatacgcatatctggatcagtatcaggaagaaccggagatagctcccgtcaccatcggtggatataatacgcttaaaaagacttacagctacaaccctgtaccggacgatgcaaacgaactggtgaaaaagcatatcatcggtgtacagggtaacatctggacggaatacatgcccggcaatgacaaccgcgactatcaggctttcccacgtgcagtagccatcgccgaaacgggctggacattgaatgcaaacaaaaactggaataacttttgccaacgcatggtagaagacttccgtcgtatggatgtgaaaaatgtcaaagcttgccgcaatttcttcgatgtgaatatcaatacacatgtagacgaaactaatacgttgaaagtagtactggaaagtttctaccccaatgccgaaattcactatacaacaaatggaagcgttccaacagtagaatctgccatttacaatcagcctttcgccttatccggcgaaatggacgtgaaagccgctgctttcaaagacggaaagatgttgggcaaggtcagtggaaagaagttgtatggcaatctgatcagtggtaaaagtttcacagtgactccgcccatcggagcggccaaaggcgacattttgggtgaaaatgatgttctcggtactgatataagcactttcggactgaccaacggtaaacgtggcaacatcgcttcgatgactccgtggagcggattccggatgaacgacgcctgcaataaactggtatttatcgttgaattcgaacagcctactactgtcagcaaagtggtcttcggttcgttatacaaccccgcatcagtcattctccctcccagtgtagctactgttgagacctcttccgacggacggaagtatgataaaatggcagaagcttccttcaaacggaactatcctgaaagaggcagaaaggcattcactgacacattaggctttgcccccaaagaagtcaagtatatcaaaatcactcttcaaaatggtggtactttacgaaacggcattgattttgtgaaagacccgaatgaaaaagatgtggttcaggctaacatctatttggacgaaatagaagtatattaacgaccacatcatactccacaaaaacgcggaggacacagagtattattccatttctgaaaatataaactctgcgtcctccgctttatttccggacacaattactgtccaaagagacaactgcgtccggaatatctttgtagttttttacaaatcttagatcaatcccttttcagacagatagcgttcagcttcaatagcagctttacatccgcttccggctgctgtaatagcctgacgataatgcggatcagctacgtcacccgcagcaaatactccgggtaccttggtacgaggactgtcaccgtcggtggtaatatatcccacttcatcagtatccagatagggtttaaagatgtccgaattcggtttatgcccgatagcaaggaagaaaccgtcgataggtaatgaatagcgttcttcatcgggctcctcccaacgtttcacaagattcataccttctacaccgttctcaccgaaaagaccaactacattatgctcaaaaagtacttcaatcttatcatgtttcctcacacgctcctgcataattttcgaagcacgaagataaggcttgcgcacaaccagataaaccttggaagcgagtccggccaaatagatcgcttcttcacaagcagtgtcaccaccacctaccacagcaaccactttcttacgatagaaaaaaccgtcgcaagtagcacaagcgcttacccccataccggcatacttcttttcatcgtccagtcctaaatatttggctgtagctccggtggcgataatcaatgaatcggcttcgattactttttcaccatcgattgtaattttgtaaggagcctgaccaagatcagaagcggtagcaatcccaaagcggatgtcagcaccaaaacgttcggcctgtgtacgaagatcttccatcaattgtggtccgctgattccttgcggatagcccgggaagttttctacatcggtagtggtagtcaactgtccacccggctgtattccttcgtaaagcaccggtgacaaatttgcacgtccagcatagatagcggctgtatagccggctggtcctgaacctataataaggcatttaattctttctgtttccatactcctatttatattttacgatttactatttaacgcttgaaatcatttccctctcctaccgaagatcaatcacttcggcatgaggatattgtttcttatcaaacacaaacataccatcggcatatttcaaacctgtctgataaccggtcacagtgatctcgctacgactcttatcacgttgttccatcataatgaacaagggttgataagtgtctttactcacataaagcacaattcgcgataaatctctcttcttatcagtagcagtcaatactacctcatagaccggtttgccaccaaagttcttcaatgatccgatcttatagtcgaagccatgacggtatatctgtaaaagcgcatacggattaaggccctgcaattcggtcccggtagggttactgatattaacttcatcactgcttctcagatagctccactgggtcttaccatcaaaccaagtaataccatcgtctgttttcagtacaaacttttcccctttgagttcgatgactccggcagactgtccggccatcctgcttttgttaaacactgtcacgttgaattccgcacagataccgcctgccttttcaaatgtggccgccgtcttatcaagcacaacttttgcctgcatttgttgttgagcaaacacaggcaaagtcagtaaagctatccaaatgctaattataatctgcttcattgtatacactcatttaacgtttgattattgaatattgttcaaacgcatttcaaggtcattttcgtccacacacagcacatcgcgtgccttgcttccctgtgagggacctacaataccggccttttccagctgatccatcaaacgcccggcacgattgtagccgatggagaatttgcgctgtatcagcgaagtagatccctgctggtgaatcacaatcaaccgggcagcttcctcaaacaacggatcgagccgtcccatatcgacttcacccaaatcactaccgctatcttcactcacatattcgggcaggaagaaggcggtaggatatccctgctgacgtgaaatatacttggtgatttcttccacttcgggcgtatcgataaatgcacactgtacacgtaccggatcggctccctgaaggaagagcatatcaccgcgaccgatcaactgattagctcccggacggtcgaggatggtacgtgagtccatcatcgctgacacgcgaaatgcgatacgtgccgggaagttggccttaatagtacctgtaatgatattggtagtcggacgttgggttgcgataatcatatgaatacctacggcacgtgccaactgcgcaatacgggcgatcggtagttctatctccttaccggctgtcataatcaaatcaccaaactcatcaataaccactacgatataaggcataaatttatgccccttttccggattcaggcggcgattgatgaacttctcattgtactctttgatattgcgcacatgagccattttcagcagatcatagcggctgtccatctctacacaaacagaattgagggtctgcaccactttagttacgtcagtgatgatagcatcttcaccatcgggaagttttgcaagaaaatgatgctcaatgacagaataaatgctgaattccactttcttaggatccaccagaacaaacttcaattcggcaggatgcttcttataaagcagtgaagtgatgatagcgttcaagccgacagatttaccttgtccggtagcacctgccaccaatacgtgcggcattttgcaaagatcaaccatgaatacctcattcgtaatggttttaccaagtgcaataggcaaatcataggttgactcctgaaacttcttactacctataatagactgtcctgaaacgatcttcggatttgagttaggcacctcgataccgatcgtaccttttccaggtatgggagcaatgatacgaatgcccaacgcagaaaggctcaaagcgatatcgtcttccaagccacgaatctttgaaatacgtactccttgttccggagtgatctcataaagagttaccgtaggtcctaccgtagctttaatcgtacttatttcaatgccaaaactacgcaatgtattgataatacggtctttattcgcattctgttcctccatattgatggtaggctcactattttcatagtgtttcatcaaatcgatagtaggaaaatgatagttctctaaatccaatttagggttgtaaggttcggtctccgcaccctgataattttcatcatcggcagcaggctctatctcgaactcaggctctttatctgccgacgctgcccgaaaaggaggtacgggatcaggagctgtctgttcaaaagtcatagtcacatcaccatcggatgtcacatccctgtcttccggagtcacaggcatttcggttgaagattcgacaggtgtttcaggcacaacagtagtttccacctttttcaccggtacttcctgccggaaagtacgatttacatcaaattctacttcctgaggtttcgggttatcatattcatgtggttgaggggcctgagtaacttcagcaagttcttctttttgtttacgcttcaagaaactaagactaaaaagcttacgcagccaaatgatggtgcgggcactcatatatataaggaaacaaatacctgttgccagaagaatcagccatacacccggaatgccaacttgagaaatcagccagttactgatgttataaccatgcaatccacccagatagatgaaggagtcctgataatggtccataaaaacgaaaccaaggaaaacagaaaaccaaatgagcagcaatgaacatccgataaaccatttccaaaggcgtaccacacgcacacgcattaatttgagtccggcaacagccaaatagattaaaataaagaaagaggaaataccaaaacaatcattgatcaggtagcttgccaactgagctccccgggaacctgcatagttctttacgtgattgttcacagcagcaaggtcctgggcatttccgctatcaataatactttggtcagctgctccagtgaaaaagaaagaggtaaaggccagtaacaaatagactgagaaaatgaccagtaccaacccgattacaaagtgaattgtttcgttcctgaagaaagccacatatttttttgtggaagccggcttctgttctgcttccttatctgatttcttttttgccatgtggatgatgaatcttaagctatatgattaatgatgcaaaagtagtaaaaaaaagaatttcattggactacccacaactttttcttacctttgcgtttcaattcaagcagatatgaaaaaagagagtcaagtaatatttgataagaatgtgatagaattcgttacagtagccgccgagttctgcgcttttttggaacgtgccgaaagtatgaaacgcagtacgtttgttgataccacccttaaaatacttcctttgctttatctaaaagcatccatgcttccgaaatgcgaaatgataggtgatgaatcacctgaaacgtatgtaacggaagaaatttacgaagtgttgcgcatcaacctggcatccatattggcagaaaaagacgattatctggaagtatttctacccgacatggcttacagtgacgaaccgatcaaaaagaatatttcggaagatctggccgatatctatcaggatatcaaagactttatcttcgtattccagctgggattgaacgagacgatgaacgattccctcgccatctgccaagaaaacttcggactcttgtggggacaaaaactggtaaataccatgcgtgccctgcatgacgtaaaatatagtccgaaagcccggggagaagacgaagaggaagaagagtacgaacccgaaaacaatgaagactgtcactgtgaagatgacgactgccattgtcacgatcatggctgccattgccatgatgatgaataaaagaatatgattttaaaaagaaccataagcaaagaagaggtgaaggagatgcccaaagcagcatttcccggacggattcatgtaatacagactgaaagtgaggcgcaaaaagcggtggcttatctgcaatcccaagccatcttgggaatcgacagcgagacacgtccctcattcaccaagggacattctcataaagtagcattacttcagatttcatctgacgagtgttgctttctgtttcgcctgaacatgaccggcctaacccaacctatcatagaactacttgaagatccgaaagtaatcaaagtgggcctttcactaaaagacgacttcatgatgttacacaaacgggcccctttcaatcaacaggcatgcattgagttacaagaatacgtccgtcctttcggcattcaggataagagcctgcaaaagatatacggtatcttgtttagtgagaaaatctcaaaatcacagcgtctttctaattgggaagcagatgtactgacggacgctcaaaagcaatacgcagctacagatgcttgggcctgcctcaacatatatcacttattggaggaactgaaacgaacaggaaactacgaattggctccggaagaggaagccacagagaaagtaaaagtaggttcagatcaacaataaaagtaaaaacaacataataaatttatgcataaagtatatcttaaacccggcaaagaagactcattgaaacggttccacccctggattttttctggtgccatcgcccacttcgacggcgaacccgaggaaggtgaagtagtggaagtgtacacctcaaaaaaagaatttattgccaaagggcatttccagatcggaagtattgctgtacgtgtactttcgttcaaacaagaagagattaaccacgatttctggaaacacaaattggaagtggcctacgacatgcgacgcagtattggcatcgctaccaatccgactaacaatacctatcgcctggtacatggagaaggcgataatctgcccggactcgttatcgatgtttatgcccggactgctgtgatgcaggcacattctgcaggaatgcatgtagaccgtatggccattgccgaagctttgtccgaagttatgggtgatcagattgaaaatatctattataaatcagaaacgaccctcccatttaaagcagaccttttcccggaaaacggtttccttaaaggaggaagcagcgacaacatcgctcaggaatatgggctgaagttccatgtagactggctgaagggacaaaaaacaggtttttttgtagaccagcgtgagaatcgtgctctactggagcgttatgccaaggggcggtcggtattaaatatgttctgttataccggaggcttttccttttacgccatgcgtggaggtgccaaacaggtgcactcggtagacagttctgcaaaagccatcgatctgactaataaaaatgtagaattaaacttcccgggagatacccgtcatgcagcctttgctgaagatgctttcaaatatctcgaccgtatgggtgaccagtacgacttgatcattcttgatcctccggcatttgccaaacataaggatgcgctgcgcaatgcccttcagggctaccgcaagctcaatgccaaagcatttgagaaaatcaaaccgggtggtatcttattcaccttctcatgttcgcaagtagtgaccaaagataatttccgtactgctgtatttactgctgccgccatgtcgggcagaagtgtacgtatactacatcagttgacccagcccgcagaccatccggtgaacatctatcacccggaaggggaatatctcaaaggattggtgctctatgtagaataatcattccataagcataaaagcagcagtttcaaagttaattagagttaacaaatagaagattttcatcaaatcattatgttatataacataaatccctttatctttgcactgtgtttttcatggtattagatttaaggttaataaagattggctgtccgggaggatagccttttttttatttgtatatatgaagagagaatagattactgcgggatcaatgaataaacttagaaataaagatagatattcagccctttacctcctccaatttattcattgactccatttggttaacaatccatctaataatgtaaaagaaccgtcctgcagcaggtggtggatgacctgtttctttaattaaataagcagtaacctctaccttttatttcttttgttttactaacataatcaccggattatcttcttcattcaacctagaggcgatttctttcaatttaccatctttcagttggtctttcttataaatttcaacaagtcgggctgcatttagacttgtgacgtcttcaatttcacgattaattggtttcgctgtcatagccactgttcttttgtccacatagtcatcattgtatatggtaacttgaaatacagccttttcttctttgtcatacaccagttcatcagcatagaatccgttgcccttttcaaagttaaatacatttttaacggcttccataaagtaataacggtcggtatggatacccatataaagaaaaacttccggttccatggtatgtgcagaaggagttcttacaacaaaaggacttaatgtaccatccgacgcatagttatacaatgtatcagccgatgtatccataagtgtacatttcccgttactcaggcgtatctgataagaataatttgctataaacctatctccatcattcacaattggtgtatcaatcgttttgaaaggaataaaaatatcacgggtgatacttccatcctgttttgataggataatatggtatgatttggttctatcctctcctttactgtgataatctgacatatcatagcaaatcaaattatctttgtcataatcgaaaatagatgaaacttcccgatcaagactcaaacaccgtttgaactttccataaagatcatacactaagattttatttcccggtgactttacgaatatttcaccattgttttcatcaagaataatctcattaatcctcgcatattcttctgctccttgcccccgacgatttatcttcctcactcccttaccggtttttctgtcaaaaataaaaatatccccatcattattcctatttgtcgccaatatgtattcttttcccacatcctgcaccagaccttgtgtaagaaactcgtcagtggtctccaacgcaacatattctacatccataaagtcctgaagaatcaattcttttttaggataacttttcgaaacgtcaacaatgattaaatcattgtttgactgtttattttctccacaccccgctaataccaccaacagaatgaccgctaaaatcgtttttgtttgtttcatttcagttattgtttatttgataaagaagaacctgtttagagcctgtaaaaaaatggctgaaatctttttaatctaaactttccgtatcagccgaatagtttctttctttggagtaaccaaactttaaaaaagatatatcagactgattttaaggaaagagagtggcaatatataacaaaagtattgaacctgcaagaaagaaagcgaaaataagatttacaaatgatttagaatgccattttttatttagtgaagaccggctgccaatggcatatgcttcctcttgacctccctaagtggcagttggtttactactactatcgcaaatgggcgaccttgttggattttgacttgctattagagaaattccctaaagacctttttttccctacgcaaataaagaagaaaacaaatggatttcccctcttatcataagccattataaacaagactattacgatccttcatgcgatctttactccggcccgcatacccggataagattcagaccatcttcgctaaagatacgaaggaaaacaaaatgcttttataggcataaacaaataagataacagatacatcacgctatatgtcaaaccgttacgtttactttctctactaaaacgaagagtggaaaatggaagatcgaaattcattttccgtatgagaagcgtacaaaaggttttagagtccgctgaaatcgcccctcaaataccggacaaagttcggttgccacaccttcgttatcgaaataacaggctctaagattattatggaggaaaatttaaaccagctcttagattgaataaggtagcaacggattatatatacccacattataaaaacaaattattaatcgtacttttgcaggtttatttctgacatttagtcatttatacaatagaagtaagtcatttggaatagaccgctttcttttttatagacctttcattctctgttttttccaattttcttttgccattttccttttctcatttccttttattccatgctttttccactctgtcaactaaaaatattatatttgcacctgatctgccatagacaggcacgacgggaaacacatcaataaaagttatgaatataaaaaatcgtttgattattatgaacttcctgcaattctttgtatgggggtcgtggttaatttcactaggtggctatatggaaagaggcctccattttgaaggtgggcaaatcggagccattttcgcaacaatgggaatcgcatccattatcatgccgggaataacaggcattatagccgacaaatggttcaatgccgaacgcctttatggtatttgccacttgctgggagccggctgcttgttctacgcttctaccgccaccgactatagtcaaatgtattgggccatgttactcaatctaatggtttacatgcctactctttcgctcgccaatactgtttcgtacaatgcactcgaacaatataaatgcgatttagtaaaagacttcccgcctatccgtgtatggggaaccatcggtttcatttgtgctatgtgggcagtggaccttaccggattcaaaaactccagtgctcaactttatgtcggagcaagctcagcattacttctcggactgtattctttcactctgcccccctgcccccctgcaaaaaatcagagcaaaaccctattgtcttctttcggtctagatgccctcagcctattcaaaagaaaaaagatggctatctttttctttttctcgatgttactgggtgcagccttgcaaatcacaaatacatatggtgatgcatttttggggagtttcgccaaaatacccgaatttgccgactctttcggtgtcaagcactcggtaatcctgctgtccatctcacaaatgtccgagacactgtttatcctggccattcctttcttcctgaagcacttcggaatcaaacgtgtcatgctcatcagtatgtttgcctgggtattccgattcggactgtttggctttggtgatccgggatcaggcatctggatgctgattttatcaatgatagtatacggtatggcatttgatttcttcaacatttccggttctttatttgttgaattggaaaccaaacctgagacaagggccagtgcacaaggtttgttcttcattatgacaaacggattgggcgctgtcatcggaggatatgccagtggagccgtagtggatgcattctctgtatatgaaaacggaatgttggcaagtcgcaactggccggctatctggttcatatttgcagcatatgcactggctatcggtattttgtttgcaattgttttcagatacaaacatcaaccgggagaacttaagaaagtgaacaattaacaatggataagaaagtagaattacaggtattgaacatttctaacagccaggcgcaggtaggtgcctatgcaatggtattgggagaagtagatggcgaacggcagctacctattataataggacctgccgaggcacaagctacagccatttgcctgaaaggaataaaggccccacgcccgctgacacacgatttattctattcgtgtctgaatgttttgggagcaactctgctccgggtactaatatacaaagccaaagaaggcgttttctattcgtatatctactttaaaaaagacgaagaaattattcggatagatgcccgtacctcggatgcagtggcactggccgtcagggcagattgtcctatctttatatacgaatctattcttgaacgcgagtgtatacggttgacagacggggacgaacgtcccgatactccggaagaggatgaaaactcacgcatggagccggtcagcattatttctcttgaagaagcattgaataaagccattcaagaagagaattacgaactggcagcccgacttcgtgacgaaataaaccgacataaataaaagatatgcacgtattttatacccctgatatacaaaccagcacagaacttcctgaagaggaagcacagcactgtgtacgtgtgctccgcctgacagccggagatgaaattagtctcaccgacggaaagggaaacttctatcgggcagagatcagcgtggcaacccataaacgttgcctggtgaatattaaagaaacaatttaccaagagcctttgtgggacggacatctgcacattgctatggcacccacaaaaaatatggatcgtaatgaatggtttgctgaaaaagcaactgaaatagggttcgacgaattaacattcttgaactgccgcttctccgaacggaaagtaattaaaaccgaacgcattgaaaagatattggtgtctgccatcaagcaatcgttaaaagcacgtttaccgcgtctgaacgagatgactgatttttgcacatttatcgaaaaagactttaaagggcaaaagttcattgcccactgttacgaaggagagaaacctttactgaaagatgtcttgacaaaaggagaagatgccctggtgttgatcggaccggaaggtgacttcagcgaagaggaagtcaagaaagcaatcgagaaaggatttgtccctattagtttaggcaaatcgcgactgcgcacagaaacagcagcattggtggcttgccacacaatgaatatgtaatttacagaaataaaaaagatagtaattatggtaaaacgaatgatttcccgactttcggtactggcagtactgatcgttttcatggcagcctgctccaagaaagcggaatatatccatgtgattccggccgatgcttcggctgttgcttccattaatctgaattctcttgccgacaaagccggcttgaatgataaacagaatgaagggatgaaacaaaaaatgatggaagccctgaaaagcggaatgaatgcagctgctttccagcaactggaaaaaataatgaaaaatccttctcaatcggggattgatgtcaaagctcctgtattcgtatttacttccaagactttcattagtcccactatagttgccaaagtcagtaatatcgaggacttgcgtgcttcgctcgacttaatggccaaagaaggaatctgccagcctatagcagaagaagaggggtacagtttcacatccttgcagaagaacaatctattggtctttaatgaaaatgcagcagttttgacagaagcctacggaacttctcaaatggatgttgccaaacaaaccatctccacactgctcaaacagaccgaagagaacagtatcgcctcaaacggcagtttccggaagatgcaggatcagaaaggagacatcaacttttttgcttcaatggatgcggttcccaaaatgtatactcaacaaatcagtctgggactctcttcacaaatcgacttgagcgaagtaaaagctgtgggtaacctcaactttgagaaaggaaaaatcgctctgcagatcgaaacctactcggataatgcagagacggatgcgttactgaagaaacaggctcaagctgttaaaaagttaaatacaactttcctccagaacttccccgaatcgactctcgcattcttaaatataggagtcaatggagcagcattctacgatttactgttcaataatgaagaattccgtagaaacgtgtctcttgcgaaagccgatgaagtaaaaagtttattcgcctctttcgatggagatatttccatcggactgattaatgtaaccttgaacagtgttcctacttttgctgcttatgcagatgcaaagaacggaaatgccctgaaagcattgtacgacaataagaaacaattaaaattaggtaaaaacgaagatattatccaattgggcgaaaacgaatatgtttataagtcaagagcaaccaacgtattctttggcatccgcaacaagcagatgtatgccactaatgatgaacttctgtacaagagtatcagcaaacctgtagagaaatcaatcaaagatgccggatatgtatcggatatgaaaggcaaaaatgtattctttgttatcaatatggatgctattctcgatctccctgttgtgaaaatgatggccggattcggcggcgaagaatatcaaacttattataaactcgcttcaaaaatttcgtatatcgaggcattcagtgacagcgaaggtaagaccgaaacagccattcttctgaaaaacaaagacgacaacgctttaaaacagatagtagactttgccaagcagttcgccggcatgtaatcttcaacgtgtatggacagcattcacctacagcaaacacttccccaagtgtttgctgaccgtaattcgataacttcggatgtatggcatcggaatcttgttttccataaaggaaaatcttacctgatcgaggctgcctccggtaccggtaaatcatcgttgtgcagctacatctacggctaccgaaacgactatcagggaatcatcaacttcgacgaaaccaatatcaaagcatatccggtgaagcaatgggtggaaatccggaagcattcactgagtatgctttttcaggatttacgcatttttacggagttgaccgccatcgaaaacatccgactaaagaataacctgaccggatataaaacccgaaaagaagtattatcactgttcgaagccttgggactctcggacaaactgaacgtgaaggcaggcaaactttctttcggacaacaacagcgagtggcgttcatccgatcgctttgtcaacctttcgacttcattttcctggacgagcctatcagtcatttggacgacaacaatgcacgtattatgggagaactggtaatggaagaagccagcaaacaaggggcgggaatcatcgtaacgtccatcggcaagcatatcgagttaacgtatgacagaatattgaaattatgaacaacttagtctggaagctgctccgtcagcatatcagcatcggtcagttgaccggtttcttctttgccaaccttttcggaatggttattgtgctactcagcgcacaattctacaaagatgtagttcccatctttaccgaaggggatagctttatgaagaaagattatatgacagctactaagaaaatcagtacgctgggatcttttgcgggcaagagtaacactttttcgtctgaggaaatagaggaactgaagaaacaaccgttcacccggagcgtaggtgctttcactccttcgcaatttaaagtctccgcaggattgggaatgcaggaagcaggaattcacctttctaccgaaatgttctttgaggccgttcctgataagtttgtagacgtcagcctcgataaatggcattttgatgaaaacacgcacaccatccctatcatcattccgcgcaattatctgaatttatataacttcggatttgcccagagccgaagcctgcctaaactatcggaagggttgatgagcctgatccaaatggatattctgatgcggggcaacggacgggttgagcaatataaaggaaacatcgtcggcttttccaaccggttgaatactattttggttccacaatcttttatgaactgggctaaccaaaactttgcaccggatagccagccggacccttcacggctgattattgaagtagacaatcccgctgatgcctccattgcaaagtatttccaacaaaagggttatgagacagaagacggaaaactggacgccgggaaaaccacttattttctgcgtctgattgtgggtattgtccttgcagtgggactatttatcagcatactctctttctacattctgatgctcagcatttttctgcttttacaaaagaacaccgtgaaactggaaagtttgcttctgataggttacagcccttcaagagtagcactcccctatcagattcttacactaggactcaatgttgttgtactgttactatccgtcggcattgtttcgtgggcacgcacctcttatcttacgacactgaacctgttgtttccacaaatgtctgtcggatctctctggccaactttcgccataggtatatttttattcttattggtgtcttccatcaacgttattatactgaaaaagaagatgttgtcaatatggatacacaaagcataggagagattagggcataaaaaaaggagcaacgccttgctccaacctttgttaaccttaaatctaatactatgaaaaacacattgcaaagatacgtactctttggttatctgcaaataatacaagaaaaaaagtatgttttataacaccatttaagagtttaacacctgcttttcacttcctttttcatatctttgtaacgttattaataaagatatgaccatgccggactatgatctgattgccattcttggccctaccgcttcgggtaaaaccccttttgctgccgcattggccgcagagttaaatactgaaatcatcagtgccgattcacgccaaatctatcggggaatggatcttggtacaggcaaagacctggaagactacactattaacggccgacaaatcccttaccacctgatagatattgctgatccgggctataaatacaatgtatttgagtatcaacgtgatttcctgacagcttacgagactattaaacaaaaaggatgtctccccgttctatgtggagggacaggcttgtatctggagtcggtactaaaaggctatcgcctgattccagttcccgaaaaccaagagttgcgtgtacgcctggccgaaaaatcattggaagaactgactgccattttaagcagttataagacacttcacaattcgacagacgtggataccgtcaaacgggcaatccgtgctatcgaaatagaagagtattatgcaaagacaccaatagaagaacgggagttcccacaactgaacagcctgattatcggagtggacatcgaccgtgaattgcgacgggagaaaatcacccgccgccttaaacaaagactggacgacgggatggttgaagaggtacgtcgtctcctggcagagggaattcagccggatgatctgatttattatggattggaatacaaatacctgactttgtacgccattggcaaaatgacatacgatgaaatgtttaccggtctggaaactgccatccaccagtttgccaaacggcaaatgacctggtttcggggaatggaacgaagaggtttcaccattcattgggtagatgcttcactcccaatggaggaaaagattaactttgtaaagcagaaactcaaagagttttagtaactttggcgaagctcttaaccgtttttgtttcatttatcagttcgtcccgcaagtgtgggtccatgcgcccggctacccaagcccatcagtccgggaacggaggcagatgagccctcaagcgcagggcgagttaatggataaagagaaaggtaataaatagcctatgataaccggttaagtcagtgcaagtctgttgttaatatatgaatgatcggtcgtttaacaaaaagatcggtcaccatacagagaagttagaaataaaagtacgaaataataaatataatatccatgagcgtagaacctggaaaatggggtgtaatctacaatcccaaagcaggcacacgaaaggtgcagaaacggtggaaagaaataaaagagtacatggactctaagggagtgtcatacgactatgtgcagtccgagggtttcggatcggtagaacgactcgccggcattctggccaacaacggttatcgcaccatcgtagtagtgggcggagacggtgcattgaatgatgccattaacggcattatgagttcgaacgcagaaaaaaaagaagagatagccatcggtatcattcccaacggaataggaaacgactttgccagatactgggaattgaatctggaatacaaacaagcagtagactggattatcaataaccgccggaagaaaatagacgtgggttactgcaacttttacgatggcgaaaaacaccaacgacgttacttcctcaatgcagtcaatataggattaggtgcgcgtatcgtaaaaatcacggaccagaccaaacgtttctggggagtaaagttcctctcctatctggcagctctcttcctgctgatattcgaacgcaagctttatcgttcacatctcaaaattaacgacgaacacatccgcggacggattatgacagtctgtgtgggaagtgccaccggatacggacaaaccccaagtgccgtaccctataatggctggctggatgtatcggtcatctaccgtcccgagttcctgcaaatcttgtccggactgtggatgcttattcaaggacgcatattgaaccacaaagtggtgaaatcctaccgtacccgaaaagtaaaagtattgcgtgcccagaatgccgccgtcgaccttgacggacgcttgttgccacgccatttcccgattgaaataggaattatcccggaagcaaccacattgattatacccaattgataaaacataaatgttatgatagaacaactgaagaacaataaaacaggaaattttttcctgttagccggtccttgcgtcatcgaaggcgaagagatggctatgcgaattgcagaaaaaatagtaaatatcaccgataaactgggtattccctatgtatttaaaggttcataccgtaaagccaaccgttctcgcttggattcattcatgggaattggtgatgaaaaagcgttgaaagttctcgagaaagtacacaataccttcggagtgcctaccgtaaccgatattcacgcagccgatgaagcagccatggcagccgattatgtagacatcctgcagatacccgctttcctctgccgacaaacggacttactggtcgctgctgctcaaaccggaaaaacgattaatatcaaaaaaggacagttcctctctccgcttgccatgcagtttgcagcagacaaggtgatagaggccggcaacaagaacgttatgctgactgaacgtggaacaactttcggttatcaggacctggtcatcgactaccggggcataccggaaatgcaatctttcggttatccggtcatcctggatgtaactcattcattacagcaacccaaccagacgaacggtgtaacaggcggtatgccgcaattgatcgaaacggtagccaaagccggcattgccgtaggagccgacggtctctttattgagacacacgaaaatccggcagtagccaaaagcgacggtgccaatatgttgaaacttgaccggttggaaggcttattgactaaactggtgaaaattagagaagcaattatgtgatttacttcccggtaatgcgactgatagaaaaaacagtaagaaggtaattcatctcaggagatgctggaagtccggattctcaatacataaataggatctatgcactctgaaactcctgcggtgagtggaacttaaaaacagtatagcaatgaaacatttattccgtggtttacttttggttgcagtcatcttatgctgcaacttccaacaggcctttgcacagcaaatgccgcccatccctatcgacaagaacgtacgtattggaaagttggacaatggtctgacctactacatccgtaagaacaatctgcctgccaaccgggctgacttctacattgcccagaaagtgggttctattcaagaagaagaaaatcaacgcggattggcacacttcctggaacacatgtgttttaatgggacaactcacttccccggtgatgccttgaagcaatatctggagcgtatcggcgttaaattcggtgaaaacctgaacgcatatacggctatcgatgaaacggtttacaatatctccaatgtacccgtcaaaactcccggtgtagtagactcctgcctgttgattctacacgactggagcaatgacctgacactcgatccgaaagagattgataaagaacgcggcgtcatcaatgaagaatggcgtacacgcatgagtgccatgatgcgtatgcaagagaagcttctgccaatgatgtatccgggtgacaaatacgcccatagcttccccatcggcaccatggacgtagtgatgaattttaagccgcaaaccttgagagactattacgaaaaatggtatcgtcccgacttacagggaatcgtcatcgtcggtgatatcgatgtagatgccgtagaagctaaaatcaaaacaatgtttgccgacatccctgcacagcctaatgcggcagaacgtatctactatcctgtcgcagacaataaagaaccgattatctgtatcttgaaagacaaggaacagcctcatgtccaagttctactcttcaataaacacgaagcagttcccgataaccagaaaggaaatgtggactatctgatacagcaatacgccaagaatctgatcagcattatgctgaatgcacgtttgaacgaactggttcagacagccaatccaccctatatttatgcaggagcagacgatagcaacttctttgttgccaaaaccaaagatgcatttctggggatcgtggtttgcaaagaggacagcatcgaaaatggtatcgccgccatgctccgcgaattagaacgtgcccgccaattcggcttcaccgaaacagaatacaatcgtgcccgtgccgaatacttgcgtcagttggaatcttcttacaatgaacgtgacaaacagaagaacgaaaagtatgtaaatgaatatgtccgccactttcttgataacgaacctataccgggcatagagaacgaatatacaatcatcaaccagatcgcccccaatattccggtggcagcaatcaaccaattgatgaaaggactgattacagacgacaatcaggcgctggcccttttcgcacccgagaaagaggatctgaaactaccatccgaagccgctatcgcaaaactgctgaaggatgcaaaaaccgaaaagctgactgcctacgtagataaagtatcagacgaacccttgatggctgaagcgccgaaaggtggtaagattgtttcggaatcaaaagacgacatctttggagcaactactttgaccctttctaacggagtaaaagtgattataaagaaaactgatttcaaggcagatgaaatccggatgaaaggtgtcagcctgggaggtagttccgtattcccggattcggaaatcatcaatataaatggtctggatgcagtcggagtcggtggtttgggtaacttcagtgctgtaaaccttgaaaaagtgctcgccggaaagaaagcatcggttagttatgatatcgcaaacaagaccgaaagcgtttcaggaagttgttcacccaaagatttcgaaacgatgatgcaactcacttaccttacatttacagcaccgcgtagagacgatgatgcatttgcctcatataaaaatcgtaataaagccgcattaaagaatcaggaattgaatccgaatgtggccttcagcgactctatccaagccggcatctatatgaaacacccgagaatcatacgcataaaagccgacatggtggatcaaatggattacgacaagattctgtctatgtatcaggatcgcttcaaagatgcaagtgacttcacatttatctttgtcggtaacgtagatgtagagaagatgaaaccggtaattgccgaatatctgggtgcgctccccgccgttaaccgcaaagaaactttcaaagataacaaaattgaaatgcgtcaaggcatttacaagaacgagtttaccaagcagcaagagacaccgaaagcttccgttttcgctttctacaacggagattgcaaatatgacctgagaaacaacctcttgcttagcatgacaagccagattctggatttggtctacacagaaaaagtacgtgaagacgaaggaggtacatatggtgtatatgtaggcggaacgctacaaaaatatccaaaagaaaaagcaatcctgcaaatcatcttcgatacggctcccgaaaagaaagagaagctgatgaagatcattttcggagaaatcgataacataacgaaaacaggcccgtcggaagccaacttgaacaaagtgaaagaatatatgctgaaaaagcataccgaagacctgaaagaaaacagctactggctgggaagtatcgacgaatacttatataccggcatgaaccgcatgaatgattatgaaaagatagtcaatagcattacggtgaatgacatccggaaattcgctgacgacctcttcaaacagaaaaatgaagtggaagtgacaatggtcagcccggaaaagaaataataagaccttgcagcacgcagatgatgcaacccaaacagataagaagttgtattatctgcgtgctcttttttgtcgaaacttaaataaaacggtactatgctattcaatgaactacgcctgcacggcaaacttgcagccaaacgacatccgatgtacgaaaagaataaaataggcaaatacatcatgtatgcgtcctttattttctggggtgcttactttatatttattggcatcggtctggcaaaagccatcagcacagaagttcccaatatggaagcctatcatattttgaatagtggactgatatttgcgcttgccctggactttgtaatacgtttcccattccaaaaaactcctacacaagaagtaaaaccttatctgctacttccggtaaaacgaagccgtatactcgactttctgcttctccgccacgggctcagttctttcaatcttatctggctgttcctgttcgtgccgttcgcagcactcacagtctttcctttttatggaatatcaggagttctcacttacagcatcggcatttggttactgatggttttcaacggatattggtatctgctttgccgtacgctgattaacgaacatatttggtgggtggtacttcccatcgttgtctacagtggaatcgccatcgctatttttattcccaaaacgggatttataagtaactttttcatgaacctgggagaaggttatatcgaaggaaatctacttgcttacctgggtacattggcagccactgttctggtatggtgtatcaaccgtaaagtgatgaccggtttaatatacaacgaaatcaataaagtagaagacacaaaagtaaaaaccgtatccgaataccgtttcctggaacgcttcggagaggtaggcgaatatatgcgtctggaattgaagatgcttctacgcaacaaacgctgtaaggcctcactccggtcggtagcaatgctcgtaatcatcttctctatcatactgagtttcagcagtacgtatgaccacatgaagagttttgtccaggtatactccttccttggattcggtatggtgattctgatacaacttatgggatttgaaggaaactatatcgacggactgatgactcgcaaagaatccatcaaaagcctgttgacagccaaatattatatctatagcttggcggaaatcattccgctgatcctgctgataccggcttttgtgatgggaaaagccagcctgctgggtgctgtcgcactaatctttctgacaacaggtcctgtctattgcatcttgttccaactggcggtatacaaccataaaaccgtaccaatcaatgaaagcatcacaggcaaacaaagtatgaataccggaatgcagatgttaatcagtttcggacttttcatcgtaccaaccacactctatggcacgctccccatgctgctgggacaaacatgggcctacattgtcatattaatcatcggattaggcttcaccttgacctcccctatgtggataaacaatgtatatgtccgtttcatgcaacgccgttacgaaaacatggaaggattcagagacagtaaataacgattcaacatttattttatagaaaaagaatatgattaccatacataacctccggaaaaacttcggaacccaaacagccgtcgatatcgagaattatacaatcaatcagggagagatggtcggcctggtgggtaacaatggagccggaaaaacaactttgttccgtttaatgctggacctgctgaaagctgataccggtgaaatcattatcaacgacattcatgtgaaccaaagcgaagactggaaaagttttaccggtgcatttatcgatgacggattcctgatcagttacctgactccggaagaatatttctattttatcggtaaaatgtacggactcaaaaaagaagaagtggatgaacgcctgatccccttcgaacgttttatgaacggggaagtattgagacaaaagaagtttatccgtaacttctcggcgggcaataagcagaagatcggtatcgtgtcggccatgctacattatccgaaactgatcattctggacgaaccgtttaattttctggacccaagttcacaatccgtcattaaacatctgctgaaaaagtataatgaggaacataatgccacggtcattatttcgagccataacctgaaccatacggtggatgtctgtcctcgtattgccgtgcttgagcatggagtcattatccgtgaccttgtaaacgaaaacaattcggcagaaaaagaactggaagattattttaatgtagaagaagaatgaatgtatgaagaaacacctttttaatctgttacttttcaccgtcttagttatcggcctgagtggctgccgcacctctgctcccaaactagactataagaaattggcccgtgcttctgtacgcttgggcgtagacatcggaatggaggataaccataaactctacctggaagcagccgaatggataggtactccctaccggggaggcggagagaccaaacgtggcacagactgctcgggaatgacctgccagatttataaaaaggtatatcatatcaaactgcaacgaagcacagacggtcagaagaaagagagcagtaaagttgcccggcgaaatcttcgggaaggtgatctggtatttttcagtagccggaaatcgcgcagaaaagtggcacacgtgggcatctatctcaaagacggaaagtttgttcatgccagcaccagccagggagtcattgtcagcagtctcaatgaaccctattaccggactcactggatatcgggaggcagagtacgcaaataacctttattgaaataaaaaattcactatctttgccgaaaattccgcaaatgaaatacactgtttatttattcgactttgactatacactggcagactcttcgcgtggcatcgtaacctgcttcagaagcgtactcgagagacatggctacaccggtatcactgatgatatgatcaaacgcaccattgggaaaacgcttgaagaatcgttcagcatccttacgggaattactgacgccgaccaactggaatcattcagacaagagtattccaaagaggcagatatatacatgaatgcaaataccattcttttcccggatactctccccacgcttacacacctgaaaaaacagggaatccgtatcggaatcatttcaaccaaataccgattccggatactgagtttcctgagaaatcacatgccggatgattggtttgacatcattatcggaggtgaagatgtgacacatcataaacccgatcctgaaggtttgctacttgccatcgaccgattgaaggcatgccccgaagaagtattatacatcggtgacagtacagtggatgcaggaacagccgccgctgccggagtttcttttaccggtgttaccagcggtatgactaccgcccaagagtttcaggcctatccctacgacagaatcatcagtactcttggccagctaatctccgttccggaagacaaatccggctgtccactctgaacaatccaaccggatgacatccgttcatcgaataacagtacaaaaagaaagtaaatatctgtttttcataacagagtccttgtccgtttccgacacccggagagaagaaaaaagccaaatggagactttagaggccgaaaagacgggcttccgggctcggaaagcctgacttttcgcaaaaagaagcaagcatttggccgaaaagacgtaagcattcaccgaaaatgtccttatgttttggaaatatctcctattgttttcccaaatatctcctattgttattccaaatccggtctgaaagggacactccgtcttccggttggcaaccgcaggcagagctttctgaagtgacaaaaaaatcggaatgcaatcccatccgaagcactttcaccaccgacacgactttttcctttccttgtgcgtaccatcaatcaaaagccccaagatatatgtcatcgggaaaaaccttcagaacgcgtttttttcacccaggcaagcatcccgtccgaaataaacgattctgaggagtcccgattatcaaagtgacaaaatgaataaagccacatcccatttaataatcaaccttctaactgcccctacccgaaagaagaaaaagagcaaaataacatactgcaaacaaaaaagaaaaagaaaaacttgtccgaaacaaataaaagcagtaattttgtgccctgattattccgcaccgggtttgagcaagtgttttttaagtgattaaagaccacccgacggagctaacttacatttatttatataagatgtacgcaattgtagaaatcaacggtcagcaatttaaagctgaagctggccagaaattgttcgttcaccacattcagaatgcagagaacggtgcaacagtagaatttgacaaagttcttttggtagacaaagacggaaacgttactgtaggtgctcctactgtagacggtgcaaaagtagtttgccagattgtttcaagcctggttaaaggtgacaaagttcttgttttccacaagaaaagaagaaaaggtcacagaaagttgaacggtcaccgtcagcagttcacagagttaacaatcacagaagtagtagcttaatcaattttaaaagtaagaagaaatggcacataagaaaggtgtcggtagttctaagaacggccgcgaatcacagagcaaaagattaggcgttaagatatttggtggcgaagcttgcaaagcaggtaacatcatcgttcgtcaaagaggtactgaattccacccgggtgaaaacatcggtatgggtaaggaccacactcttttcgctttagtagatggaactgtaaacttcaaagtaggtagagaagacagaagatatgtttctatcatccctgttgaagcaacagaagcataaatttccggagtttaaaggaaattgtaagaaattgaagaaagagatgcaatcggttgattgcgtctcttttcttttttatacaagacgcaccctcttatcttatttttatatatctttgtaaactcaaagaagaaagttcataaataaagtatagatatgcttaccattaaacaaattacagaaaacaccgacgcggtaatccgcggtctggagaaaaaacacttcaaaggagccaaagaaacaattgcccaagtaatcgaagtgaatgacaaaagacgtaatacacaaaatcaattagataaaaacctggcagaggtaaattcactttcgaaaacgatcggtcagttgatgaaagaaggcaaaaaggaagaagctgaagttgcaaaagcccgtgtagccgagataaaggagagcaataaaacactgcaggccgacatggaccaggctgccaacgacatgctgaatctgctgtataccattcccaatattccctacgacagtgtgcccgaaggtgttggtgccgaggacaatgtagttgagaaaatgggaggtatggaaactcaacttcccacagatgcactcccccattgggaactggctaagaaatacgacttgattgactttgatttgggtgtaaaaataaccggtgcaggttttcctgtttacaaaggcaaaggagctcaactgcaacgcgcactgattaactttttcctggatgaagcacgtaaatccggatataccgaaatcatgcctccaacagttgtaaacgctgcttccggctatggaaccggacaacttccggataaagaaggacaaatgtaccattgcgaagtagacgatctctatctgattccgacggctgaagttccggtaactaatatctaccgtgacgtcattttggatgaaaagcaacttcctattaaaaactgcgcttatacacaatgcttccgtcgggaagccggctcttacggtaaagatgtacgcgggctcaatcgccttcacgaattctctaaagtagaattggtgcgtatcgacaaaccggagcactcccgtcagtcacatcaggaaatgctggatcatgtagaaggcctgctccagaagttggaactcccttaccgtattctccgtctctgtggtggtgatatgagttttaccgctgcgctttgctttgatttcgaagtatattccgaagcacagaagcgctggttggaagtcagctctgtatctaacttcgatacttaccaagccaaccgattaaaatgccgctatcgtagcggagaaaagaaaaccgaactttgccacacactgaacggatcggcactggcattgccccgcatcgtagcagccttgctggaaaaccatcagactccggagggtatccggattccgaaagcattggttccctactgcggatttgacatgatcgactgacatagaagaaaagataaaagagggtgtgctgaactcgtattcaccacagaattgcacggatttacatagatagacaacattggttatcagcatattaaaaaacgttctgtgtaaatctgtgttatctgtagcgagttatgacacccccttcttttttgtaataaaacacactttttactaacctcaaaactcctattttatgagctctactcaaaaaaactttgctctgccgttagcatttatcggcatcatgttcttcgccatcggattcgcattaggaatcaattctgtacttattccggtattacaaggttctttaggcatcacttcagccgaatcttacctgataatcgctgccactttcgtacctttcctcatcttcggctatccggcttcgatgactatcaaagctatcggatacaaacacaccatggcactttcgtttgccatgttcgctgtagctttcggtttgtacattccatcggccagccaggagagttttcctctttttctggtagcctcttttgtcagcggcacggcaaacgcattcttacaagcatctgttaacccctatattactattctcggcccattggacagtgcagccaaacgtatcagcatcatgggcatctgtaataagttagcatggccaattcctcctttgttcctcgctttcctgataggcaaggaagtgagcgacattaccgtatcggacttattcactcccttttatgttattattgcagcatttattatattaggcatcatctcactgatggctccgctgcctgaagtaaaagcagccggcgaggacgacagtgaaggaggtgccgaggcatgtccgtatgcggccagcaaaacctcagtatggcaatttccgcaccttttgttgggatgtcttgccctcttcctctacgtaggcgtagaaacggtttcactgggaaccctcgttgactatgccaacagcctgcatttggagaatgccgcagcttatgcctggattgctccgatcggtatcgtgatcggatatatctgcggtatcatctttatacccaaatacatcaatcaggctacagcattaaaaatatgctcaatcctcgccattgccggttcaattctggtagtactcaccccggctgacatctcaatctatttcattgcattcatagcactgggttgctcactgatgtggcccgcactgtggccacttgccatggcagatttaggtaagttcaccaaagccggctcttctctgttgattatggctatggccggaggtgctgtcatccctactctgttcggatacataaaagacatagcgggagcacaaaatgcttattggatttgtctcccatgtttcctcttcattctttattatggaatggccggatataaaatcagaacaaaataaaacaaactgatttacactgataataaagccatcccctcaaaaggatggcttttcttttgttttttacaaattagcagtatctttgcacactaagaacattctgatagcaattacgtaataaatccaacaaattaattagataatgaacaaaatcattagcaaagaacacttttcggagaaagtattcaaacttgtcattgaagctccgttgatagcaaaatcacgcaaagcaggtcatttcgtgattgtgcgtgtcggtgaaaagggagaacggatgccactgaccattgcagccgccgacccgaaggcaggaacgatcaccctggttgttcaggaagtagggctctcttctacccgcctttgcgaactaaacgaaggagactatatcaccgacgtagtaggtccattgggacaagctacccacattgaaaacttcggaacagtagtatgtgccggaggtggcgtaggtgtagctccgatgctacccatcgtacaggccctgaaggcagccggaaaccgtgtgatcaccgtactggcaggacgtagcaaagaactgatcattcttgaaaaagaaatgcgtgaaagttcggacgaagtgatcataatgaccgatgacggatcatacggtcgcaaaggcttggttaccgaaggagtagaagaagtaatcaaacgggagaaagtgaacaaatgttttgctatcggcccggctatcatgatgaaatttgtttgtttgctgacgaagaaatatgaaattccgacagaagtatcattaaatacaattatggtggatggcaccggaatgtgcggcgcctgccgtattactatcggaggaaagaccaaattcgtatgtgtcgacggtccggaatttgacggtcaccaagtggacttcgatgaaatgttgaagcgcatgggagctttcaaaaccatcgaacgtgaagagttgcataaactcgatgaatgtgaagcaaccaaagtcatagacgaaaacggacgtacagccccttggcgcgaagcactccgtaaagctatcaaagctaaagaccgtgcgaacattgaacgctgccaaatgaacgaactcgatccggaataccggtcacacagccgtaaagaagaagtcaatcaagggctgactaaagagcaggcagttgcggaggcacagcgctgtctggattgtgccaacccaggctgtatgacaggttgcccggtaggcatcgacattccccgtttcatcaagaacatagaacgtggagaattccttgaagcagccaaaacactgaaagagaccagtgccctgcctgccgtatgtggtcgtgtatgtccacaggaaaaacaatgcgaatcaaaatgtatccatctgaaaatgggcaaagaagccgtagccattggtcacctggaaagatttgctgccgactacgaacgagaaagcggacaaatctccgtacctaaagtaggcgagaaaaacggtatcaaagtggctgttatcggttccggtcctgccggactatcctttgcaggggatatggccaaatatggatatgatgtaacggtattcgaggcgctacatgaaattggcggtgtactgaaatatggtattcccgaattccgtctacccaacaaaatagtagacgtcgagattgagaaccttgccaaaatgggagttacattcatcaaagactgcattgtagggaaaacgatcagcgtagaacagttggaagaagaaggttttaagggaatttttgtagcctcaggagccggacttcccaactttatgaacatcccgggtgagaactcgatcaacatcatgtcttccaacgaatatctgactcgtgtaaatctgatggatgcagccagtcccgattccgatactccggtagccttcggaaagaacgtagctgtgattggtggcggcaacactgccatggactctgtccgtacagccaaacgtcttggagccgaacgggctatgatcatctatcgccgttcagaagaagaaatgccagcacgtctggaagaagtgaaacatgccaaagaagaaggtatagagttcctgaccttacacaacccaatcgaatatctggcagacgagcaaggacgtgtcaaacaagtaatcttgcaaaagatggaattgggtgaaccggatgcctccggacgacgtagccccgtccccatcccaggagcaacagaaaccgttgatatcgatctcgccattgtcagtgtcggggtatctcccaatcctatcgtccccagttctatcaaaggtctggaattgggccgtaaaggaacaatcactgttaacgatcagatgcaatcgtctattcccactatttatgcgggaggagatattgtacgcggaggagctactgtcatccttgccatgggagacggacgccgtgccgcagcagcaatgaacgaacaattgagttccaagtagaagtataaagtcggggggatgttcaaaactcgtattcaccacagagtatgtggtgagttatggacaccctcctaacaatttattctccggaccggatattcacaataatcgatcctaataaaaaatccctgctaaattggataattagcagggattttcatattccacaattgaacgatttcttacttcactacactatttgtagccggatccggaaaaataacagtcggcttaaacgacttagcttcctcaaaatccatcaacgcatacgacataatgatcacaatatcatccggttgtactttacgggccgcagcgccattcaagcagattttacctgatccgcgttcacctttgataatgtaggtctcaaaacgctcgccgttattattgtcggcaatgtacaccttctcaccggcaatcatattagctgcatccaatagattctcatcaatcgtaatactacccatataattcagattggcttccgtgacacgggcacaatgaatttttgacttcaacacttcaatcatcataaggggttcgtcttttttaagtttaagattctttgtatttaatattatcaatcagtctgacatcaccgcagaacactgttatacagcccactacatacgatgtttggttccaattatcaaccttctgcaaagtgtttccgtctactatctcaaaatactccagacgcaatcccggaacagcagcaatagcatcttccacaaacttcagcgtttcactcactgtgtgagtggctgcaaaggtacgacttttaaataaggtctgagatatttttaatgcattttcacgttcttctgccgacagacgcgcattccggctgctcagagccaaaccatcttcttcacgaacaataggacaacctactatttcaagatcaaactgcatctgacgaaccatctcacggatgatagccaattgctgaaaatctttctcaccaaagtatgcacgatgtggtttcaccgcttcgaacagtttacttactatctggcatactccattaaagtgtcccggacggaaagccccctccattacagtatccaaaggagcataactgaattggcgggtatccggctccggatacatctcttccaccgaaggagcaaaagcataagtcgctccacaagcctcgagcaatttacaatcggcatccagtgtgcgaggatacttaacaagatcatttttatcattaaactgggtagggttcacaaaaacacttaccaccgttacttcattctcgtttacactacgctttacaagagatgcgtgccctgcatgcaaagcacccatagtaggcaccaaccccacctttttaccctgggctttcaaaaccgaaagttcagcctgcaagtccttgatcgtatgtattactttcattttaattggtttatgattcttagttgtttgaaaaacggtgcaaaataaaccataatttaccatataaagaagaaatatcgtaaattaatgcaaaagaagacgaaggagagtcctaagcaacaggacggtttatcactgaaaaacaagcacttaacaattcataaggaattataccgccagagaacttgctttaatgcccgtttttttttatatctttgcagaatatttacgagaacgattgttattatgacaaaggctaacaaggttttatttattacacaagagattactccttacgtttcagaatccgagatggccaatataggcagacatctaccacaagctatccaggaaaaaggcagagaaatcagaacatttatgcccaaatgggggaatatcaacgaacgcagaaatcaattgcacgaagtgatacgtctttccggcatgaacctgatcatcgacgacaccgaccatccacttattatcaaagtagcttctatccagtcagcacgtatgcaggtttatttcatcgataacgatgattattttcagaaccggctgcagacagctgatgaaaacggggttgaatacgatgataatgatagccgggctatcttctatgccagaggagtgctggaaacggtaaagaaattgcgttggtgtccggacgttattcactgtcatggctggatgacggcattagcccctttgtatataaagaaagcgtataaagacgaaccttcgttccgcgatgcaaaagtagtattctccgtatacgaagatgatttcaaaggtacattcaacaatgactttgcaagcaaactgatgctaaagggtattaataaaaaagatgtagctaccctgaaagatccggtagattatgctacactttgcaaattagctgtcgattactcggacggaatagtacagaatagtgaacatgtaaatgaagatgtcatgaactacgcgcgtcaatcgggcaaattggttcttgactatcaagctcccgatgctcttgcagatgcttgcaacagtttctacgatcaagtgtgggaagctgaacaaaaataaataagaacctagatacgacgatcatgaaagcaaaatatgtatgggtagcactgcttgccttgactttcttcggatgcgatgataatacaggtactatcggatgggatatgctcccggatagcgaccaaaatatcaatggaagatatacgacttacgagttaactacgaattccgacctatcaggtcctgtttttgccaaaaccagcgtaggttatgtgggaaaattcactgataaagaattcggagaatacgaagccagtttcctcgcacagttgaatagtccggatggaatttcttttccttcggtctacgatccggaaactaatcccaaaggggtaatggcaggagactctattcacaccgctgaattgatcttatactataaaagttattttggagactctatcaatccatgccgaatgactgtttatgaactggacgaaaacttgacccagaactattatacagacatcgatccattgaagtattacaatcccaacaacttactcgcacgaaaagcctacacagctgttgaccaatcactcagcgattccatcagaaactcagatgacttttatcctaatgtccgtctaacttctgaagagatcaccaaactaggtaaacgtatctatcgtttgaacagagatcaccctgaatattttaaaacttcggaagcatttattaataacgtattcaaaggtatttatgccaagaatgactatggtaacggaacgattctttatgttgaccagatcaacctgaatgttgtaatccgatgccacgaaaaagacagcttgggaaataatctgaagaaaaaaaatggtgctgactctttatactatacaacccgtactttcgctacaaccaaggaagtaattcaagccaataagtttgttaattctgaaaagctaaacgaaatcgctaaaaagacagactgtacttatttgaagtctccggccggtatcttcacacaagctacattgccgatcaataagatttatgaagaattaagccatgacaccattaatgcagtgaaactgactttcaatagctacaaccaaccggacaatgggaaatttagtatgaaagcacctacatatgtgttacttttacgtgagaaagaacggcaaagtttcttcgaagagaacaaacttacagataacatcacttcttatctggccgtgcacaatgctactatttccaataaacctacaaccaatcagtatgtgtttaccaacttgactcgcttgattaatgcatgtgtcaacgaaaagcaggaagccaagaaaaaagcaggagacagttggaacgaagcagcttgggaagcagcaaatccggattggaataaagtggtacttatcccggtactggtacagtatgatagctcttccaataagaatatgatcagcatccagcacgatctacaaccgggatacgtaaaactggaaggtggtccggacggtacgaaactgaagttagaagtaacttataccaacttcaacggtaagcagtaacaaaatattctcagtatataatacaattaaggcgatgtaaatgattctttatttacatcgccttaatttttatggtctcattctccttatgttttatgtaaaaaataacaagatgtggcaaactaaagcagagacgcctctttctccataaaatagaaagaggttgtctccaaagtctgctccttaccttttcaactcactgcttgtaaatctacaaagaaatatcatttaaaaaatttggactattacccttcttatcaagagataagggtcattttatgccttttacttttaaactgtaaataacagtaaggggctatccaacttttttggacagcccctttccaccgctttagtttacgctaaagcatgttcttgaatcatattaatcttctttttttgccgttgctttctttgcagcaggtttcttcgcagcggcctttttaggtgcagctttgggttcggcctttactgtttttgcagccttttccgcttttgcctgcaacctatcaacctccttatgtaattcggcgatctcttctccctggttcttgatagttgtcaacaatgaattcaactcttcattatcgatatcctcaggatagagagaatttacacgtttaatgaaatcccccaagatattcatatagttagtaaaggcatcataaggagaatcataaataccacgattcagccacacaccggtattcttggtcgtcataaaacggaagttattgctggcttgcagataatcccaatcctgcttgatacgacgatcatcgcaaaggtgtacacgttcagccacactgtataatttgctgaaagcttcacgctgcaaaacattacccagccagctgctcgtatctctttcttcgtctacccacgacattggatatggtacatccaattgggaaacggatttcaatttcgaaataatctccgatggggtagagaaagtaatgcccttttcttttgcacaataaggaagtgccttcaagaactccaaaatattggatgataatggctgcgccatacccaatgctttcagttccataaagatattgatcacttgttcttcttgtggtaaagcatcaatccaaccgataaacttatcggcaaataaaggatactcactccaatcagagttagagaagcgcaaactgatatcatccgataacttgaagtctcttaataacaatttcagacttggagcctgattgcaatgatacacgtaatgcggactcttccaacccaaaacgtgtttagcaccttcggtcagcatgcctttgaaacccatgctagccaccgtagcacctatttcatccgaataaatcaaactggagttacggaacactttcggagctttaccaaacatctgtttcatcttttcgctctgacgcattacctcttcacggaaacagtcttcattggccaatgacgataagccatgagagtatggctctgccaggaattcacagcaacccatatcgtttaatatatgtaacaggtcaattacggcaggtgcatgaatttcgagctgttccaatgctactcccgaaatagaaagggctactttaaatgctcctccggaattcttcaccatttcaatcaatgtattgagagccggaatataagaacgttcggcaacctcattaatacctgtctcattggcataatcatcatagtaataatggtcggcaccaatgtcgaagaagcggtaacgtttcagatgaataatttgatgtatctcaaaataaagacagattgttctcatatctatattgttttattgttttccataattttttataacctcgtcgtagatgccgcgaaccttgtagcctacgttctcccactttatttcgtccacctctttcttaccttcatcacggagatactcgtacatagccggataggtacagatagaataaatagcatctgccatagcgtggatatcccagtaatcggtcttgatacatttttccaagatctcggcacaaccggattgtttggaaataatgcttggtacgctacactgcatagcctccaacggagaaataccaaaaggttcggataccgaaggcataatgtatacatcactggccttcaagacttcatatacttgcttccctttcatgaatcccggaaaatggaaacgatcggcaatgcctctttcagctgccaaacggatcatctgatccatcatatcaccactaccggccatcacaaaacgtacattccgcgtacgctgcaataccatcgcagctgcctctacaaaatactcaggacctttttgcattgtaatacgtcccaagaaggtaaccaccttttctttcgggttcttattaggtacaatatcctgtatctcttgcgaaagaggagaaactgcattgtgcacagttgatactttcttcggatcctggaaatatttatggattactgtttgacgagttaattcactcacacacataatatgatcggcatgatccataccatttttctcaatggcataaactgtggggttcacattaccacgactacggtcaaagtcagtagcatgtacgtgaatcaccaatggtttgcccgatacctgttttgcatgaataccggccggataagtcaaccagtcatgtgagtgtataatttcaaactcctgttgccgtgctataactcctgcaacaattgagtagttattgatttcctcatgtaagttatccggataacgccctgaaaattcaatgcatcccagatcatttgcattcagataattgaaatcagcataaatatgatcgcgcaagtcaaaatataattgaggatccatgtaagagcctacacgccctttgacatattcccaatctacatccctccacacaatcggtgtactgttcataccgattattctcagaaaactctggtcttcgtcaccccaaggcttgggaatacaaaatgtaatctccatatcctcttgttgagacataccttttgtcaaaccatagctggcagttcctaaacctcctaagatatgcggggggaactcccatccaaacattaaaactttcatcttcgtccctcctcctataaattatatttagacaacagcttcaagatacgtaaaatctccgccacattcattgcaaacgatactgctccacgccctttaaaaggtggatttccgtcgaacaattccggcaacgaaccaacacagtggctggtcatctcgtcttcaagtccaatcaactgacgctctacaaacgaaattccactcatcttatagattcgcagatacgcctccatgtagaatcccatcagccatggccaagccgtaccctgatgataagcatagtctctctggatttgaggacctacataattcggattatatccgccgctcttcggactcaatgttcggagtcccttcggagtaagtaattccttcgtcacaatatcgagtacttgtttcttttgcacccggtcaagaggagaataatcgaaggcaaccgtaaatatcatgttggggcgtacgctccaatccatcatatttccgtctacataatccaacagataaccatattcattacgaaagacttccacaaaagactttccggttacctcagcctgtgcatccagtgaatctgccagcaatccattaccgccttcacgaactaagtcggcaataaaacgcaaggcattgtaccacaaagcatttatctctacgatataacctgtacgcggaataaccggacgtccgttaaccgtggaattcatccatgtgatcgccctatctgcaccattggcatacaacaacccgttttcgtgcaagaacagattatcatgtttgcgctgacgaataaaatcgatgatttcttctaacaaagaaccatatttggcacgacattgttcacgacttgtttcctttgcatattgttgcagagcccatacggcccataataatacgtcaggatcatccatctcgtagattttacagcctatcggttcacctttaatgtagttattgatcgctttgcgggcagtttccatcacgtcttcaaattcacctatctcatctacagcaagcgtcaatccgggcagcgatacaaacatatcccgggcacgacatttaaaccagggatatccggccaaaatataatggtcctcttcctgcttgttatggaattgatgggcggaattctttaaacaatgatagaaactatcacgtggcgtacggtcggcaacttccgcctcaaaagtttgtttcaatctgcggggagaaatttcagaaataccggcagagaaaattatactttctcctttctttatatcgacttcaaaatatccgggaacataaaggtcttcattgaaatcatatcctctctcctgttctttcggatattcaattcctctataccaattcggttcataatggaattcgtttttcttattcaactgcatgaacaattccggatagcccggatacatgcaagtcttaatgccgttttctactaactggtagtcacgactcgcctgcgaattctcgtgggtatattcgcgtacactacggaaagcaaggaacggacgaaaacgaagagtggtagctgagtgtgcatcgaccaaggtataacggatcagaatccggttctcatgatgtacaaagattttctctttgcgaagtatgactcctcccacacggtaagttgttgccggaatatgttcacagtcaaactcacggatatacttatgtccattggggctaaagtgatttccttgatatttatgcaatcccaggttaaactcagcaccgtgttgaattaccgtttcatccaaagaagatagcagcacatgattttcatcgtccagattgggtacgggaatcaccagcaatccatgatatttgcgtgtgttacaatctacaatcgttgtacaatgataagctcctgatttgttcgtccggagaatctcccttggtaaagattcctcaagatttatcatcagggtcttgtcaaaatgtaaataactcatagttgtgcattatttaaaggttaattatttcggttatcatagtatataatataagtatgatgcccaaaaatacgaattaaaggtaaataacaaaataaaaagggactttattttttattttcagggcaaatattcgtagcattgtataaaatttaaagaaatatgctaatatgaggccagaaattcgacaaatcctgctgacaatggtacttccgctgtttctaatttttatcctctacatgataaaggttttagagataggtatggactgggactttatcagtttaggagtataccctttgtcaaaaaaaggtatgtttggtattttcactcatcctcttatacatagcagcttcaaacatttattgaccaacactttaccactattcttcctttcatggtgtcttttttacttttatagaagcatagctccctctatttttcttataatctggataggatgtggagccattacattccttatcggcaagcctgcctggcatatcggtgccagcggtattatctatggactggctttctttcttttcttcagcggactgttacgaaaatatatccccttgattgccatatctctattagttacctttctctatggaggtcttatatggaatatgctcccctattttacaccatccggcatttcgtgggaagggcatttaagcggagctatcataggtaccatctgtgctttttcttttatgggttacggcccgcaaaagccggaccctttcgcaaatgaacaagaagaggaatccgtctcagcaacagatgaaacagataatatcgaaatggataaagaagaagaacacgaaatcgatgcagaatagactcatcttacattatcacaatgtaacaaatggccggttacttctgcaatgcggcaatcaataatgtaatatttgcagtaaacagcctgacagaaatagccaacaaaatgataccgaaaaacttacggataatatagatgccacctttccccagaaaacgctccacacgccctgtcatactaacgacaaaataaacccatagcatattcaggatcaaagcaattacaatattgatactggcatactcggcccgtaatgaaagtagtgtagtaaatgcaccggcaccggccaacaacgggaatactaaaggcaccagcgttgcctcttttatcggcccctgattcttaaaaatttccacatctaagatcatttccagtgacatcaggaaaatgacaaatgcgcctgcaacagcaaaagattcaatatctacatgaaacagtttcaacataaagtcacccgcatagaaaaagccaatcatcagtgcaaacgaaataacggttgctttcgtagcatttacgtccttccctttctctttcagattgatgataataggaatagaaccaatgatatcaatcacagcaaaaagtacgataaacgcactgaccatctgttgaaaattaaagtttgcaaacatgacttcctccttttttgtgcaaatatacttcatttttatgcattccgcaagagattgttttatgtaatcactaccatctttaagaaataataaaaaaaacaaaaagatagggaggatggtttcagccaacccctataatcgttacatttgctttcaaattagaagattacgatatatggaaaccatgttcgacaccttgttgcaactccccctttttcagggactttgtcatgaggatttcactaatatattagaaaaagtaaaacttcacttcactcgtcacaaacccggagaaccattgataaaaagtggtgaggtctgtgatcagttacttttcttgctaaaaggcaggctctcttccgtcaccgtatcggaagacgacacgctgactgttattgaatatttcgaagctcctgccgtattagagccttactccatgtttggaatgaatacccggtatatatcttcctatattccgcataatgaagaagcgcaaatggtaagtatcagtaaatcgtttgtcatgggcgagttgttcaaatatgatatttttcgtcttaactatatgaacatcgtcagcaatcgtgcgcaaaatctctatacacgcttatgggataaagctcccaaagacattgaagacaaaataatccgtttcattttgggacacattgagagaatgacaggtgagaagctgttcaaggtaaaaatggatgatttggcccgcatgttggacgacacccgcctgaatgtatcaaaagctctcaacggactgcaagaattaaatttgttggaacttcaccggaaagaaatccgcatacccgatttatcactcctgacagaatggaacgagaaacgataaatttccggtagtctatcgatcattctgttccatattagtcatcactctcacagaatctactctacaggcattgtgtcccagcaaacgataaacaacaatttgcctgtcgagtctctgataaacaagtcccgatccttttaaaaccttttccattaccttttgaatgggttcttccgtaacacaaatactgatttcctcatgaatctcgttgtcgatatcgcaggaccatgcaaagacaaaatcacttttttgctcgatttcatcaaaaatccggatcatcggtatacgtttcagactaaaagaaaatttccagtccggcatcttgccgtcctccgacggtaaagctgccccgttacagcacataatgaaaataaaaccaaacaatactctatattttattctctgtctatcaatgttttcagttcttactatacgttctcttttcatgctttgttccagttgttataatacttagtttcaggccattgcatcccttcccggagggcataatcatgcttcccggctctgatacgtagtcgtgtgtgtaagttagaggaaggatatcactctatccttttcgtgggggttgtgtgtgcgtatgtcatagtgttcagtgtcattccataggctctaccattttatgggttctcagatataaaaatagtccgttcttctttcctgtaatcagtagaatacagcaatgatatagttgtcaatacattatctatattatcggataaataaatttttcctgaacacttcctaccggtcagccgcttcttatcgccgaagctaaacgatagattataatatctccctatccggttcagtacatccatgatattggcatcatccaattccagatagccttctttccaacaagtatatctggacgcactcacttttcttttttcaaatcgcttgccatcataaagcactttttcgtttgtcttcatgcgtatttcaggaccggattccggacggaatccgactattccatctacaagtacacacgaaggagtcggttcatcttcataagccgatatattgaaacgcgttccatatacctgtatatcaaaatgggccgtatgcacgataaacggttttttactatctgccgtaacttcggcatacatttcacccttcaagcttacttcccgtttctctcccgagaaatgagtaggaaacttaagtaccgaaccggaattcagccagatttccgttccatcttccagtttaaccttcgatcgtttaccataaggaaccaccagttcattaacctcgtcctgttccattctgattcgcttctgcccgctattaggatgatataccatagctgatccatccttgctcaagagcaattgcacgttttgccggaacgaagttatgctatcaccgctaaccagacgaatatcttccgacttcaaaggttgccagacaatctctgcttttttttcgacaacagacggcacaggttccactctctcataatgattcagataagcaacaattcctaatgcaataatgacgcatacggatacaccataataagctaccctcctgaccgttcttttccgacgtaacatacgcagcgaaacatggattcgctgacgcaggcgttcatagtcatctttcgagaggtgttcttgattcatccgaacgctcttgaattttaaccactggaagaacttttcttcgtctttcaaaggatcaatatgtctgctatcccgcttcgttttttccattcagaacaggtgctttaagagtttaataacactattgtctgcatagaacacgaacgggcgcaggtttcatgcccacttttcccgaataaaatttaaaatggtgccttatttaaccaacattaatagaaagtaagagatagaagagcactaatgtgttattgtgcttcagtttaagtaaggtccgatagagcaatttacgacaggcaggaacactgatttgcataatctctgcaatttcctcataagaacattcctgcatataacgtaaataaataatctcgcgctggcgttcggtaagtatactcagaatctcgtcaactttctgtgatacttccgcctgctcttccgctgcgattatttcatcctctacggtaattttgattttatatggaagttcatcggtaatctcaccggtaagaacctccgagtagtttcgtttgagtttataggtgtcaatcaactggttccgcagggcacgcaacaagtaaaatttaggattctgtatctcctgcacttctctttctcggatacataccctgcaaaacacatcatgaatggcatccatcgctgtctgtttgtcaaacccgaatcccaaagcatacgaaaacaagtcgtcaacatagtccttataaagactatcaaccgtatgtttcgctctctcttcttccaggttttttttctttggcagcattgtataaagtttgtaaatgataaatttagcttttcagggcctgtatgatatcgtccaacaagtcatcagcccgctccagccccaccgaaaggcgaatggttttctggctgacatccatacctcgacgctggtcctcggtaaacgaaccgtagattgtacttgccggatggatagctaacgttttattatcaaataagttcgttgccctacgtatgattctcaaccgatttatgaaacgaaaacatatctcacgcgacggaagatcaaacgtcaacatcgctcccggaagagaaccaaactggcgggtactcaattcataaaacggattagattccaatccggtatagttcaccgactcaatctcaggcagttcttgcaaacattgtgccagtttcaggcaggtttctgcctgacgagcaaaccgtacttccatcgtttcaagtccgagtgtctgcatataagccacctgcggggtcatatatgctccaagattacggtgaacctcttttctgagtttgacagtaaaagcctccttcccggtatctgcactcagagcagccaacttagcggaatgctcccagtcaaaagtgccgtaatctataatcagtcctcctatacaggtagctcctcccgaaatatatttcgtactggacacaatctcgatatcaactccgaagtcagtcgcatggaatacatggaaaggaatcgctgtcgtatctgccagcaacggtactccggccttatgtgctatgtcggcaagagccttcagatcggccacttccaactgcggattggtaataacttccaaaaaaagcgcacaagtatctccatcaatctgttgcttcacttcttcgggacatgtcaggtcacagaagcgtacttctaccccaaaagcttccaatgtacttttcaggaatgaataggtattgccaaataaatgtgtcgaagtcaccacattagctcccgcgcttgccagtgtgatcaaagcattgcttatcgcagccatcccggagttcaaagctgtcacactcagcgctccggtcactctttgcacacgctgctcaaagtactgtaccgtaggatttgttatgcgtgaataagcatgccctgctttctgcccacagaaagcagcttccatctcttctgcagtctcaaattcgtaggcagcagtgtggtacaccggcattgaaagagaatgatatgcatcctctttttcaaaaggagtatgcaatatttgtgtctcaaaactattttttttcatcctgaaagtctttttatataaattccacaaattatgctattgtgtcatgcttcaactcgtatgcctcctttatctgatccagtgcctgtcttagcacactccgcggacaagccacattaagccgcataaatccctcgccttccttaccgaacatagcgccatcgtttaatgccagatgtgcaccgtcaacaaaaaagtcaactaattctttctgcgaaacacccataccgcgacagtccagaaaaatcagataagaagcttgaggacgaatcatccggattgcgggaatatgtgtttttaaatattcatctgtaaaatcaatattctcctgaatatattccaatgcctgatccagccactccgttccattgctatacgcggcagccactccaagatatgcaaataaatggccttcactaaattcactggcttccatataagtctgaaaacgatgacgaatggcctcatcttctataatgcagtacgaactggcaagtcccggcatgttgaaagctttactgggagacataaacacaagtgaattccgtcgagccttttccgataccaatgcaaacgtaggatgcgtgtatcccggcaatgtcagatcggcatgaatttcatccgagatgaccaatacttgattatcaaaacaaatctctgctatctcggccaactcctcccgagtccagacacgccctcccggattatgaggattactcaaaatcaacattttacagccctttacatcagcacggaagcgttcaaaatcaatctgatattgcccgtctttcagcaataacggactgtagactacctccctgtggttgtgttctgtcaccagaaagaaaggatgataaacaggaggcatcaccatcactttgtcccccggagccgtaaaacattgcagggcaaaagccaatccacgcacaatacccggcgtaaacgtcagcatctcccgggtaacattccacccgtgacgttctttctgccaattgataatggatgtataccaagcttcgcaagcgaaagtataccccaatacttcatgatccaatctccgacggatagcctctatcacaaaaggaggagtacggaaatccatatcggccacccacatcggaagcaggtcgctccgtccccaacgttccgatactgcgtcatacttcaccgagtctgttccccggcgctctatcacttcatcaaagttatatttcatatagggttctatttttaggttcagcctgcaaatgtacaattcatctgtttcataatgaaaccaaatgagctattttagcagacagcagttaaaatttaccatcattgtggtattcagttactctatatcaggctttttcagtacatttgtgctccattaaagaaaagacgtatgataaaagccctgtttttcgatatagacgggacgttggttagtttcaacactcacgaaattccttcgtctaccctcgcagccatagccgaagcaaaagctaaaggtatcaagatattcatcgctaccggacgcccgaaagcgattatcaacaacctcaccgccctccaggaacgggaactgatagacggctacatcaccatgaacggagggtattgtttcgttggagatgaggtgatttacaaacattccatcccggtacaagatgttaaggcactggctgcactttcggacgagagaaactttccctgtatctttgtagccgaacataccgtagctgtttgcaataccaacaagctggttaacgaaatctttcatgatttcctgcatgtagatatcctgcccatccaaactacagccgaggctacgcagcccgaaatctttcagatgactccattcatcactaccgaagaggagaaaacggtattgcctttactcccgaactgcgaatccggacgctggtttcctgcatttacagatatcgtagctaaaggtatccgcaaacaaaaaggaatagatgaaatcattcgtcatttcggtatcggacaggaagaaacaatggcatttggtgatggaggcaacgatatcagtatgttgcgccatgcagccatcggagtagccatgggcaatgcgaatgacgatgtcaaagaaaccgccgactatataaccacttctgtagacgaagacggaatacaaaaagcattaaaacatttcgggatcatctgacgtggaatttacaatagacaccggtaataaggagtttcaggatgcactgaatctgattcagtatactcgtcaatcagttttcctcacggggaaagcgggaacgggtaaatctactttcctgaaatacatctgtaagaataccaagaagaaacacatcgtgctggcacccaccggaatcgctgccattaatgccggtggcagcactctgcacagcttcttcaaacttccttttcatccgttacttcctgatgatccgaatctgagtttgcaacggggacgcatccatgaattctttaaatacaccaagccacaccgtaaattgctggaacaggtagaactggtcattatcgacgaaatatcaatggtacgcgccgatatgattgatgccgtagaccgcattttgcgtgtatacagtcgtaatctgcgcgaccccttcggaggaaaacaagttttactggtaggcgatgtattccagcttgaaccggtaatcaaaggggatgaacgggaaattatcaaccgcttctatcccactccttattttttctcggcacgggtcttcaacgagatcgaattggtatctatcgagttacagaaagtatatcgtcagtcagatgcagtctttgtcagtgtactcgaccacatccggagcggagcagcaggggcagccgaccttcagctgctcaacacccgctatggcgctcaaattgatgcttcggaagaagatttatacatcactctggctacgcgccgcgatacggtagaaaccatcaatgaacggaaacttaccgaactccctggcgatcctgtagtgtttgagggagagatcaacggcgactttcccgaaagtagcttgcccacctcaaaagaactgaccctgaaaccgggagcacaaatcatctttatcaaaaatgactttgaacgccgttgggtaaacggtaccatcggtgtagtaagcggcatcgacaacgacggtatcatctacgtcatcaccgatgatggcaaagagtgtgatgtccaccgggaatcatggcgcaacatccgttacaagtacaacgaagagaaaaaggagattgaggaagaagaactgggtactttcacacaatatcccatccgcctggcatgggccatcaccgtgcacaaaagccagggtttgacctttagccgtgtagtcatagactttaccggaggagtgtttgccggcggacaagcttatgtagctctcagccgttgcacatcgcttgaaggaattcaactgaaaaagcctatcagccgcgcggatatttttgtccgtcccgagattgtcagtttttccggaagattcaacaaccggcaagccatcgacaaagcattaaaacaagcacaggccgatgtgcagtatgccgcagctgcccgtgctttcgacaaaggagatttcgaaacatgcctcgagcagtttttcctggccattcattcccgttatgatatagaaaagcctgccgcccgaagattaattcgcaggaaattgggagtcgtcaacctattgcgggaacaaaaaaggaaactacaagcacaaatggaggcacagaaaaaaagcctgcaaaagtatgcccgagagtatttgctaatgggaaacgaatgtatcactcaggcgcatgacgttcgggccgcccttgccaattatgacaaagcgattgagctctatcccgaatacatcgacgcctggatacgaaaaggaatcacgctgttcaatgaaaaagagttcttcgatgccgagaattgcctgaaccgggcagtcagcctgcgtccttcagagttcaaagcactctataaccgaggcaaacttcgcctgcagacagaaaacatagaaggggctttatcagacctcgacaaagcaactagcctgaaacctgaacatcccggagcacacgaacttttcggagatgcattattaaaagtcggtaaagagacagaagcagccatccaatggcgtatagcagaggaactacgaaaaaagaagaaataaggtaagtttatttctgtaatctatttcaccacaggattacacagatcttcacagattgataatttatttcattgtcaatatataaagtatctgtgttaatctgcataattcgtgatgagatggattcgctctattaaaagaggactatacagtaaaacataatccccgataaccttggacttcttgtcttttattactaactttgttatcactataaacctaacaaccagtgcaattatgaagaaaggattcaaaattacagcaatcgtcatcggcgtcattctgatactgatgtttctccttccctttgccttccgtggcaagattgaaggtatcgtaaaatcggaaggcaacaaaatgcttaacggtcattttgattttagtagccttgatatcagcttattccgcaatttccccaaagcttccgtcaccctgaatgatttttggctgaagggaaccggagaatttgaaaacgacacattggtgaaggccggtgaggtaacagcggctattaacctgttttcgctttttggagatgacggatacgatgtatccaaagtatctgttgaaaacacccggttacacgccatcgtacttcctgacggaaaaactaactgggatatcatgaaacccgattcatccactgccagcgaaacccaagaaagtggtgaatcttctactttccgaattaaactccagcgttttgtcatcaaaaacatgaatgtggtatatgacgaccggcagtccgcgatgtacgccgacatacacaatttcaatgcgctttgttcgggtgatctgggtagcgaccagactttactcagcctggaagccgaaactgaagccctgacttataaaatgaacggtatccctttcctctcacaagctaacgtctacgccaagatggatgtagatgccgatctggcacacaacaaatttacactgaaaaagaacgaattccgtctgaacgccattaaagccggcattgacggatggatagagttgaaagaccctgctatcgacatggatttgaaactcaacaccagcgaaataggattcaaagaaatcttgtcactgataccggccatttattccaaagagttcaagaatctgaaaacagatggtacagcaactcttgaagctacagcgaaaggaatactgcaaggtgacatggttccacagttcgatgtccgactggctgtaaaaaacgccatgttccgatatccatccctgccggcgggagtcgatcagattaacatcgacgcacaagttcggaatccgggaggtaacattgacctgaccgagataagcatacatcctttcagtttccgactggcggaaaatccgtttagtctgacagccgacataaagacacctgtcagcgacccggactttacagccgaagccaaaggggtacttaatctgggcatgatcaagcaagtctatccgctggatgatatggagttgaatggtaccgttcgtgcggatatgacaatggccggacacctgtcatacatcgaaaaggaacaatacgatcgtttctccgcttcgggaaccattgccctcagtgatatgaagttgaaaatgaaagagatgccggatgtagaaataaaaaaatccctgttcacattcactccgaaatatctgcaactcagtgaaacgacagtagccatcggaaagaatgatcttactgccgactgccggttcgagaactatatgggctatattcttaaagggagcacactgaaaggtaccctgaatgtccggtcgaaccatctgaatctaaacgattttatgacggccacaactgacagtaccgcccaaacatcacaagcatcttcgaccgaagaaaccgtcagtatgatcgaagttccgcagaatatcgacttccagatggatgccggcctgaaagaagtgttatttgacaagatgacttttacaaacatgaatggcaaacttattgtgaaaaacggaaaagtcgatatgacaaatctgtcaatgaacaccatgggaggaagtgtcgttatgaacggatactattcgaccgccgatccgaagaagccggaaatgaacgcaggattccgtatggaaaatatcggttttgcacaggcttacaaagcactggatatggtgcagcaaatggctcctatctttgaaaacctgaaaggcaacttttcgggtaatatgcatatccggactttactcgacaaccagatgagccctgtcatggatacgatgcagggaaacggaagcctttcgacccaagatcttagcctcagcggcgtaaaagtaatcgaccagatagccgaagccgtaaagaagcctgaactcaaagagatgaaggtgaaagatatgacactggatttcaccatcaaagacggaagagtatctaccaagccgttcgatatcaaactgggtgactatgtcatgaatctttccggaagcacaggactcgaccaaaccatcgactattcgggaaagatcaaattaccggcatcggcaggtgatatcgccaaactgactaccctcgacctgaaaataggaggtactttctcctcacccaaagtatcactggatacgaaaagcatgaccaatcaggcagtagaagcagtgacagacaaggcaatcagcgaaatcgggaaaaagctcgggctggattcggctacaacggccaacaaagattccgtgaaggagaaagtaaaagagaaagccgtagaaaaggcactcgattttcttaaaaagaaaataaaataacgtgaatcaggagtgagagaagtgattcgcataaataacagacaattatgatactcaaactttacgaaaaaaataataatcctcaggacctgcaacggattgtagacctactgaacgacgggggattgattatctatcccacagacaccatgtatgccatcggttgccatggcctgaaggaacgtgccatcgaacgcatctgccggatcaaagagattgacccgaagaaaaacaatctctctattatttgctatgacctgagcagcatcagtgaatatgccaaagtggacaacaacattttcaagttgatgaaacgtaacctgcccggacctttcacttttatcctgaacggaactaaccggttgcccaaaatctttcgaaaccggaaagaagtaggtatccgtatgccggataacagtatcatccgtgaaattgcccgtctgctggatgctccgatcatgaccaccacgttgcctcatgacgagcacgaagacatagagtacgtcactgacccggaactgatcgacgaaaaactcggtgacgtagtggacctcgtgatcgacggaggtatcggggggattgaaccttcgacagttgtgaactgcactgaaggagaagccgccatcgtccggcagggaaaaggggaactggaagaggcctgacccattaaacatttttcagatgcagggtgttagtatataaaacccaaacaatagcatttgattatgaaaaaagtattattctttgcattggtgctgaccattgccacagcatgcagccaaacaaaagattcgtatctggagggctttaagctttttgtcgaaagcgtacagaaaaacgctcaagactatacaaaagccgactgggaaaaggctgacgaacaatttacgaaactgaaagacagttataataacttcagtaaacaaatgacttcggacgaaaaaggagaagtgataaaactggaatccacttatgctgccctaaagttaaagaaaataggagatgacctgaaagaaagcaccaaagatgcatttgagaaagtcaaagatacagcaaaagacgtaaaagaaggtgcgcaaaaggctgctaaaaaaggtgagaaagcaatggaagggatcaaagacggtctgaaagattagttcctcaacagactttcgtgtcagactgataaaaagaagaggataagccaaaagttcttccggcctatcctcttctttatttttatgcctgtattacttcagcaatgactgcggatcgaggtgatctgcttcgatatccttgaaataacgataagtaccaactttcagttcggcagtagcagcatcatcgcaaacgatgatacctttttcgtgcatctgcaatgcactgatcgtccacatctgtgtaatggcaccctctacggcatgatacaatgcacgtgctttgttgtgtccgtttacgataatcatcacctcacgcgcagaaagcacagtacccactcccacagtcaacgaagtcttgggaaccttgttaatatcattgtcgaagaagcgagagttcgcaatgatcgtatctgttgtcagtgttttctgacgggtacgagaactcagcgaagagcccggctcgttgaaagcaatgtgaccgtcaggaccaatacctcccataaacaggtcgataccgccatacgatttgatcttttcttcataacgtgcacattcagcatccagatcggcagcatttccatttaaaatgttcgtgttctccggtttgatgtcgatatggctgaagaagttgttccacataaaagaatagtagctttccggatgttctttcggcagtcctacgtattcgtccatgttgaaagtaacaacattctggaacgatacgattccttttttattcaggtcgatcagtgccttatacatacccagtggagatgatcctgtggggcatcccagaacgaaaggtttttccggagtgggattggcagctttgatcttagcagcaacataatgtgccgcccattgagaaacggactgatagtccggctgaatgattagtctcatgttcgattgtttttatcaggttaataaattaggggtaacttatactctgtctttttttaaacggccggccatagcacgtgccaggttctcacactgttgatatgtgatctccttcatggcctgtttcatttctacaggatcaccgaccaattcaaatttacttttctctgcaaactcggccatacgtttcacggcggcacctgcccacgtgaacgaaccgaaataccccagataacgtcctttcaattcacgaaccaatatcttggacagaagcgactccacttccgggaaaatctggttactgtaagtagggctaccgataatcaatcctttataacggaatatatcggcaaggatataagagggattacttttgctgacattgtgcatcacaatgtttttgatgccctgtgccgaaagctcagctgcaatggcttctgccatttgttcggtattaccgtacatactgccgtatgcaattaccacaccttcatctgcgtcataacggctaagtttatcataaatgcctaccactttcgtgatattctcagtccataccggaccgtgcgtagaacaaatagccgagataggaagtccacccaacttttgcaaagctttctgtaccggtgaaccgtatttgccgacgatgttcgaataataacgaaccatttcgccccaataatggtcgatattcatgcgtgtatccacgaagccgccatccagcgtaccaaaacacccgaaaccatcaccggagaagagtatgccatctgtttcgtcaaatgtcatcatcgtttccggccagtgtaccatcggagtcaggtaaaagcgcagtttatgacgtccaagagcgagaaaatcaccatccttaatcagatattgctcgccggtcacaccataaaaaccttcgatcataccgaaagtctgtttattgccaacgatcacaatgtcgggatagtgttgcttaatcaatcggatagaacctgaatggtccggttccatgtgatttataatcaaatagttgataggacggtcgcctatgatatttctgatttttcgaagatatacttcgaaatagcaaatatccactgtatcgatcagtgccaccatttcatcatcaatcagataagagttatacgaaactccatagggcaaaggccacattccctcaaagaggtgcttgttacggtcgttaactcccacataatgaacgtttcctttaattcttgttttctgttccattcttttttttagtttaatttagctacagggtacgagtaacaacaatacccaacggtacctctcagcttgcaactcgtaactcgcaactcattcgcttcgcaaaaatagttctttttttctaaaccaggtatgcctttccctgataagcacccctttctttcattcttttttgcacgcgggcagtaaattcataattcttcagcccccaatcgggtgcaatcagaagttctttcggtgattgtgaaacaaatcgctcaagtatcagatcggggcgcaggtgttccacatagtcgattaccagatcgatatactcgtccacactaaagagatgaaaatcctcggggcggcactcaaactcacgtgccattttcgtaccacgtatcaactgcaactgatgcattttaagagtggtcaatggcaaacgggacaattcggccgcctgagcgataatttcgtcatgggtctctcccggaagaccgaggatgacgtgtcctccggtcagaatcccgcaagcagccgtccggttgacagtttctaccgtatcggcataggtatgcccacggttgatacgtttcaaagtaacatcccgggtggtttcaataccatattctaccaaaaggaaagtgtgcttattcagttcttccagatatcgcaacaagggatcaggcatgcagtccggacgtgtgccgatgaccagtcccaccaccccgtccacactcaaagcctcttcatatttccgtttcagtccttcaaactcggcataggtgttggtataagcctgaaaataagccagatatttcatatccggatatttatgggcaaagaattgctttccttcctcaagttgccgggtgacggatttctccgttttacaatactcgggattgaatgtttggttattacagtacgtacagcctcccaatcccttcgttccgtctcggttaggacatgtaaaacccgcattaagagatatcttctgtaccttatagggaaagtattttttcagaaagaaagtaaattcgttatataaaggcgtcggagccggtttagtcatagaatatcatgcttttgtaaacagtacaaatatacataaaaagttatagaaaagagccgttagctatttttttctgtatcttcacccttatactgctctttaaatttatacgaaagcacgtaacatctgtagattggcgttaacttagaagatctgagaaagtgtctgaaaagattatataaataaagaaaatgtgagcaatgtccacatgaagcatcttctccaaccgagggtgtagccatccggaggaaagggtgtagccctaggcataaaagggtgtagtcatccgcatcgtatggctacaccctttcacctgttcatagatagcggttattaaagttccaaccgctccttcagtaatttatatccggaattactcactttcagccttacgccgttttttaacgagagctgataattttcttttccaaagagttcaacccgtgatatttgcgtcacgttcactattgtagaacgatgcacacgcacaaatcctgctgatggcagatgggcatcaaaatacttcatggtctgctccttgacatattgtcccgaaggggtcaccaatgtgacataatcgccacatgcctgtatgtaaagcaactcgtcggtacggatcagatgaatgtgtgtaccatctttcaccgtgatgcggtcaatacattctgcctcttccggcaacgctttatcttcgcggcattcaatctgcctcaattcttcacgaagggcttcctctctcgaaacagcctcttctaatatctcttcctgaacggtattcagcgactgcaagcgataccacaacatcatcactccccaggccaatgctccaaacaatatacggaaaggaagcgtctcaccaaaaggagcatatacttgtcccatattctgttccagcacatattgcacggcaaagcctcccgccagccagaaaagcagagccaaagcggctatcagcaagtcggtctgcaatatagagacaaggccaatgacataccatgccagataggccaggaggcaaagcaatccgacagataaaatcccgtctattgcagccggaagcgtgtcggctccggcatagccccaaagtagagttgtttgtatccctgctgctacaacggccaatatcaatgccgtcatccaccgccgggaagattcttgtataggatgtatatccatgttttattttcaactttttatatcaatacctccgaatgtcaaatcaccccggatcaccaatatccggttctgatcgatcatacccccgccaaaacgtttgtcctgacaaccgcccagacaggtagtacaccgaaacactactttccaatcggaaggcacataaatttctattccaccaaatgtacaatcaatatcgagaaacgtttctccttcgggaagagtcgtacgccgcaagtcgataaccgtcccgccaaaagagttttgtatagttccgcctttaaacacttcatcgagcaccacctgcctgatgccgctaaatgtgttttcggagtgcagcactccatctgttgagttatattggctactggcaaagttccctcggtgcgaacgctcgtgccgggctcgtttcggcctgaacagaaaagcaagtccgataacaatcaggacaatcgggaaaagagtgacatgaattcctgcaggcatccatcccaaatacggactgatcagataggcaccgatagcaagcagtatcccgccccgcaaaatctgacgccgcaacatcaagtaaattcctaaaagaatcagtaacatttgccaggaaaccaaaataccaaacaaggtataagaaatccatcccagattgcgagccagcaaaagcactcctgccgttataaaaataaaggcgataaaaaacttaccgtatctccgagcaggagatgaaaactctttcttttccatatattatttcattgttaattatttcttttaatctttgtgggcaaagatacgccatttaccacctcccggaaatactttttcgtcaataacagtacgccaaccgatgaaagggggataattcccgataaaaccggacctgtttttcaccgattgcgtacaagtttgaaccgatatagtcatatctctttatcgggagacactccggattctctcccctttgtctctatacacaaacaaagccgggtagagcctccgtttcatagggacaaagcctccgtttgtgtcccgtacagcctctgtccgtatcaaacagagactctgttttttcgttaaccaacgctatttcacagatattttacccctcctgttttgaaggctcaccgtttatcgttacctttgcggacacatagaaacaacctataaaatcatctagccaatgaaaagaaaattcatttttctgtttttctgtctgtgctgccttgccggctttgcacaaggaggcaaagcgctcgacctgaaagaaattaactcgggcaagttcagccccgaaaacatttatggtgtggttcccatgcctgacggcgaacactacacacaaagaaatgccgaaggtacacagatcgtgaaatattccttccgcacgggtgaaccggtggaagtggtattcgatgtgacaaaagcccgcgaatgcccctttaagaaattcgacagttaccaattttcaccggacggatcaaaaatactgattgcaaccgaaaccaagcccatctatcgtcattcttatacggcagtccactacctgtatccggtgaaacggaacgacaaaggagtgactaccaacaatattgttgaaaagctatcggacggtggtccgcagcaagccccggtattctctccggacggaaacctggtggcgtttgtccgtgataataacatcttcctggtaaagcttttgtatggcaacagcgaatcgcaagtgactgaagacggcaagttgaacagtgtactgaacggtattcccgactgggtatacgaagaagagttcggtttcaaccgtgccctggaattcaatgccgataataccatgctggcctatgttcgtttcgacgaatcggaggttccatcatacactttccccctgtttgcaggtgaagcaccgcgttatgatgcactgcaggattatccgggagaatacacttacaaatatcccaaagcaggttaccccaactccaaggtgtcagtacatacattcgacatcaaatcgaaagtgacccgtcaggtgaagctgccgatagacgccgacggatatatcccgcgcatccgtttcactcaggatcccaacaaactggccatcatgacactgaaccgtcaccagaaccgcttcgacatgtattttgccgatcctcgcagcacagtgtgcaaactggccctacgcgacgaatctccttattacatcaacgaaaatgtattcgataacattcagttctatcccgaatatttcagctttgttagcgataagagtggatatcctcacttgtactggtatagcatgaacggtaacttgatcaaacaagtgaccaacggcaactatgaagtaaaaaactttatcggatggaatccggataccaacgagttttattacaccagcaatgaagaaagcccgatgcgtcaggcggtatacaagatagaccgtaagggcaagaagatgaaactgagcaatcagccgggaaccaacagtcccatcttcagcagctcgatgaaatatttcatgaacaagtttaccagcctcgatactccgatgctgattaccttgaatgacaacacaggtaaggtcttgaagactctcgtaacaaatgataaactgaaacagaaactggccgaatatgccataccgcaaaaagaattcttcacgttcaaaacaacagaaggagtcgatctgaacggctggatgatgaaaccggtcaatttcgatcctgccaaacgttatccggtactgatgttccagtatagcggtccaggttcgcaacaggttctggacaaatggggaatcagttgggaaacctacatggcaagcctcggctacgtggtagcttgtgtagatggtcgcggcacaggtggccgtggcagtgaattccagaaatgcacctacctgaacctgggcgtaaaagaagctaaagaccaagtggaagctgccaaatatctgggtggactgccttatgtggacaaaggacgtattggtatctggggatggagtttcggcggatatatgaccatcatgagtatgagcgaaggtacacccgtgtttaaagccggagttgctgtggccgcacctacagactggaaatattacgatacagtatataccgaacgctttatgcgcacaccgaaagaaaatgccgaaggctataaagcagcttcagcattcagccgtgcagacaacctgcacggtaacctgctccttgtacacggtatggcagatgataatgttcacttccagaactgtacagaatatgcagagcacctggtacaactcggaaaacagttcgatatgcaggtatacaccaaccggaatcatagcatctatggtggaaatacccgtaaccacttgtatacgaagctgacgaacttcttccggaataatttataagaaacagttctcgccacagagaggacacggagtacactgaggattattttaatgattgaattttaaaataaaactctgtgtactccgtgtcttctgtggagaatcatagaataaaaacagtactatatgggaaacgataaacgggtgcgcaaacccgaatggcttaaaatcagcattggagccaatgaacgctataccgagaccaaacgcattgtcgaatcgcactgcctgcacaccatctgtagcagtgggcgttgccccaacatgggcgaatgctggggaaaagggacagctacgttcatgattgccggtgacatctgtacccgcagttgtaaattctgtaatacccagaccggacgacctctgcctttggatcccgacgaaccggcccacgttgcagaatcgattgccctgatgaaactctcacacgcagttatcacatctgtagaccgcgacgatctgcctgatttgggtgcagcccattgggcacaaacaattcgtgaaatcaaacgactaaatccggaaacaactaccgaagtactgattcccgatttccagggacgcaaagagcttgttgaccaagtgataaaagcctgtcccgaaatcatctcccataacatggagactgtgaaacgcatcagtccacaggtgcgtagtgccgccaactatcacaccagcctggaagtgatccgccaaatagccgaaagcggtattacggcaaaatcgggcattatggttggtctgggtgaaactcctgctgaagtagaagagttaatggacgacctgatttccgtcggttgcaaaatcctcaccatcgggcaatatctgcagccaacccacaaacacttcccggttgcagcatacattactccggaacagtttgctgtttataaagaaacaggactgaagaaagggttcgaacaagtggaaagcgcaccgttagtacgctcctcgtatcatgcagaaaaacatatccgatttaataataagtagtaagaacataacaggctccttgtttgttttacaagtaaacggcaaaataatacaataaaaacatatgggtaacaaaggagtactttcttctgcatttaatatgtcattgggctttatccctgttattgtttccatcctcttatgcgaatttataacacaggacatatcaatctatatcggtacaggtatcgggcttatctattcgtataggtctctgtctcgtaaaggggcccgcatacccaattttatcctctatatctctacgggaatcttgacattactgactctggcaagctttattcccggagatttcgttccggaaggagcattgccgcttacacttgaagtcagcatactgattccgatggttattctattcctgcacaggaggaagttcatcagccactacctgcgtcaaaatgcccaatgcaaccggcggttgtttgctcaaggagcagaatctgccattgtatccgcacgggtcgtactgattttaggtattctccattttgctgtcatcagcctgacggttttggtagcacatcccctcacccggacttccatacttgtactttatcacgtattgccgcctactatatttattctcagcatcctgctcaatcaaataggtatccgttactttaatcatgtaatggcgcatacggaatatgtccccatcgtcaatacccgtggtgatgtaatcggaaaaagtctggctgtggaagctatcaactataagaatgcctacattaatccggtgatacgcattgctgtttccacccacggcatgttgttcctctgtaatcgtccgcaaagctgcatcctcgataaaggcaaagtggatataccgatggagtgttatctccgatacggggagacactgacggcaggagccaaccgcttattgagcaatgcttttccgaaggcctctgatctgaaaccgacatttaccatctcctatcattttgaaaacgaacagaccaatcgtttggtctatctgttcattgtcgatatggaagacgactccattctctgcgatccacgattcaaaggaggaaagttatggactttccaacaaatagagcacaacttaggtactcacttcttcagcgagtgtttcgagttggaatacgagcacctgaaacaggttattggtataagagaaaaatacaaggtatcttagtcaggtcgggtacttttccttgccactcttttatggttttagtacggatatattctccctcacaagtgatattcgctgcaatacacaagcgggtatgcggacgacaattgtgcagaatatcctccaccatcttattgttacgataaggtgtttctataaatagctgtgtctgatgttcggcatatacctgttgctcaagagcttttattttttttgcacgctcacccggctctataggcagataaccgtgaaaggcaaaactctgcccgttaaaccccgaacccatcacagaaagaatgatagacgaaggtcctaccaacggaactactttcaggtttttacgttgtgcaatagccaccacgtcagctcccggatcggctacagcaggacagccggcttcggaaatcactcccatggacaaaccgcctgccagcggtttcagataaccggaaatatcttcaggagaagtatgtttattcagcgggtaaaaagtgagtgagtcaatatcaatctcacggtctacctttttcaggaagcggcgggccgagcgaacatcttcgacaatgaagtgcttgatgccctgaataatttctttattataagaaggtaatacagactcgattggagtgtcgcccaaagtgacgggcaaaagataaagagcggtatccatgaataggctatttaatagttgaaattttacggattaaaacgcgattccgtgaacatacgttcatagtcgctcatttcaagcaattgccgtaaagttgttttcttatgatgtttcatatatgaggtgatgattttcgtaccgatccaggtacctaccatcgaaggcgcattctcgcctaaagtgttagtgaaaggagccggacgggtatattgacgtaccaccatcggatccgtagcatgcaaatgatcttgctcaagaatatatctccacatctgctgttggttctctttacaccattccctttctaaatccgaatatcccaacgcttcttccgatgaggaatagtccaacagatgttgtaccacataattgattttaccataatgcatcattacatcgagtaatgtacgggagtaatccatcggaaaaggatactggctcatcagatagaacaccaaacaatcgggaacgatccggtcaggacgcatagtacgccgctgatagttgtaatagaaacgcttgtaaagcggatagtcttcacccatatacttgtcaagactaatacccaacacgctgtcagacagaacaatggattcattaaatgccgagatctgcgtatatatcataggaatcatgatatccggaatctccttttgtaatttcccgaaccctttggtcagatttttttcaaccgattccaattccgggtatttggcctccacatcttctataagacggaccaaggttgtatccgaatagaaagttttcaatcgctggaaaatatggtcatcgctcacctggccaatagccaatacatcttcaatcaacaatttggtgggcaaggcatactccaggttcattttttgtaaagcagaaaagctgttgaaacgaacgtattcgtccaacagcttatcatatctgactacggaaattccctcttcttccatagggtccgccacaggttccgctttccccacccggcaggatgcgaaaagcagactcagcaaaataagaagaatatcgtctttccgtattttcattaccttaaccgtaaatgatattaccgttttcgtctttatattcgtccagccccttttcgtaagtagccattgcacgcagactcataccaacacttgaaaaacctccatcgtggaacaggttctgcatagttaccttacgggtaagatcggagaacattacgatacagtaatcagcacattcgtcggctgaagcattaccgagcggagacatacgattagcaaagtcatacagtttatccatacccttcacaccagaaccggcagttgtaaaggtaggcgactgggaaatagtattcacacgcacgttgtgctcacgaccatagatataaccaaaactgcgggcaatagattcaagtaatgcttttgcatccgccatatcgttatatccgtagaaagtacgctgtgcagctacataactcaatgccacgatagaaccgtattctgcaattgcattttgcttcttggcagcctgaatcattttatggaacgaaacagctgaaacatccagcgtagtattcaacatattataatcgagatcatcataagtacgtttcttacgaacattcggtgacataccgatagagtgcaatacaaaatcaatttgtccgcccaaaacttccatcgagcgtttgaatacgttctccaaatcttctacgttggtggcatcagcagcaatcacttcgcaattcagcttttctgataaagcagaaacctgtcccatgcgaacagcaacaggagtatttgataatgtaataacagcaccttcttcaacggctctttcggctactttccaggcaatagactgctcgtttaatgcaccgaaaataatacctctttttcctttcaacaaattgtaactcataccttttaatgttaaattaggttgcaaagatatagattttctgcataaaagcacgaaaagtgtgcaaagaaaagagggaaaccacaaaaaatacagtgaatttgattatttattaatagataatagagtctcctacaacaaaatgacaattcttactcccgaaatataaagcaattgtctatcatctcaatgacaacagtattccttatttatatcaagcgtactttgaatcactatataaatagccagagagagtcgacaggttgccgcaatcgtttgtcggaatacatataaaaaagatcagtctaaacaaaaagaaaaaagtagtaattcaaaaatagaaaaggcaaagttctgttggtactttacttcaataattttgcatcaaaatacattttctaatattaagttaataatcacatcatatttataatgcaaaaggagataacgggacaaagataataatatcttttaataaatcataaatccaaggtttattttttcatgtatattatgaaatacattttagcttaaaaataggaatatacttctttggcaaatatagtagactataagtaatactcaataatattggaacctaatccctctaccggtcagtcaatatctactataaccaactaataaacaacagataacattattgaggtccatggtatatctgtacgcctattacaacatatcagactgtcataatcaattaagtaccaacagaactaagcctgaagcaacaatgtaaagatagatcataaaatacaataaatagaataaccctaatttaaaaagcttatgagataaaaaacagagaaatgacctcacacaaactccggaaaaccatttttccgggaaacctaagaaacaaactattcaaaatgaagtttaaccgaacaatttagtgtatgacaaaaaaaatcaacctgtttccaagccttatacggtttcgggaaaccaatcgcctaaaaatggcaattgctgcatctatcatgctatggtgtatggcaccccaacaagcagttgcagatacgtatgaaaaacacgaagttgccagtattcagcagcaaaaggtaaaagcgaacggtactgtagtagatcagaccggcgaacctctaatcggcgtttctgtaaaagtaaaagacgcgcctaatggaacaatcaccaatttagatggtaaattctccatcgatgtagccaaaggtgctacacttgaaatatcctatgtgggatataaaaccgtcattgtaaaagccgaatcaaccccaatgcacattgtcttaaaagaagatagtgaaatgatagatgaggtagtggtagttggttatggctcacagaaaaaggttaatgtcaccggtgccgtaggcatggtcaattccgaagtacttgaagctcgtccggtacaaaatgtatcgcaagctttacaaggtgtggtaccgggtttgaacctctccgtcaacaacggtggtggttcactggatagtgagatgagtattaatattcgtggtacaggtaccatcggcgacggctccggatcgtctccattggtattgatcgatggcatcgagggcagcctgaatacagtaaaccccaatgatattgaatcggtatcggtactgaaagatgctgcatcagcttctatttatggtgcacgtgccgcattcggtgtggttttggtaaaaaccaaaagcggacaatcgggaaaacccagagtgacctattcgggtaatgtgcgcttctctgatgcgactaatattcctgaaatgctggattcttatactttcgcacaatactttaaccgtgcagcggcaaatgataatggtggtactgttttcagtaaagagcaactggaacgcatcaaagcataccaggatggtaccttaaaatcatcagctacctttaacgaacaatcacgccgatggaactactatacgggatcgaatgcaaataccgactggtttaaggaagtgtatgaagattgggttccttccatggatcacaatcttagcatcagtggtggcacagataaaactcaatatattgtcagtggaagctttctcgatcagaaaggtttgatccgccatggcaaagacaccttccagcgctacactttaaatggtcgaatcacaagtaacatcacagactggtttacattgggatattcaaccaaatggacacgtgaagattatgatcgtccaagttacctgacgggattgttcttccacaatgtggcacgccgctggccgactgtacctgtctatgacgataacggatacctgaccgaaccatccgaactgatccagctggaagacggaggcagacaaatcaaccagaaggacctcttcacacaacaactgcaactgaccttcgaaccaatcaagaactggaaaatttatgtagaaggaagtttgcgtgtgaccgccaataaccaacattgggaagtactgcctgtttatcagcacgatgtagacggtaacccggtaggtatgacatgggatgcaggtgtaggcagctatccggtaggcggttcaaaagtgtctgaatatgcttataaagagaattactattctaccaatatctattcggattacttcaagcaactggataacgggcactatttcaaggcaatggtaggtttcaacgccgagctgtacaaggaccgcagtgtaagtgcggacaaatcaaccttgattactccatccgtaccgacaattaataccgcagtaggtgaacccagtgtagcaggtggatacagacatacctcagtggccggtttctttgcccgtttaaactggaactacaaagaccgctacatgctggaagccaacggacgctacgatggttcttcacgctttatcggcgacaaacgttggggattcttcccgtcattctcaggtggttggaacatcgcccgtgaagcatttttcgaagaaaccgccaacaagttgaaaattggtacactgaaactgagagcatcgtggggacagttgggtaacaccaacaccaatgaagcctggtatcctttctatcagactttaccgcaaggacagaactacggatggttagtaaacggtgtacgccagaattatgccagcaatccgggtatcgtcagtagcgaaaagacctgggaaaccatcgaaacatgggatgccggtctggactggggattattcaacaaccgtctgaccggttcattcgactatttcgtacgttacacatacgacatgattgccaccgctccggaactcccctctattctgggtacaggtgttcctaaaatcaataatgccgacatgaaatcgtatggtttcgagttggaaatcggctggagagacagaatcaaaaacttctcttatggagtgaaatttgtcctctcggatgcacaacaaaagattctgaaatacaacaatcccgacaagagtcttagtaatccttattatgaaggacagaagctaggagagatatggggatacaaaacaattggaatcgcacaaagcgatgaagaaatgaaccaacatcttgccaatgccaagcagccgatggggcagaaatgggcagcaggtgacatcatgtatgccgatcttgacaatagcggctcagtggaccaaggtaactacaaagtaggtgattcgggcgactggcagattatcggaaacaacacccctcgcttcaactatggtatcacgatagatgctgcttggaaaggtttagacttccgtgcctttgtacaaggtatcggcaaacgtgattattggctgaacggcccgtacttctggggattctccggaggtggcgaatgggcttccgccggatttaaagaacattgggatttctggcgtccggaaggtgatcccttgggagctaacaccaattcgtacttcgcacgtgtcatccgcggtacatcgaaaaaccagcaacgtcagacacgttacttgcaagatgcttcgtattggcgcttgaaaaacatccagatcggatatacattacccaaagtatggacaaagaaagcaggaatggaatcagtacgtgtttatgtatcgggcgacaacctgctgactgtatcagacatcaccggagtattcgaccccgaaaacctgggaacccaatggaccgatccgggtaaagtatatccgttacagaaagtaattgcaattggtttaaccgtaaatttctaaaaaacgaatcattatgaaactaaaaaatagaatcatacaattatgtgtactgacagggggagtattacttttcccatcatgtaacgacttcctagacagggagccgctggatcaggtaacaccggaatcgtatttccagaatgcagatcacttggcagcttatagtatttcaaaatatcagaatctgttctctactcatagcggatttagtgcgggtactgtaaacaatgacggtgctaccgacaatatggtttcaggcggcagcagcggtagcggactccagaattactacaccaaagatgtttggaagacagaagcagccaatgacaactgggatttctccttttttcgttattgcaattacttctttgaaaaagtactccccaaatatgaggcaggagagatatcaggtaacgctgacgatgtgaagcattatatcggtgaaatgtactttatccgtgcctggaaatatttccagaagctgaggatgtatggagactatccgattatcacagaagtattaccggataatgcggaaatattgatagaaaaaggtgtacgacaaccacgtaacaaggtggcgcgtttcattcttgaagatcttgacaaggccgccgagtacatgcacgaccatggttttgccggcaacaaccgcttgaacaagcaatgtgctttgttaatcaaatcacgtgtagcactctacgaagctactttcgagaaatatcatcagggtacgggacgtgtaccgggtgatgccaactggccgggtaagcgagtgcatcctgattataagtatgatgccaataccgaaataaacttctttctggaccaggcgatgtccgcagcagaacaagtagccgatgtcattaagctgacacctaacagcggtgtgttcaatccggcaaatgacaacgacatttcgggatggaatgattatttcgatatgttttcagccgaagacatgagtggatttgaagaagtgctcttctggcgtgattattactccggcgactttaccatcgcacacggcgctacagcttatgtagcttcgggaggcaacaacggtatgttgcacaactatgtacaatctttcctgatgaaagacggtatgccttggtatgcagccacagccgcatatccttttaaaggtgacgaacgggtaatggatgaaaaagccaaccgcgacgaacgtctgcaactcttcttatttggtgaggaagatatgataccggccgtatccaacgctgcaaccaatgccatgaaaacatatcaggacgcaaactaccccaatataattgtagccgaatcggaaatcaaagacttaacaggatatcgtattcgtaaatgtctctcttacgaccagaaacaatatgtttcgggacaggctcagtctacaaccggttgtgtaattttccgtgcagtagaagcttatctaaactatatggaagctgcctgcatgaagaataacgggaatgttacgggaaaagctgccgaatattggagagctgtacgcatacgtgcaggagttgatccggacttcactaaaaccattgccgcaacagacttgagcaaagaaaatgatttggctaaatacaaaggcgagaatgaaatgatcgatgtgacacttttcaatatccgtcgcgaacgtcgttgcgaattcattggcgaaggcatgcgtatggatgacctgattcgttggagatcattagacagactgttggtcgaacgatttattcccgaaggatttaacttctggggaagtgacgcttacaaacgttatgaaggagaagatgccaagttcgaatatatcgaaggcccggacaacgctatggcaaatgtttcatccagaaaattatccaactatttacgtccttattctgttgtacaaaagaataatgaaatctatgacggttatacttgggctaaagcgcattatctctatcccgtacctatccgacagatcgaattattatcaccgtcaggcgaaatagcttcatcggttatctatcagaacccatactggcctgaagaaagaaacacagcagctatagaataattatatcaaatatataaatattgatttttagtataataataaggaggttgtggtaagagatttatagcaactacataaggtttaaaaaaggaaaattgaaaaagggtgtccgtgaggataccttttttttgcattcattatcgctattgaaatgatatggaaagtcttgccctttcatacttttccggtatacatgcctttgcagtagacacttatcgatatcttaaagtcaatcaagacgaaaacatcaccaattatcaagccaatcggcaacgtaggtataataagaaaaagggagaaatgatgttatagggaaatacataaaaaggccaagttctccaggtacttattctgaaataatcaaagcaactttttatttactaatattaagttaacttaagcagtatagtcataattcatcagctatacttacgacaaaggtaaacattcattttaataaaccataaaattaagtgattttttttgcataaatactaaaatatgttccatcatccatagctattcttgccttttcgttaaatccaagtagacttcaagtagaacacaaaaggccatttccagtcataaacatacaatataagggggagatctgatacacatatttcctacataaagggtaggtagtaaaagcattactacctttatctctctttttcccttatatagctattctcatatatctactcaaaaataagtacctggagtactttataatagtcataactccgtaccatcagcacatctcagacaagacaaaaacgatattataagataaccctaatcagacaagcttatggagtagaaacaaaaaagacacttaaacatcacttccggcaagataaatctttaccggaaaaatctcaaaaaacaaactattcaaatttatgtttaaccgaacaatttagtgtatgaaagaaaaaaccaacctgtttccaagcctgatacgacttcgggaaacaagtcgcctaaaaatggcaattgccgcttctatcatgctttggtgtgcaacacctcagcaagccacggctgatactaacgaagaacacgcgattgaagctgtacaacaagctaaagtaaaagtaaaaggtactgtagtagatgaaaccggagaaccgatgatcggtgtagccgtaaaagttctcgcaaacaacacaggtaccattaccgacctggaaggaaaattctcggtcgaagcccctctaggaggcgccatccaaatttcatttatcggatacaaaaccgttacggtgaaagcaagtagcgagcctatcagtgtgacgttgaaagaggattctcaacagttggacgaagtcgtagtagtaggttacggctcacagaaaaaggtgaatgtaaccggttctgtcagcatggtggactcaaaagtaatcgaatctcgtccggtacaaaacgtatcacaagcccttcaaggtgtggttccgggattgaatatgtcagtaggtaatagcggtggcgcactggacagtagtctcagtatcaatatccgcggtgccggtaccatcggcgaaggttcgagcggaagcccgttggtattgatcgacggcatcgaaggtgacatgaacacagtgaacccgaatgacatcgaaaacatttcagtattaaaagatgccgcctcttcttctatctacggtgcacgtgcttctttcggtgtaatcatgattacaaccaagagcggtaagtccggtaagactcgtgtgaattactcgggtaacgtacgtttctccgatgcaattcagattccggaaatggtggattcttataccttcgcacaatacttcaaccgtgccaacacaaacgatggaggtggtttggtatttgacgaagcggccttggagcgtattaaaaactatcagacagggaaatacaccgacccgaacactcctgaatactatggagcgaaggccggtaatgacggaaaatggcaaaactatacaggttccttcgccaacacagactggtttaaagagttctataaaaattgggtaccctcaacagagcacaatctgaatatcagcggcggtacagacaaactcacttatatgatcagtggcagttttcttgaccagaaaggtctgctaagacacggtgaagatcagttcaaccgttacaccatgaacgccaaaatttctgcaaagttaaccgactgggttactttgaactacaccagcaagtggacacgcgaagattacgaccgtccgacttacatgaccggtctgttcttccataatatcgcccgccgttggccgacttgtccggtaagagatccgaacggacattatcagcagaaaatggaaataatcgaaatggaagacggtggtaaacaaaccagccagaaaaactggtatacccaacaattgcaggccatcttcgaacccataaaagactggcgtatcgtagcagaaggcagtatgcgtacctatacacgcaaacaatcatgggctgtgcttcctatttacgcttatgatgccgacaatcaaccctatttattaggatggggcgataatgcagccggttattccgaagtacaagactcacgtgaaagtgaagactacttttctaccaatatttatacggacttcgccaagaccttcggtgatcacaactttaagataatggtcggtttcaatggtgagctttaccgcccaagcgggctgactgggttcggtacagacctgatcagtcctgaagtaccgtctttgggattgacacaagacaataaaaaagccagttcatgggccagtgaaaaagcaatcgccggtttcttcggacgtttaaattataactataaagaacgctacatgcttgaggccaaccttcgctacgacggttcttcccgatttatcggtgacaaacgctgggggcttttcccatcattctccgcaggatggaacatctcacgcgaagcattctttgaaccactgactcaagtggtaggaactttaaaactgagaggttcgtggggacagctcggtaataacaataccagtgaaacgaacgcttggtatccattctaccaaaacatgcctacaggcagtgcttcctcgggatggttgatcaacggcaaaaaacagaatgtagccggtctgcccggtatcgtcagcagtttgatgacctgggaaaccatcgaatcatggaacgtgggtatcgactggggattgtttgacaaccgtctgacaggttcattcgattactacaaccgctatacatacgacatgatcggtccggctcctacactgccctccgtattgggtgccagcgctccacaaatcaacaactgcgatatgaaatcgtatggttgggaattagagctttcatggagagaccgcattcagcagttcaattacggtgtccgcctcgtcatgtctgacaatatgcagaaaatattggaatacccgaataaaaccttgtctttgggcgaaaagtactatacaggaaaaaccataggtgagatttggggatataaaaccatcggaattgcacaaacccaagaagagatggacaagcacttagccaacggaggaaaaccgaactggggatcagcctggggtgccggtgatatcatgtatgccaatattgacggaaaagacggtgtgaacagcggtgccaatacagtaaacgaccatggcgatttaaagattatcggtaacagcactccacgttacaacttcggtctgacactggatggttcctggaaaggactcgacttctcactcttcattcagggagtgatgaaaagggattacatgttggacggtccgtatttctggggagccaacggaggtatgtggcaatcatgcgtattcaaggaacacctcgactattggcgtcctgaaggcgacccattgggagcaaacaccaatgcctactatccgaaaccatacttcagcagcaataaaaaccaaaaaacgcaaagcggttacttgcaaaatgcagcctactgccgcctgaagaatgcacaaataggttacactcttcccaaagcatggaccaagaaagccgccatggaatcggtacgtgtttatgtatcaggagacaacttgctgacaatctcaggcatcagtgatatattcgacccggaaacactgggtggagactggggaccgggtaaattatatccgttgcagagaactatttcaatcggcttaaacgttaacttctaattcattgaatgaactatgagactaaaattaaaacatatatacttctgctcattgatagcaatgggcggattggcgataacttcgtgcgaggattttctcgaccggtcacctatcagccaggtaactcctgagaagtacttcagtacagtagaccaggtagcaaactacctcaataactactacaacgactatctggacgactccagaaattataagctatatcaccaacaggcttggaactcaggcatgcaacgcaacgatgccaacacagacaacctgttggcagacgacagtagcctggattattttgccggtaactggcaggtaggaagcgggaaatcgattcaagctccattaaaccgaatccgtacatggaattacctgcttgaacaagtacttcccaaagaaaaagaaggatcgattcaaggatcggttgaggacctgaaacactacatcggcgaagcttacttcttccgtgccatggcctactacaaagcattggtgaaatatggcgactatcctatcgtagataaagttctccccgatcaggaagagattttattggagtacagtacacgtgctccgcgcaatgaagtagcccgccagattctgaaagatttggatgaagctatcaaccgtatgcacgaccagggtttccaaaacaaccagcgtatcaacaagcaggtggctcaactctataaatcaagagtagccctgttcgaagctactttcgagaaatatcatcggggaaccggacgtgtgccgggagatgaaagttggccgggtgctaaaatgtcttacaacagcggcaaaacgttcaacattgacggtgagatagacttcttcctgaccgaagccatgaatgcagcagcagccgtagccgaccactgcacgctgaccgaaaactcacacgtgctaaatccggagtatggacaaatctataattggaacccgtattacgaaatgttcagcacaccggatgcttccggttatagcgaggtgttgttgtggaaacagtatgacaaatcattaaatgtttcacattgtgcgcctgcacgtctgcagaacggtgaccgtaccggattgactcgcggattcattactactttcttgatgaaaagcggtttgcctatttatgctgcaggcaacgaatatcacggtgatgtatctatctcggatgaaaaagaaaatcgcgacgaacgtctgcaactgtttgtatggggtgaaaaagatgtattgcacagcgataccaaaaacccggctgtagcagcagccggcacaacactgcttttcggagttccgaatatcatctccgaacagaaacagactcaagaccttacaggataccgcccacgtaaagctcacacttacgattacgcacagactaagggtgacgaactgctagggaccaatgcttgtgttgtcttccgttctgcagaagctaacctcaattacatggaagcctgctacgagaaaaccggttcactggatgccaaggcacaaaagtattggaaagcactccgcacacgcgccggtgttgacgacgattatgccaagactattgcagcaaccgacttgagcaaagaaaatgacttagccgtttattcgggcagcaaaatggtggatgttaccctctataatatccgtcgcgaacgccgttgcgaattcatcggtgaaggtatgcgctgggacgacctgaagagatggcgttcctgggatcaattactgaccaaaccctatatcattgaaggtatcaacttctgggatgccgcttataaagatcacaaggacattaaggacgatggtacccttgatgcaaacgtttcgcccaaaagcgacagcaaatacttacgcccacttcgcagaacctcaatcaataatgaattgtatgacggtctgacttggcgtaaagcattttatctggatccgatcggcatagaagatatgtctttgaccgctaccaatccggaagatatcaacacaactcagttgtatcagaatccttactggccgatgactgccggtaaagcattggaatagtgttttcgataggaactaaatacaaaaacaatataattttttactaagtattgatttttagtataatagggtgttgtggtaagagatttatagcaactacataaggtttaaaaaaggaaaagggaagggaagtccgtgaggatctcccttttctattttactcaaaaacggaagactaacctttgcacatggtcctcaaccggacacttctccttattaacattgttaacactatctgtgagaccttcctttatctcctgataaagaacaagttttttacatcgaaagggcttgttatttaaatacagaacacttgctttaacatagaattaaaacaagcattgaccgaaggaagaagggaaggccacaatatcttggtttctaacgagatatcaaaggaaagttccagtttctcccccaataatacatatacggtaatgaaagagatatttgctatttcaacaactaaattttctatcgtaaatcggaataaatgacttcaaccgatatcataaaaagaaatcagcagattaagcaatcatttacttaaaatgctgatttcaaatatcaatattatcgctaaaagtcaatcacaggattttattcccattcgatagttgcaggtggcttcgaactgatatcataggtcacacggttcacaccttttaccttatttataatatcattcgacactttaccaaggaattcataaggcaaatgcgcccagtcagctgtcatagcatccgttgaagtcacggcacgcaaagcaacggcacgttcgtaagtacgttcgtctcccattacgcctaccgattgaacaggaagcaagataacacctgcctgccacacttgatcgtacaatccccaatcacgcaaaccctgaataaagatatcatcggcatcctgcaagatacgaaccttctcaggagtaatatcacctaagatacgaacagcaagtcccggcccggggaaaggatgacgggtaatcaagtgctcgggcatacctaactctctacctacacgacgaacctcgtccttaaacagtaagcgaagcggttcacaaagttttagattcatcttttcaggaagtcctcccacattgtggtgactcttgataacagtaccggtgatagaaagcgactcgatacagtccggataaatcgtaccctgagccagccatttcacatctttcagtttatgtgcttcttcatcgaatacgtcaataaatcctttacctataattttacgtttacgttcaggttcggtgacgccttccagttcagagaagaacttctcactggcatccacaccaatcacgttcaagccaaggcattcgtaatcgtgcatcacgttcttaaactcgttcttgcgaagcataccgtggtcaacgaaaatacaagtcagattcttgccaatagccctgttcagcaaaacggcggctacagaagagtcaactcctccgcttaatcccagtacaaccttgtcatcacccagctgagctttcaattcggcaaccgtgctctcgatgaatgacgccggactccagtcctgtttacagccacatacatcgacaacgaaattgcgaagcatctgcgtaccgtcttcactgtggaaaacttccggatggaactgtactccccatacctgttcgccctctacctgataggcggcaatagccactttgtctgtcgatgcaatggttttaaaattctcagggatagcagtaatggtatcaccgtggctcatccatacctgcgtaccctctctcacacctttgaacaaaacattgtccttgcagaaagaagtcaggtgagcacgtccatactcacgggtacctgccggttctactttgccaccattggtatacgccataaactgtgcaccatagcagatgcccaagatggggtatttacctctgatttcgctcaaatcgaccttgaacgcactttcgtcatatacggagaaggggcttcccgacagaatcactcccttgacggtttcatcgcctttgggaaacttgttataggggacaatctcgcaatacgtatccaactcgcgcacccggcgaccgataagctgcgtggtctgtgaaccgaaatcaagtattataattttctcttgcatatatagatatgttatgaatttggcgcaaaattactgcttttctttcaataaatcacgtatttcagtcaacaatatctcttcttttgtaggtgcaggaggtgcgggcggcgcagcaggtgcctcagctttcttctgagtcaactttgtaatcagcttaataaataagaatatagaaaaagcaatgataagaaaatcgaaagtcgcctgcagaaagttgccgtaattcaatgtcacagcagcggccgtctcttttccgtcagccccatattccgcagctttcattacccatttcaagtccgtaaagttcactcccccaatgagtaaccccaaaggtggcataatgatatcggctacaaccgacgaaacgattttgccaaaggcaccaccaataatcacaccgacagccatatctaccacgtttcctttcatggcgaaagctttaaagtcttgtaaaaaagtactttttcccatctttttttatatttaatatgaatttaatatgcgaatataaaaacattttcttacttttgcaccgcattctaatgaaacaaatgcgaatttagaaaagtatttgaacaaatattataaaacccttaaaagtttaaacaaaatgattaaagtaggtattaacggttttggccgtatcggacgtatggtattccgtgcagcagttaagaactttggtaacgacattcagatcgtaggtattaacgacttgttggatgctgaatacttggcatacatgctgaaatatgattcagtacacggtcgtttcgaaggcgaagttgctgtagaagacggtgctctgattgtaaacggaaataaaatccgtctgactgcagagatggatcctgctaacttgaaatggaacgaagttgatgctgacgttgtagttgaatcaacaggtttcttcttgactgacgaaacagctcgcaaacatatccaggctggtgctaagaaagttatcatgtctgctccttctaaagactctactcctatgttcgtatatggtgttaaccacacttcatacgcaggacaggacatcatttctaacgcttcttgtactactaactgcttggctcctatcgctaaagtattgaacgacaagttcggtatcgttaaaggtttgatgactacagttcacgctgctactgctactcagaaaacagtagacggtccttctaagaaagactggagaggtggtcgtggtatcttggaaaacatcatcccgtcttctacaggtgctgctaaagctgtaggtaaagtattgccggtattgaacggtaaactgactggtatggcattccgcgttccgacttctgacgtttctgtagttgacctgacagttgttctggaaaaagctgctacaatggctgaaatcaacgctgctatgaaggaagcttcagaaggcgaattgaaaggtatcctgggctacactgaagatgcagttgtttcaactgacttccgtggttgcgctaacacttcaatctacgactctaaagcaggtatttctttggattctaacttcgctaaagttgtttcttggtatgacaacgaatggggttactcaaacaaagtttgtgaaatggctcgcgttatcgctgctaaataatcaagctaagatacaatatacgaaaagctgttccggtttccccggaacagctttttttattttcctctcccaagccctatagtcccgaatcacaacagaatcaaataaatggtagtaaaaacagtagtgagacacgttaaataagaagaaaactgtacggaagtctgtgatactctgtggtgaaatttgtaattttgtaaatgtaacattgatattactgaatatgacaaatatagcaaatgcacaaaatccattttttgagaaatatacaactccgtatggcactgttccttttgacaaaataaaaaatgaacattacgaacccgccattcgtgaaggtatcagtcgccaggcagcagaaatagatgccatcgtcaacaacccggaggctcccacattcgctaacacaattcttgcttatgaaaaatcaggagagttactcgatcgggttaccaccgtattcggcaatttgcgcagtgctgaaaccaatgatgacctgcagaagattgcccaggagatgattcctttgttaagcgaacacagcaataacatcagcttgaatcaggaactcttcgaacgtatcaaagttgtatacggtcaaaaggattccatagagctgactccggaacaaaccaagcttctggaaaacgcttataacggatttattcgtcgcggagccaacctgcagggagaagccaaggagaaatatcgcgagctgacaaagaatcttagtaaactgacattggatttcagtgaaaataacctgaaagaaaccaataactatcagttgactctgaccgatgaagcccagttggccagtctgccggaaagcgccatcgaagccgctgcagaaacagcccgggaaaaaggagtgaatggctgggtgttcacattgcatgcccccagttatattccttttatgacgtatgctgataaccgggatttacgtcgtgaactttacatggcttacaatacaaaatgtacccacgacaacgaatataacaacctggaaattgtgaaaaagatagccaatatccacatggaaatcgcacaattactgggttatgacaattatgcggaatatacactgaaagaacgcatggccgaaaccggtgatgccgtatataaactgctcaaccaattgctggatgcatatacccccaccgcccataaagagtacgaagctgtacaagaattagcccgtacagaacaaggagatgcttttgaagtgatgccttgggattggagctactactccaacaaactgaaagaccggcagttcaatattaacgaagagatgctccgcccctacttcgaactgagcaaagtgaaagcgggagtcttcggactggctaccaaattgtatggcatcacgtttcataagaacccggatatcccggtatatcacaaagatgtggatgcttacgaagtgctggataaagacggaagtttcctcgccgtactgtatacggatttccatccgcgcgaaggtaaacgttccggtgcctggatgacagaattcaaaggacaatggatagaagataccggtgaaaacagccgtccacatgtatcggtagtcatgaatttcaccaaaccgacagaaagcaagccggcactgctgacttatgacgaggtggaaaccttcctccacgaattcgggcatgccttgcatgggatgtttgccaactcaacttatcagagcttgagcggaacgaatgtatactgggactttgtagagctcccgtcccagatcatggagaacttcgggattgaaaaagaattcctgcatacctttgccaatcattatcagaccggagaaccgttgcctgacgaattgatcagccggctggtagatgcatcaaacttcaatgttgcgtacgcctgtcttcgccaagtcagtttcgggctgttggatatggcctggtatacccgcaatacccccttcgaaggtgacgtaaaggcatacgaacgtcaggcatgggctcaagcacagatattgcccacagtttcggaaacctgtatgagtacccagttctcacacatctttgccggaggatattcggcaggttactatagctacaagtgggcggaagttctggatgcggatgcattctcactgttcaagcaaaaaggaatcttcaatgaagaggtagccaattccttccgtaacaacatcttgtcgaaaggcggaacagagcacccgatgatactttacaaacgtttcagaggacaagaacctacgattgacgcattactaatcagaaacggaataaaaaaatagaaaaaaatgaaatataaatacttattattattacttttgatgctcccttttgtaagcggatgcaacgattcggatgatgtgaacggtatctttaccggaaaagtatggaaactgacgtatattaccaaaaagaacgaacataaaccctatgatttctggggtgataaagacaaatatgaacaatccatcaagaattacatcaataaagaaggtgcatacacaatcaaattcgaaggggagactacagacaatgtcatcagcggaaagtttagcggaacgcttttgtcacattcttacaccggaacctggagtgccaatggcgaaagcaatgctttctcagcttccgtaaaagggtctgaaaatgatccgttaggatttagtaacaaatttgtcgaaggactcaacagggctacttcgtacaaagggaattacgacaacctctttatctattacaaggatgagggaggaagagagttatgcctggtatttcatgttgataaggacaacaataaataatataacagcgtatggacacagcaaacagcaaacaatcagatttggacaagcgttatatccgcatggcttccatctggtcggaaaactcttattgccaacgccgtaaagtaggagcactgattgtcaaagacaaaatgattatctcagacggatataacggaacaccatccggctttgagaacgtttgtgaagatgataacaacgtcaccaagccctatgttctgcatgctgaagccaatgccatcaccaagatagcacgttccaacaacagtagtgacggtgctacgatgtatgtcactgcttcaccttgcatcgaatgtgccaaactgatcatacaggcaggcatcaagcgagtggtgtactctgaacactatcgcctggaagacggaatagagttactgaaacgtgcaggtatcgaagtcgtttttgtcgatacgagtgaaaaatgaaacaacatacataaacaactgactacaacgcagctctccggtagtttgtcgtccgtagccaataactataaaaagatatgagtacaaagaactcttcacggtttacccctgtcatcatcgctatcagtgtggtaatcggaattctgataggtacattttatgccaaacactttgccggcaaccgactcggcattatcaacggctcttcgaacaagttgaatgctttgctgcgcattgtcgatgaccagtatgtggacaccgtcaacatggccgaccttgtggaaaaagcaatgccacagattctggcagaactggatccccactctacttacattccggcacaaaacctggaagaagtgacatcggaactggaaggcagcttcagcggtatcggtatccagttcaccatccaggatgacactatccatgtgaacagtgtcattcagggaggaccttccgaaaaggtaggattaatggccggtgaccgtatcgtgatggtagacgacagtttgtttgtagggaaaaaagtgactaacgaacgtgccatgcgcactctgaaagggccgaagggtactcaagtaaaactgggcgtgaagcgcgctacagagaaagatcttttgaacttcactatcacacgcggtgacattccgcaaaacaccatcgacgcagcttatatgttgacagatgactttggctatatacaggttagtaaattcggacgtactacacatgtggagttgctgaatgccattgctttactgaatcataagaactgcaaagggctgatcatcgacttacgtggcaacacaggaggatatatggaagctgcagtgcgcatggtcaacgaattcttgcccgaaggtaaactgatagtctatacggaaggacgcaaatatccccgtgccgacgaatttgccaatggaacaggcagttgccagaaaatgcccgttatcgtgctgattgacgaaggttcggcttcggccagtgaaattttcaccggtgctattcaggataacgaccgaggtatggtagtgggtcgccgttcgttcggtaaaggcctggtacaacagcctatcgacttcagtgacggatcagccatccggctgaccattgcccgctattatactccatccggacgctgcattcaacgcccttatcagaatggtaaagaccgcaactacgaaatggattggctgacacgatatgaacatggagagtacttctcaaaagatagtatcaaactcgatgaaaacctgcgttattctaccgccctcggacgtccggtgtacggaggaggaggtatcatgccggatgtattcgtcccacaagacaccacgggagtgacttcatatctgaccgaggtgctgagcaaaggacttaccatccaattcaccttccattacacggataataaccgcgataagttgaagaagtacgaagacgaagaatcactcttaaactatctgcgtcgtcagggactggtcgaacagttcatacgctacgctgacagcaaaggagtgaaacgaagaaacatcctgattcagaaatcatataaattactggaaaagagcatttacggaaatatcatctataatatgctgggaaaagaagcctatattcaatatctcaaccaaagcgatcagactgtgaagaaggccgtcgagttgcttgaaagtggagaagcattccctaaggctcccgtcagcgtagaacctcaaaaggaggaaaagaaagatggaaagaaaaaaacaactgcgcaagtggatagcacaggagaagaagaaatactccgactctacgcttaaatcgttgtcggaaaaggtattgataactcttgaggcatgccccgaatttcaaaaagggcatactatattgctctatcactcaatgaaggatgaagtgcagacgcacgccttcattgagaagtggagccggtcgaaaagaatcatattgcctgtagtaacaggcgacgagttagaacttcgcgtttacacaggcccccaagatctcgccataggttcgtatggcattgccgaaccaaccggagcgccattcaccgattacgaaacaatagatctggctgtgattccgggtgttgctttcgatcggtacggacatcgtttaggccgcggcaaaggatattacgaccgtttattacctcaaattccggctcccaaagtcggcatttgtttcccgtttcaattgatagaagaagtacctgcagaagcattcgacttccgtatggatactattatagcacaatgaaaacaaattatcacacacataccactcgctgcatgcacgccgtgggagatgatgaagactatgtacgcagtgccatcaaaggtggctttcaggaattgggcttttctgatcatggcccatggaagtatcacacagattttgtatcggacatacgtatgctcccggaggacttaccggaatatatagaaagcatccgtgccttgaaagaaaaataccggaatcaaatcagcatcaaaatcggattggagtatgaatactttcccgaatacatccactggctgaaagaaatcatcaaagagtaccggttggattatatcctctttggaaaccatcattaccatactgacgaaaagtttccctacttcgggcatcataccactaatcgggatatgctcgacctttatgaagaaagcactatcgaaggaatggaaagcggactgttcgcctacctggcacatccggatctttttatgcgttcctaccctgaatttgacaaacattgtatcagtgtcagccgccatatctgtcgggcagcagcccgattgcacatccctttggaatataatatcggctatgtagccatcaatgaagcacggggaataacgacttatccttgcccgcaattctggcatatcgcagccaatgaaggatgcacggctattatcggactggacgcacacaataaccttgatttagaaaatccgacttactacgatcgtgcctgtcaggaactgaatgcgctgaagatgcccgtcatagatacaatcccattcttgaaatactgagagcaccacattttagttgtagatagaatctccgttctcttcgaacagagactctgttcataaagaatgaaggctccgtttgatacaaacaaagccttcatttattataaaagaatagtcgtttagcggaaaataatattggtaatcaccgtagccccaaccttctgattcaaattacggaccaaaagttcccgccccatcatcaactcctgacggagggcagcagaggtcaagtgtacatacaacacctgattacgaatatacaaatcccttgtgtacgacataatagtaggtcccagcaccgtctcccacgaatcaagtaagcgttgctcattcagtggagactccaagctctcctgacgcagatatttctgaatcagttttccaatcggttccgcatcgtttcgtttcatctctctttttcctccatttcattgatagctccgctctccacacgaaacattttatagtcactccccaccttatataatatacggtccaaatgttcacgattcgtatccgttatgaaaatctgcccgaaattgtcacccgccaccaactttacaatctgttctacgcgcgaagcatccaatttgtcaaagatatcatccaacagcaacagaggtaccgtacttcccgtacgcttcaaaaaatcaaactgcgcaagcttcagtgcaaccaggtacgtcttgttctgtccttgtgaaccttctctcttaataggaaagtcacccaacaacatgttgagttcatctttatgtatcccccggagcgaataacccataatcttatcccgtacccggctttctttcagaacttcaagcagagatgcttttcttgcgtgtgactcataagtcagtcccacttgctccttatcctgcgaaatgtacgagtagaacgattgaaatataggaataaactcactgataaatgcttcccgtttccggaaaaccacctcaccggcctgtgccatcatctcttcccaaacgagaaaaagctcttcttctatcggttgttcactcttcaacaatgtatttcgttgtaccaatgccttattgtagcgaatcaaagcatccaaatactccttatcatactgcgaaatgactacatccataaagcggcgacgttcgtcactgccccccgctatcaattccgagtcggcaggcgacaccatcaccaaaggaataaatccgatgtgatccgacaggcgcgaatattctttcttattacgtttgaattgttttttcgacctacgcttcattccgcaataaatctcttcgggtgttccgtccatcgcctcatagaacccttgaataacaaaaaagtcctgttcatgacgaatattctgcgaatcgatcggatttcctgcacttttacaaaaagacagaaagtagaccgcatcgagcagattggtttttcccatcccgttctgcccgaaaaagcaattcagtttagccgaaaaattcagttctacctgctccaggttcttatagttcagtatagatatacgcttcagtatcatgtgtgcacattgagtttggttacaaaagtagaaagattttcggggttttaggtcgcaaaacaaaaaaagatgcctctaaatttcgtttatatatataaaaaaactacttttgctgaccaaaatatccagttgaaaaaataacaaaaagaatcatataaaaatggcagaacaaaagaaccacaacaacgaactgaatgtggaagatgcactgacacagtcggaagcatttcttgttaaaaacaaaaaagcaatcattggcgccgttgtagccgtaatcgtaatcgtagcaggtgcaatcctctacaagaatttctacgcagaacctcgtgaagaaaaagcacaggctgctcttttcaaaagcgaacagtactttgagcaaagtgcatacgaacaagcactgaacggtgatagcatcggttctatcggtttcctgaaagtagccgatcagtttagcggtactaaagcagccaatctggcaaaggcatacgccggtatctgctaccagaatttaggtaaatatgaagaagccatcaaagcacttgacggtttcagtggagacgaccagatggtagctcctgccattcaaggtgccattggtaactgctacgctcagttaggccaactcgataaagcaacttctgctcttctgaaagcggcagatcatgcagacaacagcaccctgagccctatcttcctgctccaagccggagaaatcctgatgaagcaaggcaagaacgaagaagcagtaaaagccttcaccaagattaaggataaatacttccagtcttatcaggcaatggatatcgataaatacatcgagcaagctaaactgctgaaaaaataataacggggtatataccttattatatagaaagctacccaaaccaatctgggtagctttttttcaaccaaccaaaaacatataaattatggcaacagcatatcataacttatcagattacgattttaattcagttccgaatgcagaagaaatgaaattcggtatcgttgtttccgaatggaacgctaacatcaccggtgccctgctggacggagctgtgaaaactttgaagaaacatggagccaaagaagaaaatatcctggtaaagacagtacccggaagtttcgaacttaccttcggcgctaatcagatgatggaaaatagcgatatagatgcaattattatcattggttgcgtaattaaaggagatactccacattttgactatgtttgcatgggagtgacacaaggcgtagcacaactgaacgcaactggcgatataccagttatttacggattaattaccaccaacactatggagcaggcagaagacagagccggcggcaaactgggtaataaaggagacgaatgtgcaattactgcaataaaaatgatcgattttgtttggagtttaaataaatagttgtatctttgcatcgcaattgagaaacaaacctacttaagagaaagcaaagggactcaaaagcaaacaaaagggcaaataccagagtggccaaatggggcagactgtaaatctgctgtctttcgacttcggtggttcgaatccatctttgcccacaaaaattgcggaagtagctcagttgatagagcattagccttccaagctgagggtcgcgggtttgagccccgtcttccgctctaaagagaatctgagaaattagattctctttttttatatacaaccctaacatcctaactacacatgaaaactccttcgcaaacacatgtgctcggactggcacatcccccactcccgatggtacgccttgctttcatagggcttggcaatagaggtgtattgactctgcaacgttatctgcaaatcgaaggtgtcgaaatcaaagcactttgtgaaatcagggaaggcaatctggttaaagcccaaaagatacttcgggaagccggttatccgcaaccggacggctataccggaccggatggatggaaacgaatgtgcgaacgggatgacattgatctcgtattcatctgtaccgactggctgacccacactcccatggcagtatactccatggagcatggcaagcatgtagccattgaagttcctgcagccatgactgtagaagagtgttggaagttggtagatacggccgaaaagacaagacagcactgcatgatgctcgaaaattgttgttatgacccgtttgcactgactacgcttaacatggcacaacagggtgtattcggcgaaataacccatgtagagggagcatacatacatgacctgcgttctatctacttcgccgacgaaagtaaaggaggatttcacaatcactggggaaagaaatatagtatagaacataccggtaatccttatccgacccacggtcttggtccggtttgccagatactgaatatccatcggggagaccgcatgaactacttggtttctctgtccagtcttcaggcaggtatgaccgaatatgcccgtaaaaacttcggagcagactctccggaagcccgccagaaatacttattgggtgacatgaatactaccttgatacaaacagtgaagggcaaaagtatcatgattcagtataacgtagtaactccacgtccttacagccgcctgcatacagtttgtggaacaaaaggattcgcgcagaaatatcccgttcccagcattgccctcgaacccgacgccggctctcctcttgaggggaaagcactcgaggaaataatggagcgttacaaacatcctttcacagccactttcggtacagaggctcatcgcagaaatctgcccaatgaaatgaactatgtaatggactgccggctaatttattgtttgcgcaacggattaccattggatatggatgtatatgatgctgccgaatggtcgtgcatcacagaactgagcgaacaatcggtattaaacggcagtataccggtagagattccggactttacgagaggagcatggaaagaaaaataaaaaacttctgattattaaaagaaagggggtgtcggttttgagaaccgacaccccctttttcaacctttaattaagagatatctgtgttaaattaatatcccggattctgatcaccagccaataacggatttaagtcaatagctgtttgcggaattggtttcagacgcatacgagagctccatttcattgtaagttccgtatcaccgtcaggagtcatgataggtacattgttcatgtgctctttccagtaatcatcgctataacgagtcatatcgtcaccacggaaaccttcaccagccaattcaatgcgacgttcgttctgaatcagtttcagaccttcttctttgctcaagccagaaggtacatccggcataccgcaacgatcacgtaactgattcaaagcagcttcagttgcagcatcataaccagtagtctgtgtatgcgcttcagcataaatcaataaaatttctgcataacggatacaaggataatcaccggtcgcctgtccatcgccattagcatcattttccaatgaaagcatcttacggaagttaaatccggtctttgattcgttattaccattctttacccattcatacacaaacttatcaccataattagattcataccaactcttgaatggcatcaagatagaaacatacatacggctatcacggttacggaactcttgaatatatttataatctttcaatgttccattctttatcttttcctggcagaaagcaataaacttagcttctccttcaggcaggctgatagcccgccattccatcgctgcagagttgccataaagtcccgcaaaatttatcccgttcacacgtcccagcatttttccccacatctccggttcaatcaccctgtacagatgcagtgactggatagtctgggaaatgaaaggactcgcaacacgctggctattcaaaggcacaccggcctgataatagaggtcgtacaacctattgtatttctaacgaaaatggccgttggcagtccagatatccgttgtgtgccagtcgtaaagtgtatagatattgtctatgccttccctcacaggacatatccactcggcagagggaccaggcttgctccggtagatggtttgccagcagttaaaactttcttgagtccgtattccgacaaggcatgcaatcttcttcgcaccaagtctgttacggagccaaaaagcgaaacattcctgaaactcatagtcccacatctcacgtgtgtaaaaatcaaaatcctttgctacaaaacatccgtcggggatatccctaacccagttcgcattaggatcccatggccgccaataactctggtatagatgctgccgatccgaccttgaaaggcacacagcaacggtagacatctagtatatcccgaagcgagcgactcgtccacatatgtcgtggtcagagaatactatacttcgtaatccatatggaacacgcccattcttccaccatggagccgaagatatttcacacaggcattcaacaatacaccgctgtcttttcctcccaaaaaggagagatacacatagtcatattcgcgaaatatacgtcctatcctctcttccagagcctcgtacacgttctttttcttcaatttcatcacattcccttcacgaattctgttctttattcccggcatcagcgcgcaccaattccatcgtcatatatcttctggtttcacggacagggatgaaatccatatatttgaaaatccctacatcccattgctggacagtcgcacgtagaacagacaaaccgttctcctccgtaatgacactcttgaggagtttgagtaactggctgtttctttccttactggaagtggcataataattatctatcttgcatactagcccgtccttcctctccaccggtatgaacgccaccacttttctgccatggtataggagatgccatctaaacttcctggaggacttgtaaggatagttgttgttttcgcgaaggcacgcggcactaaggaccagttcacctacagccacataaagcttctcgcatctgccgttcaatattcgtaccttaaattccataaaattgtatttatttgcaataataaatgcaaatagagtctcaataattatcattcgggttctattaattttcttttaaggtcatattaaataaaatcgttccttgttaaacaatgatgtagcccccaaaagaagaagctgtcttcttttttagagaagacagtctcaatattatgattttctacctgttacttcctgcttctgcatccatatatctctacggaagtacagttcgtacctgttttactccccgtatcgaacagccattaatcatgggtatagattccatgggatttaaatatagactgggagtaacatagaatcctagcccccaagcttcatttttttctttctctataccgtcagggtttcgccttacggaagtccaataatggcccaggtcacccacatcccttaattgacctaaccaatttctagacgaatatcccgatgccgggaagaaaaatgtgcttcctgttttattcacccccgtatagaaactaaatccctgatcaaatccgccatctacatttatttcagccatcgtcttctgtgaacgcccatttgtagtaaatcctgtaaaagccctggatcccggaacacaaaatcctacgggacacggatcataaacagtcttaaccaagtttacattggtttgtaaaacatctaaaacggattcgtcggcattccataggttggtatatgtacaccccctatatttattggacatccttttttcaggcttttgaatacttacagcaatattctgcttgtcactggggaattcctctgtgggataagccttcgtgggatcaaacataacagttccatcggcattatataccgttctgaatacattgccttttccggtccccggtggtatggggtcttttcttccccattgatagaaagtgccggtttttccaccatactcaaatcttgcggcagactggataagttccttgatcaacacctgaccgtatgcggaaataagtttaactttacatcgtctttcattgtaggtgatgacgttttcatcacatgctccgagattgacaggcataaaatctgatttttcattttggtagttcgtaacactcacagtcctgctcatgtcggtatcagtcacccaaatatgccacgaccacattatattgtgacttgcatcatacacggcaagcactgcatttccctggcgaattgtccttttatcgaccttaaatatcagtgagtgatagtcttctgaaagtctgacatctgataccagtccataagcatcctgccatacaatcccgcattggctcggatgacagtccgtattattatagatctccggggcagaaatttcagctccacggtggttgacaaaagttgacaatatatttgtaccgaccgccttagaggtataggcagagggattagatactcctgctgctattgcatttccataaataagtggcagtgaatatactcctggggctccaaccacgtaacaattggcagtgttgatgacttctgtcaaaccctgtggatttgacaaattgtatggtacagcatcgcttccctttggggagctgttctttagcatggctgtatggtcactggtatctgtaccttcttgagggagatatgttatgagaagcttggattgctccgttcctgattctggagaggctacaacccactcaggggctatcacactccaactgttaccattgtctgtagaatattgtatactccaaggtacaggctgactggtaccttttccgtcagttctattgctgacaactgttaattgttttcttccacctgtataatccacgtttgcgtcctcacctcccaacgagaagttgtagatccaattgatggagctgttggaaattttataggtgacagtcttaccaatgggccatgcttgacctctgatatcagcactcagagtgtgatcggtgttggcattgtcagtaaatacgacttcaagccgtgcaccgtcaggaagagtctgcggaaccatcataaaagtttgattttccgtaacaagaggatcatttgcagttcctgcagtggatttattcaaagtttgggagaaagtggcaggtgtattcactgaactccatgactctgtttccatgttgtaagtccccttggaatatacatttttcaaactgacacttttcactgtgcctccctgcatgtcatcaccgcacacgaatctgatagcggtaagggcatgactgaaagtaagtggcacgaccgtattggtattgccatccaattcatctgtctttgctacgagaagatccttttggtcatcgacttgccccgagatagtgacgctgatggtaggagaaccagtctgtgtgttggccgaaaggacataattcccgttgtctttcggagcgtaggcgaagaacttcatcttgtatgaagcaccggggtaataataggtggaggaaagggtatagttaccgccggacttgctggcagtggcattgtagaagtagttgggagttttactttcactccaggaatctgtgtacgagtaggcggagacaccgaagctgtcatacatattcagatctgttatcggtgtagaacgggacaatatttttttatcgtcattgcagaaagaggcacaatcaatcttgtctgtatacaaagtatggatataaagcggcgaagctccacctaacaaagccgttacagtgtcttgagaagtacctattccattgactgaacgtgtatccatggctcccgatctaattataaacgagatacccgcagaagcagaaggacgttcaatctcatctgcacaagaactgatacagaggctaactaaaagaaataacaaaaatgcaaggtcgaacacactcttcctggcaaatgaaaaattttcaatgcaaagtttcataacattataattagaaaaataacatcaaaaaagacaaaagataaaatttatcttttcatatccctaaaatttgagacaggattggctaagcactccctcgtaaaaggaataaacctgcccaatcctgtctgaatatagtattaatacaataaaaatggataatccgggttacatgtttatatttggaacaggggtagcatcagtccaatcatctactccaacattatacataatggaccctcctaaaatgggatcaccacctttaccatctttcacaggtgcatcgtctacatcattatctgaattattcattggattgctaggattgggatcgatacgcccgacacctcctccatttggagcgcaaaaatccagagtataaatgtattttttgcctggcagccacttcgtatcgatagctacagctgcgaatgcatatttaccatccttcttatcggttgctgtaggctgaggataaattaatgtttcttcagctccatttatattagaaatacggcataatacagacaaataagcaccagtcgtattttcatcattattccatgctagtaattgctggggaatgagcataaattttgcatcaccaaacattagactttgaggtgtttcatttaaaattacaggaacttttcccttgagtacataagattttgcatgctcatttgaacctgaccaatttttccattgattattcaaatcaacatctggtaatgtaatattatctgcaccactgctaatttttccagtaggaaaatcaaaatctccttgggttgccatattagctaacttaacagctaaaacctctattttgatattcggattactgcatttagcttgcacattaatttgagagagcgcatgcttgaaattgagcgatactcctaacaactcgttattgtctttagttcctatatttcttgcgataagaagatccttttgattagcaacatcttgttccgggacaaaacttttgattgttttttcagtgttggaaatagatacacctgtaatatcggaaggagcataagcgtagaaatcaagatcataggttggccaataataaatcttagatggctgccaagcttccgtatcaattttaccggggactctgttaactagcacatctgtaaagtagttgcttccatttcctaaagctgtcactttgaatgcaactaaattgtctaaagtgagcacattagttgcccgggatctgatagccttatccaaggatgcacggaaagaaataccggaacctttgttgatatcaacgacatcatcgttagaacaagagcctaaaactgataaagccaaagctccaaacaataaataattcttcataaatttaacttaaaaaataattaataaaaacatatattaaggaatagactattaaattatcatcttaaaagtcacataggaatatctatctctatattttcccaatcatcaactgcgggatgaaaacctccaccattcacaatcggcttgggcagacgaagaccgtccaactcaatatatatgtcacgattaccagaattgagctgacttttgattattccacctacgtcaaaggtgtaggaaagtttgctgccatcggtcatgattacataaaccaccaattgctgggaagagcctacggacccaaacacaagaaaatctgtttttaggacagataccccgtcagaattcacttcaaaaggtatgatcacaggcacatttgtaagttcattaa

SEQ ID NO: 4988 - DNA, 93858 bp, Unknown
  gut microbiota DNA sequence
aagacttgttatttggaaacaaaaggcttgatttaacagagggttaaatcaagttataggaagaggaaaaacaaaaggagaaaaaggattgagaatgaaggaaatagagaaaaagggggtattttctgggaaaagggataagtgccggaccgaaagggatagttgtgattaaagcaagtatgggggcaggggattttaaaaagcaaggttgggagtgaaagcaagaggagtacaattacgaaagacaggagaacagcaagacagtcacaaggacaggaggacaaagaactaaagatcggttaattagttacgaatcgattacaaaaaaagaagccattgaagaaaatctataaaagaaataactcaaaaagcatcagacaaaagcacaaaagggaaaaaagaaattacctttcccaccatgggaagccttgttggtgagtatggtatagagttcaccgcacgaaagggcgactttatcaataaagcgatattcttttcaaaaagcagctaatcctgtgcatgggtaaactgatcccagtgaagataaccactcaatgattgcggtattactgcttcggaagaacaccgtcaacgccatacgaaatcctcaataacttacaactaaccggataattatcaatataactcttttataaaaaagacgcaaaataaatactgtgccatacggataccttcagccaccatacgccagttacggttgatgtactgattactctgcttcagaatccagtgacgacggcggatattcagagttttttactgcaaagaggaaaatcttgaacaacgacaagatcatagaatctcttgttacaggtttcccgaccagaatattgctcaggaatagcattcttctcttcaaaataaataacaacctcactgggactttcctgcatattgacaagatcaaaataatctaaagtactttcaagaagtaaaggcgataactactagaactggaaatagatgaacggctgaatctcactgctcttcatctggatgaccagataaatcatagccaccattacaatagctttacctaagaaaggaagcttgatcactccacggcaaacggcattttcccaactatccggagcaaaatggagcaggaaaccaactgccatcagtgcaaatacccgccaatacccttctatcagttgtgggaaaagctgtggacggaaagcaataaaaatctgattcagcatgtccatcgaattgtgaaagtcagcattacggaagaaaatccaacaaaagcagacaaaatggaaagtaatgataacacccaatacccggcgaataccgtgactggtctccccctttttacgcccaataatggacatccatgctttatgaagagcaagcgccactccgtgaaaagtaccccaaagcacaaaattccatgaagccccatgccatagtccaccaaggaacatggtaataatcagattgaggtattgacggaacttcccgtgacggttacctcccaaagaaatataaagatagtcgcgtaaccaactcgacaaagaaatatgccaacgtctccaaaactcagtgatcgacgctgatttatacggagaattaaagttcagattgaaatggaaaccaagtaaaagagcaatgccgattgccatatcactatatcctgaaaaatcacaataaatctgcaaagcataaccataaagccccatcaggttctcgactcccgaatagagtgtcgggttatcaaaaatacgctcaacaaagttaatacttatgtaatcggagataaccgctttcttgaacaaacctgccacaataagaaagatacccctgccgaacatttcctgcgacacatagagcggtttacgaatttgcggaataaaatcacgtgcccggacaatgggaccggccaccaactgtggaaagaaagagacataaaaggcataatccagcagactggtcaaaggtttgatctctttcctatagacatcaatggtgtagcttaacgactggaatgtgaaaaaggagatgccgacaggcaaaaagatgtcaagtgccgtaaactcccctcccatcagcgaggcaatgaccccacccagaaaattggtatatttaaagtagcagagtaatcccaaattgaccgatacactgagtaccacacaaaacttacgtttccagcggacatcggttcgatccatcagccaggctatcacaaaatcggtaacagtaacgatagccaacaggaaaaaataggttccactactcttgtaataaaaataataggagaaaagagcaacaaacagaatccgtgccgtattgcgatgttgcaacagtgtatagattaccataaacgcagcgaacagccaaagaaaaattccgctgctgaatatcatcggcgcatccggattatatttgaaagcctccaacaggcggctgaaatcaatatcaatgggaaacatattcattataggctttaataatggcttcatataataattctccctgaagcgtatagccttcaggcagataatgtacgtgatccggacgcattaatcgggcgtctgaccagttcttgcaggcgcgcaggcttccgcccacaacattatacatatcccacaccaccagtttatggcggcgggcaaaatcatgaatcgtgttcactgccgttaccgttcggggattaatagcgtatgtgcgacgccgacgacgttgacggaaactttcataagatcccggaggcgtagtcatcaggataggaacatcgggcagactgtcacgcaacagttcaagcaattcctccatctgccggtaatgtacattcgaattgtattttcggttatggctttcgttcgttccaaacgaaagtattaatagttcgggtttcagggctgcaatggctgcaatacggtcgggatgcgtaaaagtcaggcaagtggctccgttcacccccatatccgtataggagatcgctccgaatgtttcggtcagacgagcaccggtagtacgaggaaaaatatgcccgcgaatgtgactgtcaccaatatgaacaatgcgaacggtatcttccgaactcccgttttgcaccagccgcaaatgttcgagcaccggaaccagtatcccaagactatccacgacctcattcctccctacacctttgaaagctacgggaaaaacaatttttaccgaaacagtatcccccaatgatcccggttcacgcatcggcttacaagccctcgtgcctttatccacctgcggacaggctggcaaaaggtcttgtgcccgaaccgaccaaacaccggaaagcaaaaggatcaacacccccagccatctattcagcctcataggcctttctcctttcatactgttcttttccataaatcaatgtttcgtatagtagtcctgccaggtgacgtccaccccggaagttgatgtgtgtataatcataattagccaaagagggcttggcatgcaccagcccggccatactaccctctcctcccatagcctcgaacatgttccaaaaagcaataccactctctgccgctatattctgctggtagcggatcagattcttcactccgggcattgttcgcagttcaccggtatcagtcttatagtcacgatcgcccacactcaacaaaaggaaaccggcctgcggaaagcattctttcaggtggttaatggctgtgagaagtcctttcttataagggtcgtagtttcttccgcgttcggttgcaacgttcagtccatattccagaataatcaaatcataaggccgctgggcattaaactcttgcagcattttggatggtatgctgcgaagggaaagtcctgaactaccacgcaaagagaagttgtcgacaacaactccttgtgtgccgtccattgccaccccatagaacaaagtggaatctgcccgattgatatcccagcgtaccgaaccgatacgaccattcactttcatctgctgcaaacgaccagtagtagaaaagtcccgcgcttcagcttccccacggttgacacatacagaaagattgacctcgcccttattatagaaaaagatggatgctatctggcaggtatcgagtaaagaagcatatttattttgtccgcgaagttcaacgtaagctctttcacggggaacaaaatagtgcccggaaataccttgtttctttttatcaaagtaaacactgtcggtcactgcatgactagaccatccgccaaaagaatgacgtaccgtcggacgatagccgctggtcatcgaagttatggtgacaaagcctacaccacatccgccgaaacgcttctgcaacatctcgcgcagatcggctgtgaaaatatccgcctcaataaaggaatcaccgaacacagctatacgaaccaagcgacctttggactgaatttcgtccagcgcacgataaaaaggagtcatccctcgcatcgtcgagtcactataatcttcgatacacgtcatcccgctgcggcacgtatctacaaatgcaggtttcacaaccgggaccggcggcagactgtctgccactacttcatctttatcaggttcaggcatacggacatcactcagcaaatcgacacgcctcatcgtatgtccgtcgatcgttatagcaggcagccagtgcattccaattaatgcgaacaggacgatcaatgtcagccataacgaatatttcaaataatttttcatgcacgctcttaatttaataagaagttgcaaagatagataaaacccataaaaagagaggagaatctgcatgaaattcatgcagattctcctctgatgttatctgtgtaggcaaaggattaaatgcttcgctccacgttagtgacaaaagcccgcagaccgagctgttctgtctgcatgtccatccgatgcaacgcatccagcaacgggtccaccttcttgtcatccaccaccgttatgatggccgaacacatactgggccaggcgtggctgccgaaatgcggatcaccggtcttcgaaccacgtccctgcacacgctccaaataagtgaagccccgacaacccaaacggtccagtaaagcaatgatacgttcgtaataagcctgatcgaatgtgattaatactgatttcatatcttgatttcttctttattatttcttaatcatttcatctttatgctcttcaaagtaagcctccagctcacgtttccgcctcaataccttacgctgatgcttgatacctgtaccggcaaaaacgcagtacaaagtaggaatcaggaccaaagtcagaatagtggaaacagtcagaccaccgattactgcaatcgccatcggactccacatctccgaaccctgtccaccaccaattgccatcgggatcataccgagaactgtagtagcagtggtcatcaataccggacgaagacggctcttacctgctgttacgacagagttgagcacagccagtccacgttcgcggcaaagagtgatgtagtcgataagtacaataccattctttacaacgataccgatcaacatgatggctcccaagaggctcattacactcagcgtgctctttgtaaagaaaagggccatcaacactccactgaaggcaaacggcagtgagaacatgatgatgaatggataagtcaatgattcgaactgcgctgccatcacaataaacaccagtaccacaataagaatagccagcgtacccaggtcgcggaacgaatcttgctggtcttcgtacgaaccggctacctgaatcgttacgtccgacggaatatccatcttatcgatgatagcattacccgcattcactacattacccaacgcttcgcccgagataacagccgaaacggtcacaatgcgttcgcggtctttacgttcgatagtaggaggagcaaagcgctcgacaactttacccaactctttcacacgtacggcttcgccacgactgttataaataagaatgttctcgatactttcaatactggtacgatactccggtgcataacgcactttgatatcgtattcgtctccatcctcacgatacttggaggcaatggcaccattgatacggttacgcagatagttacctgcagttgccaggttcagtccgtgcaaagccagcttctcacgatcgaagtctacctgatactccggctgataatcactacgactgatgtttacttccgatacacctttcacattcagcagttcacgtttcaaacgtgcagctacactgtcggtttcttccatactataaccatatacctcgaagtcggcacttgcctgagcagacatacccgtgttgctaccacccaggatcacctgtgctttgctgaactccggatatttcttcaggtcctcacgcatctcgtcgcagacttgttcaaggctgatgtcacgatctcccggatcgaccagactgatattgaacgaaatgatgtgggaaccattgtcctgcatagaggcccaggtattgtctgagtcggcctgacctacggtatagttacatacggtcattacacctttgtatttattgagccactggttagtcagtttctctgagacctcctgtgccagctccttgcgtgttccgataggcaactccaactgaaccgcgatacgggcattatcctgtgccgggaagaactcggttccgatactcttggcacagaacaagctgaccacaaagaacacgatacaaccgaagatgacaatcggacgatggcgaaccgcccaattcaacatgcgggcatagcctgtatccagagcatccaaacctttctcaataggaccgaaaagaagtttgaaagtcttagactgtttcttctgcaaacgtaacaattgcgaacagagcatcggtgtcagtgacaaagcagctactgtagagatgaacatgatggcacacatcatccaacccaactgcttaaacatcacccccgacataccgcttaccattgtcagtgggaagaacactgcaatcatggtcagtgtagaggcaattacggaaatagccacctcattcgttccgtgcacggcagcctgtttcggatcagaaccgcgctcgatatgggtagtcacattttcgagtaccacaatcgcatcgtccaccaccataccgatggcaatagagagagatgaaagcgagataatattaattgtatttccggtgactgccaggtaaataaacgaggcgatcagtgaaagcggaatagtaatacaaataatcaatgtggcacgccagcgtcccaagaagaggaacaccacgataactacaaacaaaagggcgtacagtacggtttcggccaaactgtcgatggtgttgagaatgttgtcggatgtatcgacaatcactccgagcttcacgtcgctcggcaaattcttctgcaacttcggtaaagcctcggccactttctttgaaatatccacagagttggcacccgactgtttctgcaccacaatcatggctccttttaccccattattatatgtttcctgagcacgctcctccacggtatcgaccacgcgggccacatcgcgcagatagacattcgctccattgtagctacccaccacaacatcttccaattgtcgcgaatcgtcaaactctccttcgacacgcaacgaataggtctcattaccgatatcgaagttaccgcccggaatattcttattctcggctccgataatcgaactgattgtttcgatagtcagattataggcttccagtttgccggggtcgcaatatacctggatctcacgctggggagcaccactgatggataccgtacccacaccgggaatacgtgctaacgggttcacaacgcgatcgtccaggattttataaagtgccgactgactttcattggcctgtaccgacagcaacacaatcggaatcatgtcggtgctaaacttaaagatgatgggattctccacatcatccggaagctgcgagctgaccatatccaacttgtcacgcacatcattagtcagtacgtcgatatcattaccgtattcaaactccaatgtaatcagagacatattttcagacgaacgggaggtgatatgcttcaggttactgacagcattcagcgtattctccaacggacgagtcacgttgttctctatatccgaagcactggctccgggataggcggtcattaccataatcgtatttgtatcgatgtccggatacaagtcgataggtaattttgacaaagagaagagaccaaaaatcaccactgcaaggaagcagagggaggtcataatcggtttttttaccgctccttcgtataaactcatttttgctaattattaaaatgtggataatgcgccgtatgtcatcggattgtatagctttcaacttataaagctgtacacaacatacggttacattgattcattatttttctacctctacctcagtgccgttgatcaatcgggtctgaccggcaatgactacctgagaattattgggtacaccggatttcaattcatactcggtacccatgcggcgtcccagttccactttgttgtatgtcacttttccatccttgtatacatacacataacggtcgccggcaccagcttgcttcacaatagccaaatcgggaacaacgacgttctcttccgtaccaaaattcaggctggcacgggcaaacattcccggacgtactttctgattctggttaggcaattgaatctccacctggaatgtacgggtagacggatcgatcgtcggataaatcaagctgatcttgccttcgaaagcctcatcaccgtagacatcgagcttcacattcacgggagcacctttcttcaccttggtgaagtaaacctcggatacattgatcaaaagtttgaccggagtaatcttttcaacggtcagcaccggattaccaccgctatacatatcgccgctatcgtaattgcgggcagttaccaccccactgataggactcagcagagaagtattttccaacaagttctgataagcagttttcttcacgtcataggccatctttgcagcatcccattccgattttgaagcaccacctaccttatacagttcatcgatacgattgaattccacttcctgattgtccagttgcagcttagtctgtttcaagttagcagcatccatctgcactagtttctggcctttggacacatgatcgcccacttccacaaagattttatcaatacgcaccggtgatgacggagcaatgttattcttcacttcagcttctacggttgccgtgtattcctgtatctgttctaccgggcgtgctgtcacatcggccaatttcacttttggcttttcctctgttttttcagcagcacttttgtcttttcctccagtgcacgagcccaatagcacaacggcgagcagggctactaattggaaacatcttttcatattcaaattttaattgttgtgtgtttagttactctgttacttcttctcttcccaatacctgatcgagatcagccttagcaaccaaatagtcgtagatagactggttgtaagtcaactgggcctgtgtcagcgccacttccgaatcgttcaattcaaggatagtccctttacctacttcataacgtttttgggctatcaaacgtcctttttccgcctgtacgattccttctttgttgctgactacctgctcggtacttgcagccatattatccagataactggtggcttgcatggtgagttggcgatatacgttggtgcggttctcggccagttgctgcatctggatcttagtttgctttaccttcgtaaagttacttgccttaaacaaagggatactcagactcagaccgacagtagaatatgggaaccacttgtaatgcgacatcttgaagtcattattcagcgatgtatacgaatagttgaacgatgcagccaatgtcggcatgaaattggttcgctgcacagccagtgttttcttcaacaagtcggcatttaagtccaactgcttcaaatcgctgttgttattcagattcaactggttgctttccatctgacgacggaacatcaccatttcatagtccttcagattaccatcggcagcaatttccacctccgtatccatacccatcagtacctgcaactgcaagcgggcaagattcactccgttaccggcagatactaccgagggtttcaggctacgcacctgtacgtcggcgcgtatcttatcatactcgctaaccgttccctgctcatatttggctttcaccacttcatagttggcttctgcctgcgcataactctgcaggagcactttgtagctgtcctgggccaacaacaactgataatatgccttggtcacctggttcaccaagtcgagtttcgacgagcgtgctttttcaacagccagttccacatctgtcttggtcagattgatactcttgtaaagcgtcggagcaaatacagggagactcacattgagtcctccgttgtacgagttgtccgaacctacctggatggtctgcgattctccgccaaagtccatcaccattgtctgtttttttagtgtccgcgagtaagaacccgtcaatgaaacctccggaaatagtccgccgtatgcctccttcttagcctcttttttcagctgaatctcttggccggccactttcattgtggggttttcgctcaatgcaatttccagtgctttgtcaagcgtcagtagcacgatgtcctttgcctcctgtgcctgtacataacccaccgagagcagtacaaccaccgccaaaagcatctttttgcttaagaaacatttcattttgttcatacaataattttagttgtttatcttctttgggaatctctttattccctgtcttagtgtatcctttgttttctatattccgttataaaatcttccaatacctttgcccctttctctgtcgagattccccggatgtaggtaaacataatcgcttcgtaaacctcaaggaaggagtatttgttgcaaatatccgtattcatcaataagtcgagctgttcgtgaaccagcaggttgacaatggcaaaattgacatcatccctgaatatgccctgcttaatgcccatcttaaaaaattcgatcgtactgtccgagtcccgctcccgatagttcttcagcagactgtgtactttcggatacttctttatatcttcaaaaaaacgcttgttagtccgatggaatgtctcaatgctccgctgataacacacaagaatgacttcaagaacattctttgagttagccaaggtctctgccagaaaagcattcatctcttcctgacgttttaaaatacactgggtcagcaagctctctttatcctgaaacacttcgtaaagtgtacgttttgatatacccaaggacgcggctatgtcgtccatcgttatactcttgataccatgtgcagtaaaagcctccgaagctgtctcaataattctgtctttcaattctactctttgtgagttctctttcgcattctcaatcattaacccgttcttttgttgttagactatcgattatcagcgttttcgtccaataaaaacgaaaaactgaacaaagataagcagaaaactcgacggggtaattcagtttcctgatttaagcacacatatttgataaatattataacttccgaaacaaatatcaaaacaagtgttaacagagaatgaggatacaaagatagggcgaggaaatacccttataaaggtattcccgcccatcggaagagaaaaatcgataaacagcggatatacttcgatgaatgaagaagtgagaggaatgacaaagaagactccactaatactcggatctggtccgattgagaaaagctaccgttttatgaatttctttgtacatcacgatatcatcctttacaaacggaacctctttgcgatatgcagccagatagcgctcaaggatgggagaagtttttgccggacgacgaaacccgattccctgcgcagcattcatcaactcgatggcaaggatatgctccagattatccatgatccggaaaagtttggtagcggcattggctcccatgctaacatgatcttcctgaccgttggaagagactattgaatcactcgaggccgcatagcagtacatcttattctggctgaccatagaggcagcagcgtactgaggaatcataaaaccggaattaagtcccggattggcgaccaaaaattccggaagaccacgcaaccccataattaactgggctacacgccgctcggaaatgttgcccagttcggccattgcgatggcaagaaaatcgaaagagagggccagcggttgtccgtgaaagttgccgccggatatgatctgatcttcatccgggaaaatggtcggattgtccgtcactgaatttatctcagtcaacaaaacagaagagacgtaccggatggtatctttcgttgccccatgcacctgaggaatacaacgaaaagagtaagggtcctgtacatgttctttggtacgggctatcagctcacttccatgcagcaggcgacgaaatatctctcccgtctcaatctgaccgggatggggacgaatctgctgaatacactccataaaaggatcgatgcgcccatcgaacgcttcaagtgaaagggcagcaatcatatctgccttctttgaaagcctccgggctttgagcaatgcaaaaactccgttggcactcatgaactgggtaccattcagcaaagcaagtccctccttactcatcaatctcacaggctcccaaccaaactcgtcgagcacactgatggcttcccgctttttacctttataataaacatcgccaactccaatcaaaggcaaaaagaggttggccaacggcgccagatcacccgaagcccccaaggatccgcgatcgtagacaataggcattacgtcgttattgaaaaagtcgagaatgcgctgtacggtgatgacctgtaccccgctgtgacccagggaaagagcatgggctttaagcaacagcatcagcttgataatgaccgggcgtaactcctcacccacactgcacgcatggcttttcacaagattctcttgcaaggtgttgagttcatcggacgatatgtttttactgcacaacgaaccgaaaccggtagtgatgccatacagtggctcggtggaagccgcaattttccggtcgagataatcacggcatttccggatgcgctgttcggcttcgggagccagttcaagtttcaggttttcgttaatgatgcgttcgatgatactgaaagtcagttcaccggagcctacataataaacattgttcattggttcagttcttggttgacaacttcaagtaattctttctcacgcatgcatgccaattgttccaaatggtcggcttcccgcttcagctcgtcaacaaaggttttatccttgagcgaacccagattgatgcggacgttcagcaaagcgcccaatactgccgaacgggcagccatcatggctacacatgcgtccgtaatggcattctgattgcccaaacgcgctacatcagctatgatctccatcagctcacaggcattgcgcgccacctgcatcggaacgagggccgcaaaacgagtggcctcctggatagcagcactacgagcggccttttcttcatctgtagatttgggtaacttgaaacaaccgaaaacatggtcgtatgcctcggaatcacggtcaatgtattcaacaaaaagctcctgctgccggatgctcagacgggaaatatgcttcatcaactcttcatgttcttcgtatcctttcttcccgatggtaagtccggccaccattgcagtcagcgccgaggccaccgcaccgttaagagcagccacactgccgcctccgggtacaggatcactaccggctactttatctaaaaattcttttacggtcaattctgctaacataattcttcaagtattatcgggtttatatctcaattcagacagacggataaagcattccgcctttgatagtcgtatttacacaattcatcccgacataatagggaagaatatggtaattatcggagtcgagcactacgaagtcgccttttttacccacttcgatactgccgatagagtcggcacggttgagtgcagccgccccattcagggtaagggccgtaattgcttcttctacagtgagctgcatgtgaatgcaggctaaggcaaacgtcagtggaatggaaccggagaaacaactgcccggattcaggtcggtagccagggctacggcacatccggcatcaatcatgtcgcgtccccgtgcataaggctccttcaaggcaaacgctgtgagcgggaggagtgtggcaaccactcccttacgcgccatggcttcgataccggcatcggaagcatgaagcagatggtcggcagatacagctcccaattcggcagccagttcggcacctcccaaagagacaatctcgtcggcatgaagttttggtaagagaccataatctccggcagctgtaagcaaacgacgtgactgttcgatggagaaaacgccttcttcgcagaacacatcacaaaattcagccagtgaatcccgctgaatcaccggaagtaactcacggatcaggaagtcaatataatcatcaggacgctctttatattcgtcaggcaacgcatgtgcacccaggaaagtaggcacaatatccacccgtacaccctcatctttattcaggctgcgcatcaccttgagttgcaacaattccgtttcgcggttcagaccgtatccgctcttgccttcgacggtcgtaattcccatggctgtcatcttcttgaggagtccttctgccttagagcgcaaatgaatgaaagagagttcacgggtagcctgtactgtactggctataccgccgccacgttgcatgatagacatataactctcccctttgaggcgccacgaaaattcttcggcccgctctcccccaaatacgaaatgggtatgtgaatcgacaaaacccggcaagagacacttcccacgagcattgtaatgccagaagtgatgataatatccatcacgcacttcaccccggttgggaccgacataggtaatgatcccatctacaacttcgactgtcgctttctccaaaattcgcagttccgccatctctttccctttccgagccgaaaagccgagcggagtcactactttggcattgaatataattaagttctcactcatgattctctattccattatacgtgattcaagcacttgccgcatggagaaattctccagaccgaggtagtaggaagcagtatcgatcagtgcttccatcgggacgagccctacgatttcgctaccgagaatggtcactccatagcgacgggcttcgatgcgcaccaactcgaaagcacgataaagtgccgtacgggtatagtcggtcatgttgatagacacctgggtaatgttccgttccttcagttctacccccatcgctttgacataacgcaaaccaccattgatataacggatatttttggctatcttggttgcaatttcaagattatcagtactcagattgatattataagccaccagcggcatacgggcaccgatagcgactaccccggctgtaggatggcatccggcaggaccgtaatcgggatgccattcgggcagtttcatcttctcggccatcccttcgaactctcctttgcgaacagctgccagattttcacgatgaggggctgtcgccgatttctcataaaggaagacaggaaggtgataaagcccggctaccttctctcctatctcccgggaaagagagacggcttcgtccatcgtcacgtttttaatgggaataaagggcactacatcaacggcccccatgcggggatgctgcccccggtggtgattaagatctatcaattccacagccactccaatagcctcgataacagcatcacgcagagcctccggctcgccgataagggttactaccagtcggttgtgatcttcatcattgctataatcgagcaatttcaccccagaccgggcacggaacggagcgacaatacgatctatcttttccagatcccgcccttcactgaagttggggacgcattctactattttattccagttcatactacatcgttttaagggcaccacagattacacggattcttacagatcaagatttatttttattctcattattccgcaactattctctttatcaactcttcatctgccagataaggcagcgtgatgtggtaggcatcaccatgtgacagattgaacgcttcgctgctttccatcgcatgttcattgcgggcccacgaacggcgggccactccccccatcacatcccaaagcatagaagaacggaggatttcgtctactctcaggctcccgtcacacaccataccgaaacctccgttgatagctttgccaatgccaactccgcctccgttgtgcaaagctaccaggctcatgccccgggcacaattcccggcaaaacactgtacggccatatcggccattacattgctgccatctttgatattagaggtttcacggaagggtgaatccgtaccactcacatcgtgatgatcgcgtcccagcataataggcccgacttctccgtcacgcaccatttggttaaaccggagagctatcttcaaacgaccgacagcatcctgatacaatatacgggcctgtgtacccaccaccaaccggttcttgccggcatcccgtatccagttataattgtccagatcctgtccgcgacgtttcacatcgatacattccatcgcagcacggtccgttctggcaagatcttcggggttaccactgagacatacccaacggaatggaccgtaaccatagtcgaaaagctccggccccataatatcttccacataactcggccagataaagccgtctttttcatcggttccgtttcgtgaaatctctttgactccggcatcatagacagctttcataaacgagttgccgtaatcgaaaaaataagttccgcgggaaacaagtttcttgatcactgcaaaatgacgatggagggattcgtctaccaactgacgaaacgcttcgggagattcatgcaacaaccgggtacgttcttcgaaagtaactccggcaggacaatacccaccttcgtaaacagcgtgacaggaggtctgatcggataaaagttcaataggaatatcttcctgaacggcatattcaagcagatctactacattgccatgataggccaccgaacaggattcatgccgttcagcagcgctcagtgccatccggaaagcggtatggagatcagtcgtgacatgctccacccacccttgcttgtaacgggtttcaatacgcgagcggtccacttcggctataatcgaagcagcaccggctatttcggctgccttgggttgggcaccgctcataccacccaaaccggaggaaacgaacaaatgtccactcaagttcttatcttgagggatgcctagcttgagccggccggcattcagcagagtattgaatgtgccatgcacaataccctgcggaccaatgtacatccatccgccggctgtcatctggccatagttggcgactcccatctgggctgcctcatgccagtcatgctgattgtcgaacatgcctaccatcattgaattggtgataatgacccgaggggcatcgggacgggaatggaaaagtcctaacggatgtcccgattcgataacaagcgtctgttcacgcgtcaggagttcgaggtattgttttatcaaccggtattgcatccagttctgacatacctgcccggtctcgccataagtgacgagttcataaggatagagagcgatatcaaaacaaagattattgtcgatcatcacctgaaaggccttgccttcaatacagttcccctgatattcgtcgatgggtttggctttgaggtcgcctgccggacgaaaacggtacccatagattcgtccccgggtccgcaactcctccagaaattcaggagccagttttctgtgcagttccacagggatataacgcaatgcattttttaaggccgtgacggtctgtgccggcgaaagggtatatccacggtcgggcgcccggcgaataccttcggcgaatatcggatattcaggtaactgattgctgagagtcattttcataataagaggaattaaggattacaaactgtcagctctacaatttgataactcttcgcaatatagaaaaaaggtgggaatctaccaagatttcagcagatttattatcaaaaggttagaataataaaaagaagcaaatgagtagccgcctgttagggttgtatagtggcaagacagcagtccctgctgctgatcgaaacgctacttctcttccgccttcagcagtcgcagatatttgtcggtaactttggcggactcgctattttcattcagataggcggctttccaatcaggatgccccccaagcagttcttccatccgctcttttccgacaaatcctaccttattggtttcaggatctatttcataatatacccgtttggatattaaagcggaagcagcaatcgcatcaccgaattgaccacccagcatcacatccatcgtggcatcgctgccggcagctacggaacctaaaggaatggcactaaaataaatatggtctccaatgcgcagggcgggagcataccaacctccgaaacgaaacttcttatagcgtaatctcttgcagttcacataaagggaagtgtccgcctgcacggcataacagcgggacttcaggtatttgcacatggaatcgtccggaccggcactgatcttatagtcggcaccaccggtcatcagaatatgattctttgtacgtttctccactttcagcgaggcaaccgtatctccttcacaagcgagcagccctttcagattggaatatacgacattctgcgcagtaacatccatcactacccaactcatcaacagcaggaaacacaatttcttcataaacgcatcctattaaagactttcatggcggaaaggtacaccttttaacgaatcggagcaagttttcagaagaaaagtttaagaaaaaggagaaaacacttgacttttgctctccaatgtcgtatctttactatcagaatcataaagtacgttcaatttatattaggaatgaaagagggaggctattgctccctttttttatggaatcacttcacccaacctccccataacagacggaactaaagatgagttcaggctctgtttgccctgaagcaaggctctgccgaaacgaaacagcggctctatttcactcggatcccggctctgcaagttctctacccagtagctttggcaagaaaaggccgggatgtccggagatataccaagaagaatatgaagaatctccggaagagacgggaaatgtacctgaaaggaaagcggaaaccggctccaacgttaataataagtaaatctgctcttgacaaaaacaagctcatgccgagagagcgccgtactcacgctaaatatattatttttgcgggtcaaacaatcaaggaaatatggaacaactaaatctcatcatagacacttatcaacggattattctcgaatcggaatcgaagctggcaaaggtaaaacaacacatttaccgtatcggtacactccgactgatacttttcgcggcaggaattgcaggtatcatttatttctgggacgagggcaggctggtgatcggtggtatcgcggctatcaccttcatcccctttatattattggtgaaactgcacaaccggttgtttcatcagaaagattaccttgaaaagaagatagaaatcaaccgacaggaattacaagcccttacatacgatacgtcagctttcgataatggggaggagtttatcaatccatcacatctttatacttatgacctggacgtatttggagaacattcactctttcagtacataaaccggactgccacgcaacccggtaaaaaaagactggcagaatggatgaatatgcacctgaagagcaaagcggagatagagaaacgacaggaagcagtacgggaactggctccggagttagaaatgcgccagcatttccgtgtactcggattgctgcataaaggtaaaactgctgacgaagaagaaatcaggaactgggcttcgagtccggaatattatcggaagaaatggtatttccgaactttggctatccttatccccaccgccaatgctgtctgcatcgggctggccatagccggaatcatctcattcaccacatggggaatcgtcttcgcaagtataggattgttcagttcttcattctcaaaaggtattagccggatgcagtctgtttacggtaaaaagatgctgatactgacaacctatgcacgactcattcacattattgaggagaaaaaaatgcgatgcagcgcattaaaggaaatcaaggaattggtgggaggtgaaaaacaaacggcttcacaagccgtaaaacgcctcaccgaactcatgaatgcactggaccaacgaaacaatatgttaatgcaatttgtcctgaacggactatttttctgggaattgcggcaagtcatgaagatagaagcctggaaggaaaactatgcagcccacctgccggattggcttgaagccattggcgaaatggatgcttactgttcgctggcctgttttgcgtataatcatcccggatatgtgttccccgaaattgcatccaaaccattttgcgtggaggccgaagcattgggtcatccattgatgaatcgaaataaatgtgtacgcaatgatatccggatcgcaaagcgtcctttcttcatcatcataacaggtgcgaatatggcagggaaaagcacctatctacgtaccataggagtaagctatctgctggcatgtatcggagcccctgtctgggcagagaagatgaagctatatccggcacaactcgtcaccagcctgcgcacgaccgactcattggcagacaatgaatcgtatttctttgcagaactgaaacgactgaaacttattattgataaactgaactccggcgaggaactgttcatcatactcgacgaaattctgaaaggaacgaattcgatggataaacaaaagggctccttcgcactgatcaaacaattcatggctttacaggcgaacggcattattgccactcacgatctccagctaggctctcttatcgatctattccccaaagatatccacaactattgtttcgaagcggacatcactaacaacgaactgactttctcctacaagctcagagatggaattgcgcagaatatgaatgcctgcttcctgatgaaaaaaatgggaatagccgtcatcgacgactaatccccatttcgtattgaagcttgaattagaatcagtgtccttttgtcttagtcaggaaagcggcaatagaagctgcttcaccattcgtgaaataacgtacggatgtaaccgggttataagtatagggtacaaattggaacaattgtacggcggcaaactttctgtcttcggacagcattacatctaaacgcagatttccacttgtaccacctttggcagttgattgcatagagaaatcacccgacttcaccatgtctgtcaattcatccagatgtttcaaatcaaaaaagatactttgctctttagcaacactgcccgtcggcaagtaaacaatctccttggatttccagaacaaccggaaaacgccaatcaagaacaaggcggtgcctagtaccataagtcccatactgatagtcgatgaacggtcttccatctcaaaagtagaaacaaatgcaatcactcctgccaataacataatgcaagagaagataagtccggaaacactggtgcgttttgcaatatctgggtgtgaagatgcaaaaattgttgcatcgatagcttgggttgtcataatattgaagtttaaattattagtaaataatagctgataaatactaccacacctataactaacaggcacggcaacataaaataataatagaactaataagttaaactcctatacaataatacgccttagagcgaaaacatagtattcgcttacaggatgacaacaataagaagtagtggtttcataaagcttcccccaatgctgagataaaacagcatcacggtctgccagcctttgagcaagggcttttaaagaaaaaatagattcggccgcttgtatacgctgtatgcgcgacattgcaatctgatgcgtctgaattccggtcccggccaattcggcatcagggaaatagggtgtctgaggactgctgactgtttcgtgcgtatcccctttcattgctgacatagccatatagatatcttgttccgcctgtttttcagcgaaatagtcgttagctacactatgaagtgccacagcaaacaacatgaacaatataattttaatgaactttgccatatctgcctgcaaatataacagattattcagtccgactgttcaccttcaaatgtttttaatgtatctttagtaaaatcaacaaaaaaggccactcttttcagagcagccttttttatatctataagaataatagttgaattattctgctgattcagctttcagttcttcagttgcaggtacttcggcagcaggagcagcttcagtagttttctttgaacgacgagtacgagttgctttcttagcaactttctctttagccatgttttcgttgtagtcaacgagttcgatgaagcacatttcagcgttgtcacccagacggtttccagtcttgatgatacgagtataaccacccggacggtcagcaatcttcacagagatttccttgaacaattctgttacagcgagtttatcctgcaagttgctaaatacaacacgacgagagtttgtagtgtcttctttagactttgtgatcaaaggctcaacgaatttcttcagagctttcgcctttgctacagtcgtagtgattcttttgtgcttgatcaaagaacaagccatgttagataacatagcacttctgtgagaagcagtacgacctaaatgattgaatttcttattatgtctcattttttattctttatctaatttatatttagaaatatcggttccaaacgacagattcagactttccagcaaatcatcaagctcggtaagcgatttctttccgaagtttctgaatttcagcaggtcagttttgttgaactgtaccaaatcgcccaatgtttcaacatcagcagccttcaagcaattgagggcacgtactgacagatccatatcgacaagtttagttttcaacagctgacgcatatgcaatacttcttcatcaaactcttcattaccatcaacgtcattactttcaagagtaattttttcgtcagagaataacataaagtgataaatcagaattttagcagcttctttcagcgcttctttcgggtgaatggaaccgtcggtagtaatttcaagtaccagtttctcgtagtcagtcttctgctctacacggaagttttctacagcatacttaacattacgtatcggcgtatagattgaatcgattggaattacattaacatcggtacaatattcgcggttttcgtcagcggggacatatccacgacctttgttaattgtaatgtcaatctgcatagttgctttagaatctaaatgacaaataactaattccggatttaacacttcaaatccagtcaaatacttacctatgtcacctgctttaaattcactagaattctcgatagtgatgctcaccttttcgctctcgaattcttcaactacttgcttgaatctcacttgtttcagattcaagataatgttggtaacatcctcttttactccaggaacactagaaaattcgtgctcaacaccttctatacggatagtggtgatagcaaaaccttctaatgaagaaaggaggatacggcgcaaagcattaccaacggtaataccaaaaccgggttccaagggacgaaattcgaatttaccgaatttggcatccgcttccaacattaatactttatcaggtttttgaaatgctaatatcgccatgaaattaattattatttagaatacaattcaacaatcaaatgctctttaatgttttcaggaatgtctgctctttcaggaatgtgcagcaatttgcccacctttgaagcttcatcccattccaaccaagcatatttgctgtgattgaaaccagcgagagaattagcaattacttccaaagatttagatctttcacgaacgccaatcaactgacccggtttaactgcgtatgaaggaatgtttactacctgtccatcaactgtaatgtgtttgtgacctaccaactgacgagctgctgcacgcgtaggagcaatccccaaacggaacacgatgttgtcaagacgaccttcaagcatctggagaagtacctcaccggtaatacctttagctgtagctgccttttcgaacaagttgcggaattgtttttctaatactccataagtatatttagctttctgtttctcacgaagctgaataccatattcagaagtttttctttttcttgaatttccgtgctgtccgggaggatagtttttcttcgacaaaactttatcagctccaaagataccttcaccgaatttacgggctattcttgattttggtccagtatatctagccatttctttttaaatatttaattgtttattcatgaactcaatttgttgcagccgcgattacagagaagaaattaatgcaatccaaaaacaaaatcaagtatcatttttattaaaggtaaatcttaaactctacgtcttttcggaggacgacaaccgttatgcggaagcggagttacgtcaatgatttctgtaacttcaataccggcaccatgaatcgttctgatagcagattcacgaccgttacccggacctttaacatatgcttttacctttctcaggccaagatcaaatgcaattttagcacaatcctgggcagccatctgagctgcataaggagtattctttttagaacctctaaatcccatctttcctgcagacgaccaagagataatctgcccttcactatttgcaagagaaacaataatattgttgaaagatgaatgaacatgcaattgtccattagcatctaccttaacatttctcttcttagctgcgactgttttttttgccatatcaacaattattatttagtagcttttttcttatttgcaacggttttctttctacccttacgagtacgcgcattgttcttagtgctctgacctcttacaggcagaccaatacggtgacgtacaccacggtagcaaccaatatccattaatcgcttaatgttcaattgtacttcagaacgaagatcaccttcaaccttatactctgcaccgatgatctcacgaatctttgcagcctgatcatctgtccagtctttcaccttcagatctttgtctacaccagctttatctaaaatttttgctgaactactacgacctattccatatacataggtcaacgcaatctcacctctcttattttgaggtaaatctacaccaactattcttatagccatatactaaattattttttttgcaaaaataataaattatccttgacgttgtttatacttaggatttttcttgttaataacatacaaacggccattacgtctaacgatcttacattctggcgtacgtttctttaatgatgctcttactttcatatcttattttatttatatctaaatacaattcttcctttcgataagtcgtaaggagacatttcgactctgactttatcacccggtaggattttaatgtaatgcattctcatcttaccagaaatatgagcagtaatctcatgtccgttttctaattcaacacgaaacattgcattagacaatgcttcaactataactccatcttgttctattgcagattgctttgccatatattatatcgctttatctcctaaaacttcttctatgaatttaaatgatgacagaatatcagcctcgcctgcacctaccgcaatggtatgttcaaagtgtgcggcacatttccgatctctggttctcactgtccatccgtcacgttccataataacttgtcggtcaccttgcgtaatcatcggttcaatcgcaatgcaaagacctttctttaaaagtgttccgtatcctcttttaccataattcggtacctgagggtcttcgtgcatgtctttaccaataccatgaccgacaaattcacgcacaacaccataagaatgggactcacaatattgctgaatagcatatccgatatcaccgattctttttccctgcacagcattttgaatgccaatatacaacgcctctttagttaccttcaacaactgacgaacttcttcgtccacttcaccaacgcaaaaggtataagctgaatcaccacagaaaccattcatgtaggtaccacagtcgaccgatacaatatcaccgtctttcaacacgatatctcccggaatgccatgcactacctgttcattaaccgatgtgcataaagaagcaggaaacggatctccatattgattgggaaaacctttaaaggtaggaacagcaccatgatctctgataaactcttccgctaccttatccagctctttagtggtaactcccggtttcacaagcttggcaacttcagccaacgttctaccaacaagtaagttactctgacggagcagctctatttcatcttcagttttaagaaatatcatttctactcaaagaattaatatgcagctacactactaccggtgcgtcctttgatacgaccagacttcaacaaaccatcataatgtctcatcaacaaatgactttcgacttgttgcagtgtatccaaaacaacacctacaagaattaacagagacgtaccaccgaagaattgagcaaactcagccttcacaccaaagataccggcaaatgcgggcatgatagcaatgaaagccaaaaagaaagaacccggcaaagtaatacgtgacatgatatcatcgatatactcagcagttttcttacctggcttaattcccggaatgaaaccattatttctcttcatatcctcggccatttgagtcgggttaatggtaatcgcagtatagaagtacgtaaataagataatcattactgcaaaaacaaaattataccagaaactcgtatggtcagtaaatgcatgaacgaaaccactcacattgttagtgttagaaaaaccaatgaaagtgatcggaataaacataattgcctgggcgaaaatgataggcattacaccggcagcattcactttcaaaggaatgtactgtcttgcaccgccatactgtttattaccaacgattctctttgcatactgtacaggaatttttcttgtaccttgtaccaaaagaatagctccggcaattacgatcagcaggaatactatttcaaataagaacatgatcaaaccaccagtcttgtcggtcatacgggaaatcaactcctggaataatgactgaggaagacgagcgataataccaatcaagataataaatgaaataccattaccaatacctttatctgtgattctttcaccaagccacaggataaacatacttccagctgccaaaataatggtagaagtaaccatgaacagagtccaatctaatgaagcatttaaggaaggtccagcctgcattttaagattgagcaaataagaaggggcctgaaccaacaaaatagcaatcgtcaaataacgagtatattgattcatctttcttctgccactttctccctctcgctgaagtttctgaaaatacggcacagcgattcccagcaactggataacgattgatgcagagatataaggcataattcctaatgcgaaaatagatgcattagaaaatgctcctcctgagaacatgtttaacaaggctaaaaggccctcgcttgtttgttgatgcaattgtgtcagcatacccgggttgattccaggaagcacgacgtacgaaccgaaacggtaaatcgccacaaacaatatggtaatgaggatccgttgtctcagatcctcaattttccatatattctttaatgtttcaatagcttttctcattgaatcagagttttactacatttccaccagcagcctcgatagcagcaactgcactcttagagaatgcatgagcttctacactcaacttagcagtcaaagttccgttacctaatactttaaccaactggcttgaagaaatgaatccagcttcaataaagtcattaacacctactttttccaacttcttagcttcagctaatttctggattgtttctaagttaatagctttatattcaattctattgatgttcttaaaaccaaatttaggtactcgacgttgaagaggcatctgaccaccttcaaaaccgattttcttagagtatccagatcttgatttagcacctttatgacctcttgtagaagtacctcctaagccagaacccggaccacgtccgattctttttcttgttttagtagagccttctgcaggttttaaattacttaagttcatattgtaattcgttttatattcaacaaataattacttaacaatggcaaccaagtgtttaaccttatctaccattccaagaattgaaggagtgctttcgtgttcaaccacacggttcaatttgcgaagtcccagtgcatcaagagttcttttctgatcagccggagcaccaattctacttttaacttgtttgatctttatagttgacatatctccctccttatcctctaaatactttttcaacactaattcctctgttctgagcaatcattcttgcatcacgcatctcgcctaaagccatgatagtggcttttacaaggttatgcggatttgaagatccttttgatttagccaaaacgtcagttacaccaacactttccaatacggcacgcatagcaccaccggctacaacaccagtaccgtgagaagcaggtttgatgaatacttcagcaccaccaaacttagctgactgttcgtgaggaacagtacctttcagtacaggcactcttgtcagatttttcttagccgattcaacacctttagcgatagctgctgttacttcaccagctttaccaagtccccaaccgataataccttcttcgttacctacaactacaattgcagagaaactaaaagttctaccacctttggttactttagtaacacgattaatagcaactaatctgtctttcagttctatatcgttagtaatcttaactctattattaactcctgccataatgattaaaatttaagtccaccgttacgagcagcatcagctacttcttttactctcccatgatacaagtaaccattacggtcgaaaacaacagtcgtaatacctgcttcctgagcttttttcgcaataatctcacccactttagcagcaacttctttcttaggcaacttctcagtcatacccagtgaagaggcagcagccaatgtcttaccagacaaatcgtcgataatctggacatagatttgcttgttacttctaaatacactcatacgcggacgtgcagcagtacctgacactttattgcgtactctatatttgatcttaattcgtctttctatttttgttgtcataataatacaaatttacgtaaattacttagcaccggctgatttaccagactttctgcgaatttcctcgccaacaaacttaatacctttacctttatacggttcgggcttacggaaagaacgtatcttagagcaaacttgaccaagcaattgtttgtcacaagactctaaaagaataagaggattcttatttctttctgattttgtctctactttgacttcaggaggcaactgtataaagatattgtgtgtatatcctaatgctaattcaatgatatttccttgattagaagcacggtaaccaacaccaacaagctccaattctttcttatatccttcagaaacaccaacaaccatgttgtgtactaacgaacgatacaaaccgtgaaatgcatgtttctgcttgggattatccagcattgcattttcgttttcagttaaagtgatgtgtccatcttcaatagcaacattgatagccgggttcacatactggctaagttcacctttgggtccttttacggtaaccacatcatctttcagagtaactgttactccagcgggaatactaatgggtaattttcctattcttgacattgctttttcctcctattaatatacataacacaatacttcaccaccgattttcagttcggcagcttctttgtttgtcattacacctttggaagtagatattatagcaatacccaaaccattaataacacgcggcatatctttgtaaccagtatactgacgcatacccggagaagatattctttcaagttttttgattgcgttaactttgttaacagaatcatacttcaaggcaactttaatagttccttgaggaccatcttctacaaacttataattaaggatgtagcctttttcaaaaagaatcttagtgatttcttttttcaaatttgaagcaggaacttctacaactctgtgctttgcattaattgcgttccttaacctcgtcaaataatctgctattggatcagtcatataaaaaataattaaattaatcaggactaccctgacaatatttaaacaatatatttaccagcttgctttcttaacacctgggatcagcccattagatgccatctcacggaactggattcttgaaacaccgaactgacggatgtatcctttaggacgaccagtcaatttacagcgattgtgcatacgaatcggattagaattcttaggaagctcctgtaatttctgtgcagcttcaaaagcttcagcaggatctccggttctcacaatctgcttcaaggcagctctcttttcggcatatttggctactaatttagcacgctttatttcgcgtgctttcattgattcctttgccataatttatcagtcttttttagcgtttttaaacggtaaaccgaattctttcaataaggcataaccttcttcatctgtttgcgcagaggttacaaaggtaatattcattccgagaattctggtaatactatcgatattaatttcagggaaaatgatttgttcctgaataccaagggtatagttacccttaccatcgaacttagtttcaatacctttgaagtcacggatacgcggcaaagccacacgaaccaatttttccaggaattcgtacattctttcacgacgcagagttaccataactccgatcggcattttcttacgcaacttaaagttagcgatatctttacgcgaaatagtagctacggccttctgaccagtgatagctgtcatttcgttgattgccacttcgataatcttcttatcagcaacagccatacctaaaccctgattgataacaatcttcttaagtacgggtatctgcattgtagaagaatactggaattgtgacttcaatgcaggagcaatgcgctctgcatattctttcttaaggcttgcagtattactcattacttaatctcctctcctgattttttagaataacgcactaaagttccctcagaacttacttttctaccaacacgcgttgctttaccagtttttggatcaaccggattcaagtttgaaatgtggataggagcttcctgcttaactataccaccctgcgggttctttgcatttggttttgtgcttttagataccatattgataccttcaactattgcacgtccttctttaacaagaaccttcaatacacgaccagttttacctttgtcttcaccagcatttacgtaaactgtatcgccttttttaatatgtaatttactcattacttaaatcttttacaaaattaaagtacctcaggcgcaagtgacacaactttcatgtttgtagcacgaagttctcttgctacaggaccgaaaatacgactacctctaatttcacctgcattattcaacaacacgcaagcattatcatcaaaacgtatataagaaccatcgggacgacggatctctttcttagtacgtacgatcaaagcttttgacactgcaccctttttaacatcacttgaagggatgacgctctttacagaaacgacaataacatcccccactgaagcgtaacgacgacctgtaccacccaaaacgcggatacacagggcttctttagctccactgttgtcacatactgtaagtctggattctacttgtatcataattacttagctctttcaattatttctactaatctccatcttttagtcttgctcaaaggacgagtttccatgatgcgtacagtatcacctacattgcattcattcttttcatcgtgagcatggtacttcttcgttttgctaacgaacttaccatatatagggtgtttttccttgaacttagcagcaacggtaatggttttttccatcttattgctcagcacaacccctgttctttcttttcttaaatttcttgcttccatcaagctgatcatttattgttaagttctctttggcgtaactctgttctcatacgcgcaatcgtcctgcgtaattgtttgatctgcgcaggattttccaaaggagaaatagaatgattgataaccatttggttgtaattaaccacttctgcttctactctttctaccaaatcattagtagacatttctttaatttctgcaattttcataaaccttacgcattttgattttgaatatcataatcacgtctcacgacaaacttcgtagtaatcggaagtttctgagctgccaaacgcaaagcttctttcgcgatctcgtaagatactccttcagcttcaataataattctacctggtgtaaccggagccacgaatccttcggggctacccttacctttacccatacgtacatcagcaggttttctagtaatcggtttatccgggaaaatacgaatccaaatctgtccctgacgttgcatatatcttgtcactgcaatacgagcagcttcaatctgtcggcctgtgatccatttagtttctaaagccttaataccaaaagatccaaaagcgagctggttgcctctctgtgcattacctttagcgcggcccttttgttgtcttctgaattttgtctttttcggttgtaacatagtttcctaaaattcaaattcgtttagcgattatttttctttcttttgaagttctttccgccgccgttgtttccaccattgtttccacgaccactctctttgctttgtgtaaagttgggagctaattctctcttaccaaaaacttcacctctacagatccaaactttaataccgagaagacccacttttgtcaatgcttctgcatggcaatagtcgatgtctgctctgaaagtgtgcaacggagttcttccttccttatacatttcagaacgggccatttcagctccattcaaacgtcctgaaatctgaattttgataccttccgcacccatacgcattgtatttgcgatagccattttaatggcacggcgataggcaattttaccttctacctgacgagcgatgttgttagcaacaatcacagcatccagttccggtcttttcacttcaaagatattgatttgaatatctttgtcggtaacctttttcaactcttccttcaacttatcaacttcctggccacctttaccgataataatacccggacgagcagtgcaaacagtaatagtaacgagcttcagcgtacgttcaattacgattcttgatacacttgctttcgcaagtcttgcattaagatatttacggatcttgctatcttccagcaaagagtcaccgtaatcatttccaccataccagttagaatcccatcctctgataattcctaaacggttgcttattggattaactttttgtcccatctaccttaattttgatcttcgttattacttttagaaccaacgaacaatgttacgtgatttgaacgtttgcgaattctgtatcctcttccctgcggagccggtctcattcttttgagtgtagcaccaccatcaacaaaaatcttcgttacgaataattcgccactttcagctttacgttcgtttttctgctcccagttagcaattgcagagcgcaacaatttttccactcttgcagctgcttcttttgaagaaaacttcaaaacgccaagtgctctgttcacttccatcccacgaatcatgtcagccacgagacgcatcttacgaggagaagtaggaacattttgcaatttagcaaaatacatggttttaagggcttcttttctcttttcagccgatattttttttcttgctcccattatatttattactttattatttcagataaatcctgttattttttcttgttaccagcgtgtcctctgaatgtacgagttggagcgaattcacccaacttgtgacctaccatattttcggtaacatatacaggaataaatttatttccgttgtgaactgcaactgtatggcctacaaaatcaggcgaaatcattgaagctctggaccaagtcttaacgacaactttcttgcctgattcattcatagcaagcactttcttttcgagttttacgttaatatatggacctttttttaatgaacgactcatagtttactcaattaatcagattacttttttcttctctcaataatgtacttagacgattgtttcttcggagctctagtcttaagtcccttagcgtacaatcccttacgagatcttgggtgacctccggaagcacgtccttcaccaccacccatcgggtgatcaaccgggttcataacaacaccacggttgcgaggacgacggccctgccaacgagagcgacctgccttacctgagctttccaatccatgatctgagttaccaacactaccgatagtagctttacaagtgctaagtatttgtcttacttcacctgaaggcaatttgattacacaatacttaccttctcttgaagtcagctgagcgaagttacctgctgatctaaccagagcagcaccctgacccggacgcaattcaatgttgtgaattactgtaccgaccgggatattctgaagcggaagcgcattaccaatctcaggcgcagcgttctctcccgacatcaaagtcgcaccaacttgcaatccattgggagcaataatatatcttttttcaccatcagcataaaataacaatgcgatacgagccgaacggttcggatcgtattcgatcgtttttacaactgccggaacaccgtctttatttctcttgaaatcgacaattctgatcacttttctatgaccgccacctaagtagcgcattgtcatcttaccttcgttgttacgaccgccagatgattttttaccatatacaagcgacttttctggtactgatgcagtaatttcctcgaaagtaccaataatcttatgtctttgccccggtgttgtgggcttaaatttacgtactgccatttttattaaatattgctataaaaatcaatagtatctccttctttcaatgtcacgatggctttcttaaaagcgttcgtacgaccattgatgatacctgcttttgtataacggctcttatttttgccagcatacttcacagtattcacatcaactaccgtaacattataaagggcttcaacttcactcttaatttccagtttattagcttcaggacgtacaataaagccgaaacgattcagcttatcagttattgcagtcattttctctgtcaccaacggtttaataataattcccattatttaagcctcctttttagattaagatattgtcaatagccttcaaagagctttcagtaagcacaacaaccccagcattcaatactctgtaagtatttaatcctgagatagtctgaacgttagcaccttcgatgttacgagctgacaaatatacatttttatttgcttctggtaaaactacaagcagttttttgtcagaaactttaagattttttgtcatttcaacgaaaaccttagtcttcggagcctcaaagttgaagtcttctaccactacgattgcgttgtcctgagctttatacgacaaagctgacttacgagccaatgtcttaacttttttattcagcttgaagtagtagtctcttggtttaggaccaaatacacgtccaccacctacgagtaccggtgaattcatgtcaccacgacgagcaccgccgccacctttctgacgaccgattttacgagtagatccgctgatttcgcttctctcttttgacttgtgagtaccctgacgctggttagccataaattgctttacgtccagatagatagcgtggtcattgggctcaattccgaagatagattcgtttaacgtaacctttcttccagtgtcttcacctttaatgttatatacgttaacttccattatttttcaattaatacgattgaacctttgcaacccggtacagaacccttgatcaaaagaagattgtgttccgcgattacttttaatacctgtaagttttgaacagtaactctgtcgccacccatttgtccgcccatgcgcattcctttgaacacttttgcaggatacgaacaagcaccgatagaacccggtttacgggcacggttgtgctgaccgtgagtagattgacctacaccaccaaagccatgtcttttaactacaccctggaagcctttacctttagaagtaccaacaacgtctacatagtctgcgccgtcgaacagttctactgtaacagtatcacccagatttaactcgttttcaaattccttgaactcggccaagtgtctcttcggtgttactccagcctttttgaagtgacccatcaacggtttagttgtatgtttttcctttttgtcctggaaacccaactgaacggctgcatagccatctttctctacggtctttacctgagtaacaacacaaggacctgcttcgataacagtgcatggtacattcttaccatcggcactgaaaacggatgtcattccgattttttttcctaataatcctggcatttcactaatttttaaatactacactttaatttctacttctacaccactcggcaactctaacttcatcagagcatctacagtcttagctgttgagctatagatatcgatcagtctcttgaatgaagaaagttcaaactgctctcttgatttcttgttaacgaaagtagagcggtttactgtaaagatacgcttgtgcgtcggaaggggaatcggtccgctaacaatagcaccggtagccttcactgttctaacgatcttctcagctgatttgtcaaccaagttgtggtcgtaagatttcagtttaattctaattttctgactcattagttcttttaattaataaatttataaataagataaagcggcaggctaagagtcattcgctagcctgctgcttaagatattttagagtaaatcagcacgtccttttacttcttccaataccgctttagcgatagagctagaaacctgagcgtgatgagagtataccattgatgaagtggcacgaccagaagtgatagtacgcaatgcggttacgtaaccgaacatttctgccaacggaaccattgcttttacgatacgggctcctgaacggcttgactccataccttcaacctggccacggcgtttgttcaagtcaccgataacgtcacccatgttttcttccggagtaacgacttccagcttcataataggctccatcaatacaggacctgccttagcacaagcattcttatatgcctggatagcacagatttcgaaagacaactggtcagagtcaaccgggtggaatgaaccatcgaccaaagtcactttcaatgaatccagcggatagccagccagcacaccattcttcattgcagtctggaaacctttctgaactgaaggaatgaattccttaggaatgttaccacccttcacttcatcaacgaactgcagaccaccttgagtaaagtcttcatcaaccgggccgatgttcacaataatatcagcgaacttaccacgaccaccagattgtttcttataaacctcacgcaagttaactgtcttagtgatagcctctttgtagttaacctgaggtttaccctggttacattctactttgaattcacgtttcagacggtcgataatgatatccaagtgaagctcacccataccggaaataactgtctgacctgtctgttcgtcagttttcactgtgaatgtcgggtcttcttcagccagtttagccaaaccgttagacagtttgtccatatccttctgagttttcggttccacagcaataccgattaccggttccgggaagtccattgactcaagaacgatcggagctgtttcgtcacacagtgtatcaccagtgtgaatatccttgaaacctacaccggcaccaatatcaccggcaccaatcacttctaccggattctgtttgtttgagtgcatctggaacagacgagaaacacgttctttcttacctgaacgagagttgtagatataagaaccggcttcaatcttaccagagtatacacggaagaaagtcaaacgtcctacataagggtcagtagcgatcttaaatgccaaagctgaagttttatcgtcttcgctcggtttacgatcttcttcggcaccggtatcagggtttgtaccaactacgttttcagcatccaacggagaaggcaagaaagcacaaacatagtcaagcaaagtctgtacgcccttattcttgaatgaagaaccgcacaacatcggaactacagccatctgaacagttgcattgcgaagagctctcaatacttcttcttctgtaatagtagaaggatcatcaaagtatttttccatcaacgcatcatcaaattcagctactttttcaagcattttatctctccattcgttggcttcgtcaacgagattagcaggaatttcttctatggtatagtcagcacccattgtttcatcgtgccagtagatagctttcattttgatcagatcaaccaatcctttgaagttttcttctgcaccgataggaataacaaccggacacggatttgcacccaaaacagccttcatctggcgaacaacttcaaagaagtcagcacccgaacggtccattttgttaacgtaagcgatacgcggtacgttatatttgtcagcctgacgccatacagtttccgactgaggttctacaccacctacagcacagtaagcagcaacagcaccatcaaggatacgaagtgaacgttctacctcagcagtaaagtccacgtgtcccggagtgtcaatcaggttgattttataagtatcaccagcatacttccaacgagtagttgtagcggcagaagtgatagtaataccacgttcctgctcttgctccatccagtccattgttgcagcaccatcgtgtacctctccgattttgtgagtcaatccggtgtagaacaggatacgttcagaagttgttgtctttccggcatcgatgtgagccatgataccgatattacgagtcaaatgtaaatcattctttgccattttctttttcctttactttaagtttttaatcaaataggtatttcttatagtaattagaatctgaaatgagcaaatgcacggttagcttcagccattctgtgcatatcttctttacgtttgaaagcaccgccttgttcattgaatgcatccatgatttcagcagccaatttatcagccatagatttaccgcctctcttgcgagcgaacagaatcaggttcttcattgagattgattctttacgatccgggcgaatttcggtaggaacctggaaagttgcaccacccacacggcgtgattttacttcaacttgaggagttacgttatctaacgctttcttccagatttcaagagcagttctttcttcgttaggaagttttgcttttactgtttccagtgcagcgtaaaagatttcataagaagtattcttctttccatcatacatcagatggtttacaaatttagaaaccttctggtcattgaacacgggatccggaaggataacgcgtttttttggttttgcttttctcatttgttcgaaaaataatgtttttgttcttggttgtctatttcttgacgtcttcaactccccctccggggaatttactcaacctttatagcttattccaacaaactaaaacgaaagttattacttttaattaaaataaatcgaattcggaatcactccggattatttcttcttagccggtgctgcttgtcccggtttcggacgcttagctccgtatttagaacgtctctgagtacgtccggctacacctgctgtatcaagagtaccgcgaacgatgtggtaacgtacacccggaaggtctttcacacgaccaccgcgaaccagtacgattgagtgctcctgcaagttgtgtccttctcccggaatgtaagagttcacctctttctggttagtcaaacgcacacgagctactttacgcattgcagagttcggctttttcggagtagtagtatatactctcacgcaaacgccacgtctttgaggacaagaatccaaggccggagatttacttttctcgaccagcacttcgcgtccttttcttactaattgctgaattgtaggcattttaaattgttttttaatttatattattgttatattaatttcgtaactatacattttgggctgcaaaaatacgaataatatttgaataatcaatgcactacatcttttttttaatttttaagagcttatttccggaaaatcatttcatcagaaagatttttaggtgtagccatccgtacattaaggctacaccctccctctcgaatggctacacccatcgcaccggatggctacaccctttttattttcaggcttctccttttatatctaatatgggaggagtatccactccgtcttcctgcaatcggataggaccgaatgcacgttcatatttagctatattttcttcaagcgccctttgcaaacgtttggcatgttcgggagcaagaatcacacgcgactgtacccctgcttttggcaacccgggcaatacacgcacaaagtcgagtacaaactccgaacttgaatgtgtaatgatagccagattcgcataggttccttgagccacttcctcttttaattctatttgtaattgattatcgggattttgattttccatatcttttattattgattgattctaattcttctgctacaaagatacagattatgttttatagtaaagacaaatgccttgcactcttttccatagaatgcaaggcatacgaaaacaattttttatttgaatccaaagcattttttaatcaatatctggaaaaagcagatatttgaagaaaaaacaggaatggattttaaattatctcaggctatattaaaagcggtaatcaacaataagcagcgaacgataaactcaatacattaattagtgtattccaatttaccgttcaccgttcattatctaccgctcactatcaagagttaggtgtcaatttttctttcacctcagtcgctttatcagctacttttccggctactttggcaccagccttcacggctttgtcttttgcttcgactactgccagttcggcatcagcctctatttcatgaagagcattgaacacatcatttttcagttttttagctttcgccgtgcgcgaaaaatgataaaccagcgcaccgatggcagaaccgattccaagtcctaccaggaattttgcatttccacttcccataaactattaatttttatataaccacaataaacgatactgtcgcgttgcgagaaatactcccctcaccgggagcggctgaagaaggaggctatccagagaaataagatcgcgccgacaaccgaagtaatcagactaccgataattccggttgctgccagtcccagaagggcaaacacccaaccgcccagcacaccgcctataatccctaataagagattgaccaaaaggccgaatcctcctccacgcattatcttaccggcaaaataaccggcaaggatacctatcaaaatgtaccagataaaattcataatgcttgatttatattgttttgatataggaacgctgcaggcacaggaatgttcggtaaataaagagggaattaacgactattgataaaccggacgctgaaaacagtaaaatctgatctgtttttcgaatagacacattgtaacacttggtaaaagagattatctttgtccaaaagaaaatcttaaggcctatgaaaaatattaattacagtataaaaaagcaatttaaaatatcggacgaaggaatctgtttgttgcccatgctccttagagcgctctgtcggcttactaaaaaacagctgttactactggaagaaatctattccaattactcctcgtccacagaaggggaaatcatcacacaatctcaccggacggtgaatgcaaaaaagatcccgacttctttttcgtatgaaggaggcatcacactcgacacggaaacattacactatagcagcccaagtgagaagtttgcaacaacttggaaaaatatattatttcacaccatttctatcagaataattatcggactccataaaagtaatatggaaccgtccgagtggagagaaatcattcaccagaacacatatcagaaatttcaccgcaaacatagaaggcgattgccattatcattccgtgaacggtatacacaatacaaaaacaaggcttccgacgcattcaaccaagacgctccaaagtaaaccggcttctatcggggggaacacattacccaacctgaacaaagtaaaggcaatagaatgaatttaataataatgacagcagcacaaattgtacatttttcacattaacacatttaaatcaattatatcatggaattaaaaaagaaagagaatataggttggattgacctgttaagggtactcgcctgtttctttgttgttttctcgcatagttgcgatgcatttatcggccaatttgatgccaatcgggaatcgttcttaacaggagtgtttttgggaagcctgatgcgcccgtgtgttcccatttttgttatgatgaccggggtattgctattacccgtacaaaccgacatggcagcgttctataagaaaaggataggacgcctgatccctccaatgattttctggtcactggtcttgcctgttttgtatttcatatatctgaactatatcaatcccgatactcaaaatccactgatctcgatgccagatcacagtcttgaagctttatggttcaaactatatacatttatatttaatttcaattttgacacagtcccgttgtggtatctttatatgttgattgggttatatttgataatgcctattatcagcggttggttggaaaaagtttcaaagaaggaactaaaattattcttaggcatttggggaatcagcctgattgctccatatgtaaaaatgttcgctccagcactaggctatcagggcaattacgggaatatgggtctatggggagtatgtgactggaatgactatggtaccttttattatttctccggttttatcggatatcttctgctagcttattatctcacaaaatatccactgaaatggagttggaagaaactattgagtattaccatcccaatgtttctgacaggatacctgatcacatcttatgggtacgtcatcacacaaaattacttcccgagaaattatgcttatctggaaattgtatggtactttgcaggtatcaacgtatttatgatgaccttcccggtttttgtaatcgtacagaagataaaggtaccttcaaaccacaggttatcacacatggcatcactcgcattcggcatttatctgagccattatgtatttgtattcattgcttacgatttactggatacagagttgctgccgtatactgtacgaattatttgtatggcctgtattgtattcctgacatgttacgccatcgtttggctaatgtcaaaaagcaaattgaccaatcgcttcatccggtaacgtaacataaactaaaaaaaagagcaatcacctttacggcaattgctctttttcagctatagtcaattgaatgtattattctacttcattatagtcaagcactgtcttcttattagccagaatacgatcgtattcttctttagaacctacaatgatcttgtcaaactcgcgaagacctgtaccggccggaatcagatgaccgcaaattacattctccttcataccttccaacttatctatcttaccattgatagcagcctcattcagcactttagttgtctcctggaaagaagcggcagacatgaagcttgaagtttgcaatgcggcacgagtaataccctgaagaatctgggtagaagttgcagcaacagcatcacgcacctcaaccggtttaaggtcacggcgtttcagcatactgttttcgtcacgcaacttgcgggctgtgacaatctgaccggctttcaggttttcagaatctccggcatctacaaccactttcttaccccaaatgcggtcgttctcttccatgaactcgagtttgtccactacctgctgttcaaggaagcgtgtatcacccggttcgtcgatagtcactttacgcatcatctggcgaacaataatctcaaaatgcttatcattgatcttcacaccctgtaaacgatatacgtcctgaacttcattcacgatgtattcctgtacagccgtaggacctttaatagccaaaatatcagccggagtcgtagcaccatcggacaatggagtacctgcacgaacgtagtcattctcctgtaccagaatctgcttagacagcggaacaaggtatttcttcacttcaccggtcttagacgtaacgatgatttcgcgattaccgcgtttcactttacccatagtaacctctccatcgatttcggatacgacggcaggattcgacgggttacgtgcttcaaacaactcagtaacacggggaagaccaccggtaatatcaccggctttacccacagcacgcggaatcttaacgattacctcacctgctttcaccttttggccgttttcgattactacgtgtccacctacaggtaaattatatgtacggataagatcaccatcttcggtcaggatgtgggccgaaggaactttagtcttatctttagactcaataataataatttctcgaagtccggtcgcttcatccgattcaatcttataagtaacattttcaatgacaccctcaaactcaatcttaccggtagcttcggttatgataacagcgttgaatggatcccatttcgcaatcagtttacctttttctaccacttcaccatcggctacataaagtgtagaaccgtaaggaacgttatgggtagaaagtacaatgcctgtattgacatcaatgaaacgaacctcagccaaacgacctactaccactttggcagcctcaccagtttcgtccacaatatctaccgtacggagttcttcaaattccaaacgggcattatttttagcaacaatacttgcattggccgcaatgttggcagccgtaccaccagcatggaatgtacgcaatgtcaactgtgtacccggttcaccgatagactgggcagcgattacaccgacagcctcacctttctgaaccatatggttcgtagccaggttacgaccatagcacttcgcacaaacacccttcttcgattcgcaagtcaataccgaacgaatctcaacgctttcaatcggagattcctgaatcttcttggcgatatcttctgtaatttcttcaccaccggcaaccagtaattcaccggtctgaggatgaataatatcgtgtacggatacacgtccgaggatacgttcgtacagagtagcaataacttcgtcattgttcttgaggtcagtacaaaccagtccgcgaagcgtaccgcagtcttcttcattaataatcacatcatgcgaaacgtcaaccagacgacgagtcaagtatcccgcatcggcagtcttcaaagcggtatcggccaaacctttacgggcaccgtgagtagagataaagtactccaacacagaaagtccctctttaaagttagacaagatagggttctcgatgatctgaccaccttcagcacctgccttctgcggttttgccatcaaaccacgcataccggagagctgacggatctgctctttagaaccacgggcaccggaatcaagcatcatgtacacagagttgaaaccctgatcatctgaagaaatagtcttcatcaagatattagacaattcagagtttacatgtgtccagatatcaattacctggttgtaacgttcattattggtgatgaaacccatattatagttattgatcacctgctctacctcttcataacctctctgaacgagtgtctctttctctttcgggataatgatatcacccaagttgaatgacagaccaccctgaaaagccatcttgtagcctaaatttttaattccatcaaggaagtcagcagtccgagcaacaccacaagctttgattacagcactaataatgtcacgcaatgatttctttgaaataatagtattgatgtatccgacttcaggcggaactatttcgttcacaatcacacgacctactgaagtctcacgcattacatcaacgatatttccattttcgtcaaggtcttttacgataaccttcaccggagcatgaatatctactttgccttcattgtaagctatcaacgcttcttcgggtccatagaatgtgagtccctcacctttggcgcctttacggagtttggtgatatagtacaaaccaagcaccatatcctgtgaaggaacggtaataggagcaccatttgcaggattcagaatattgtgagaagccagcatcaacatttgtgcttcaagtactgcctcattgctcaaaggcaagtgaacagccatctggtcaccatcaaagtcggcattgaacgctgtacatgccaacggatgcaattggatagctttaccttcgatcatcttaggctggaaagcctgaatacccaaacggtgaagtgtcggagcacggttcaacaatactggatgacctttcattacgtgttcaagaatatcccagatcaccggctccttacggtccacgatcttcttagcagacttcacggtctttacgatacctcgctcgatcaacttacggataatgaacggcttgtacagttcggcagccatcagtttaggaataccacattcatgcattctcaactccgggccaacaacaattaccgaacgggccgaatagtcaacgcgtttacccagcaagttttgacggaaacgtccttgcttacctttcaggctgtcagacaaagacttcaacgggcggttggcatcagtcttaactgcactggatttacgtgaattatcaaacagtgaatcgacagattcctgaagcatacgtttctcgttacggagaatcacctcgggagccttaatctcaatcaatcgtttcaaacgattgttacggataatcacacgacgataaagatcgttcaaatcggatgtagcgaaacgccctccatccaacggaaccaacggacgaagttcgggcggaattaccggtacaatacgtacaatcatccattcaggtttattccgtccacgtgatgcacggaatgattctaccacctgaagacgcttcaaagcctcattcttacgctgttgcgaagcatcatttccggcacggtgacgcaactcataggataatgcatcaagatcgagacgggcaagcagatcatagatcgcttcggctcccattttagcaataaacttgttggggtctgtatcttccagatactgattatctttaggaagagtatcaagaatatccaagtattcttcttctgacaacagatcaaattcggcgataccgtcttcagctttcacacccggctgaatgacaacatagcgttcgtagtaaatgatagaatcgagtttcttggtggggagtcccaacaaataaccgatcttattaggcagcgaacggaaataccagatgtgagctacaggcacgacaagctggatatgtcccatacgttcgcgacgtactttcttttcagtaacttctacaccacaacggtcgcagacaatacctttataacggatgcgtttatatttaccgcaatggcattcgtagtctttgatcgggccgaagatacgctcgcagaacaaaccgtcacgctcaggtttgtatgtacgatagttgatggtttcaggctttaatacttcaccactcgaattctcaaggatttcttccggagaagccaaaccgatagagattttcgagaaattgctcttgatcttattttcttttctaaaagccatacttttataattatataatatgctaattaactaaataatgtgccgattggctgatgccaatgtgccaataagaaaatatgctaattatgaaatgccacagccaatgtaccttgatcgatacattggcatattggcacattagttcattattccaaattgatgctcaggcccaatcctcttaattcgtgcaacaacacgttcagagattccggaatacccggctgtggcatgggttcgccctttacaatggcttcgtaagccttagaacgtccaacaacgtcgtccgacttgattgtcagaatctcctggagaatatgcgatgcaccgaaaccttcgagtgcccaaacctccatctctccgaaacgctgaccaccaaactgagctttaccaccaagaggttgctgagtaatcaatgagtatggtccgatagaacgtgcgtgcatcttgtcttcaaccatgtgaccgagtttcaacatataggtaacacctacggttgctggttggtcaaagcgttcgcctgtaccaccatcacaaagataagttttgcaatagcgtggtagaccggctttgtctgtccattcgttcaagtcatccaaagttgcaccgtcaaaaatcggcgtagcgaacttcacacccaaattctttccggcacgtccgagaacagcctcaaaaatctgaccgatattcatacgagaaggcacacccaacgggttcaatacaatgtctaccggagttccatcttcaaggaacggcatgtcttcttgacgaacaacacgtgacacaatacctttattaccgtgacgtccggccatcttatcacctacaccaatcttacgttttttagcaatatatactttcgccatctgaatgatacctgcaggcagttcatcaccgattgtgatagcgaactttttacgcttcagttcagcatcaagttctttgtacttcttgataaagttcaggatcaagtcacgaatcataccattcgcatgatcatcattggtccagtcgctcagctgaatcgcggtgaaatcaagtgaatcgaagtcagaagcactaaacttagagcctttagctatgacttcagctcccaagtagtctttcacgccctgagatacctttccttctgtcaataccatcaatttctttaccaagatacgtttcaagtcagctaccttagactcaaattcatcgtcaattttcggaagcaacgccttatcagccaacttagaactacgattcttgatgacacgtgagaacaatttcttatcaataattacccccttcagagaaggagatgctttcaaagaagcatctttcacatcaccggctttatcaccaaagatagcacgaagcaatttttcttccggagaaggatcagattcacctttcggtgtaatcttaccaatcaatatatcacccggctgaatacgtgcaccgacacgtacgataccattctcgtccaaatccttagtggcttcctcactcacgttaggaatatcagaagtcaactcttccattcctcgcttggtttcacgaacttcgagtgaatactcttctacgtgtactgaagtcagcaagtcttcacgaaccacacgttcattcaacacgatagcatcctcgtaattataacctttccaaggcatgtaagcaaccaacagattcttacccaaagcgagttctccattttcagtagaataaccttctgtcagaatctgacctttcgtcacacgatcacctttattgcaagttggccgaaggtcgattgtcatattctggttcgttttacggaacttcggtattctatattcttttaatgccggctcaaaacttacaaactcttcatcttctgtacgatcgtatagaatacgaatagtagtagcatctacaaaatcaatcactccatcaccttcggcagcaatctgagtacgtgaatcacgtaccagctggcgttcaatacctgtacctacgattggagcttcgcttctcagcaaaggaacagcctgacgcatcatgttcgatcccatcaacgcacggttagcgtcatcatgttcaaggaagggaatcaaagatgcagcgatagaagcaatctgttgaggagcaacatccatcaactctacttccgaaggttctacaaccggataatcggcatcctgacgagacttaaccttattacggataaatgtaccgtcatcattcaacggagcattaccctgtgctatgatcttagcttcttcttcctcagccgtcaggtaaacgagtccgttctcagacagatctacctttccgttatctaccttacggtaaggagtttcaataaagccgagatcattgatcttggcaaacacacaaagtgacgaaatcaaaccgatattcggaccttccggtgtttcaatcggacaaaggcgtccgtagtgtgtatagtgaacgtcacgaacctcaaatccggcacgttcacgagacaaaccaccaggaccaagagcagacatacgacgtttgtgagtgatttcagccaacgggtttgtctggtccataaactgtgacaatgcgttagttccgaagaatgaattgatcacagaagaaatagtcttcgcattgatcaggtcaatcggagtaaacacctcattgtcacgaacgttcattcgttcgcggatggtacgtgacatacgtgccaaaccgacagcgaactgattggacaactgttcgcctacagtacgtacgcgacggttgctcaagtggtcgatatcatctacatctgcttttgagttaatcagctcaatcagatatttgatgatctcgataatatcttctttagtgaggacacgcacgtccatgtctgtcgtcaggttcaatttcttattgattctataacgacctacatcaccaaggtcataccgtttttcagagaagaacaggttattaataacttcacgggcactggcatcatcggcagggtctgcattacgcaactgacggtagatataaagcacagcctccttttccgagttactcgggtccttctgaagggtattatatataatagagtagtcggactggttcggttcttccttgtgaataaggatgttttgaacgcccgagtcaattatttcatctatatgttccggttcgattactgtttcacggtcgataatgacttcattacgttcaatagaaacaacttcaccggtatcttcatcaacgaaatcttcaatccaggttttcaagacacgcgcagccagtttacgacctactaccttcttgagattagtcttattaaccttcacatcttcagccaggttaaaaatctcaagaatgtccttgtcgttctcaaagccgatagctcttaacagcgtagtaacaggcaatttcttcttacgatcaatataagcgtacattacgttgttaatatcggtagcgaactcaatccatgatcccttaaacgggatgatacgggctgagtacaactttgtaccattagcatgtacactctgaccgaagaatacgcccggagaacggtgaagctgcgacacaactacacgctcagcaccattgatgacaaaagttgccttgtcagtcatgtaaggtataggaccaaggaacacatcttgaatcactgtatcgaaatcctcatgatcggggtctgtacagtaaagcttgagtttcgctttcaatggaacactatatgtgagcccacgctctatacaatcatcaatggtatagcgcggcggatcaatataatagtccagaaactcaagaacaaaattgtttcttgtgtcggcaattgggaagttttcggcaaatactttatacaatccctcttttttacgcttctcaggtggggtatctagttgtagaaagtcttggaatgacttcaattgtacttccaggaaatccggatattcaagcggattcttagtcgaagcaaaattaactctttgatttacagtatttgaagacatctgtcaatgaatttggagaacttaattttaaatatatacacaaaaaggttaagaatcctcttgtgaaggattcttaaccgaattacctgataaccaggctaatgttatttaagttcaacttcagctccagcttcttccaatgttttcttcaatgattctgcttcgtctttagccaaaccttcttttactacactaggagcaccgtctaccatgtccttagcttctttcaagccaagaccacaagcttctttaacggccttaacaacctgaagtttagctgcaccagcgctcttcaatactacgtcgaaagaagatttttcttctgcggcagcagcaccagctgcaggaccagcagcaacagctacagctgcagcagcaggttcaataccatattcttctttaaggatagttgcaagttcattaacttcttttactgtcaagttaactaattgttctgcaaaagctttcaaatctgccattttttgtatgattttaatgtttaatttactaaataaaatgtgttataattatctttcaccaagagttttgagaactccgtgaagggtgttgccacctgattgaagagcagaaataacattcttggccggtgattgcaacagggcaacgatatcggcaataacttcatttttactcttaatagctacgagagcatccaactggtcagcaccaacatagaagctttcttctgcgtatgcggctttcagtcccggaataccatctttagatttatccttgatcagtttagcaggtgcgtttgcaacattgcaaaacatcacagctgttgtacctttcaaagaatcgtaaagaggagagaaatcaccttcaatgctttcaagtgctttatgaagcaatgtattcttgactaccatcaatttgatgtcagccttgaaacaagctcttctcaattcacttgttgcagcagcattcatagctgttgtatctaccaaatagaagtgaccatattcctgtactgtagcagcaatctgctcaataatcgtatttttatcttcctttctcattgttactctgttttattagatttcctctactgatttcgggtcaattttgatacccgcactcattgtactagaaagataaatactcttaatatatgtacccttggctgcagtcggtttcaacttattcaatgtagagatgaattctttcgcgttgtcgcgaatctgctctgcagtgaatgaaaccttaccaattgaagtatgaacaataccgctcttatcaactttgaagtcaatcttgccttgttttacttctcttacagctttagcaacatccatagttacggtaccactcttcgggttcggcatcaatccacgaggaccgagtacacgaccgagtgcaccaattttacccatgatagatggcatagtgataatcacatcaatatcagtccatccacctttgatcttttcaatatattcgtcaagaccaacatagtcagcaccagcttcttttgcagcagcttcagcatccggtgtacaaagtaccaatacacgtacttgctttccagtaccgtgaggaagtgaaacgacacctctcaccatttggtttgctttacgtggatcaacacctaaacgtacatcaatatctaatgaagcatcaaacttagtaaaagtgatttcctttaccaaagatgcagcttctttcagtgagtatgctttccctgcttcaatttttcctgcagctaacttttgattttttgtcagtttacccattacaattgaagtttattaattattaaccgggaactccccttttacagcgatacccatacttctagctgtacctgcaaccattctcatggcagcttccacagtaaaacagttcaagtcaaccattttgtcctgagcaatcgtacgaacctgttcccaagtaatctcggcaactttcttacggttaggctcagcagaaccactctttaccttagccacttcaagcaactgaatggcaacgggaggagtcttgattacaaaatcgaaagacttatctgcgtagtaagtaatgataacaggtaaaatcttacctgctttgtcttgggttctggcgttgaattgcttgcaaaactccatgatgttgattcccttagaacctaatgcaggtccaacgggaggtgatgggtttgccgcgcctcctttaatctgtaatttgattagtccagcaacttctttagccatttttttattaatttatatataacattaaacgaaggacaactacagcgtaacaattctgcgttattccttttccacttgcataaagcctaattcaagcggcgtcttgcgcccgaatatctttaccatgaccttcagtttctttttttcactattaacttcttcaatgatgccactgaatccgctaaaaggaccaaaagtaacctttacagtttcgcctacaatatacggaacatttaagtcttcacccgtttcttgcagttcatccactgtaccaagtatacgattcacttccgactgtctgaggggaaccggtttatcggaacctcccaagaaacctatcacattaggagtatttctcagatggtgagaaacctcaccaaccaaagcagcctccaccaaaacgtaaccaggaagataacttctttctttcacaattttcttaccattgcgaacctgatataccttttcggtaggaatcaatacctgagacacatattcgccaaggtcgctgtttttaatatcagcttcaagatactctttcaccttagcttcttttccgctaatagcacgcaaaacgtaccatttcttttcaatctcagacatcgtaattcctctctttttaatgtggataaattattttttccataaaattctggaaacagaagtccatcgcgaacactaccaatgcgataagcagggaagcatataaaacaactaccgcactgttagttagttctgaatacgtaggccacgacactttatgaacaagttcgtcgtaagattctttaatataagctactacttttttcatttcataaatattagcacgggaggagaggctcgaactcccgacacccggttttggagaccggtgctctaccaactgagctactcccgtttgtacataatcagttcccgatattactaccgggaactgattaatatttggttttagtcgataatttcagtaatctgaccagcacctactgtacgtccaccttcgcggatagcgaaacgaagaccgatgttcagtgcaaccggatagatcaactctacagtgatagttacgttatcacccggcattaccatttcagttccttccggaagagtgatttcacctgtacagtccatagtacgcagatagaactgaggacgatatttgttatggaatggagtgtgacgaccaccttcttctttcttcaggatataaacctctgctttgaatttagagtgaggtttaatctgacccggtttacaaagaaccataccacgtttgatttcgttcttgtcaacaccacgaagcaacagacctacgttgtcaccagcttcaccctgatccagaagtttgcggaacatttcaacacctgttacaactgatttcttatcttcacccaaaccgaggatttcgatttcatcacctacatggataacaccagtttcgatacgacctgtagctacagtaccacgacctgtgatagagaacacgtcttctaccggcatcaagaaaggtttatcaacatcgcgcggaggcagtggaatccaagtatcaacagcttccatcagttccattactttgtcttcccatttttctacgccgttcaatgcaccaagagcagaaccctgaatgatcggagtattgtcaccgtcgaaatcatagaatgaaagcaattctctcatttccatttcaacaagctccaacatctcagcatcttcaaccatatcgcacttgttcatgaatacaaccagcttcggaacgtttacctgacgagccaaaaggatgtgctcacgagtctgaggcatcggaccatcagtagcagcaactacaatgatagcaccgtccatctgagcagcaccagtaaccatgttctttacgtagtcagcgtgacccggacagtcaacgtgtgcgtagtgacggttagcagtttcatactcaacgtgtgaagtattgatagtaatacctctttctttttcttcaggagcattatcgatagaatcgaaagaacgaagttcagaaagacctttctttgccaacacagtagtgatagcagcagtcaaagtggttttaccgtggtcaacgtgaccgattgtaccaatgtttacgtgcggtttggtacgttcaaatttctctttagccatagctttacttgttatttatttgattaataatcagcatttacatcttacagagctgttaccgggatttgaacccgggacctcttccttaccaaggaagtgctctaccactgagctataacagcgaaaaaagagagcggaagacggggctcaaacccgcgaccctcagcttggaaggctaatgctctatcaactgagctacttccgcatttgccaaagttttcactctgtcttctttgtgggcaaagatggattcgaaccaccgaaggcgtaagccagcagatttacagtctgccccatttggccactctggtatttgccctttatacgaaacccaaacattgaaatagataataaaactcccgattccacttatttaggttcttctttttcttgagcctcttgtcggattcgaaccaacgaccccgagattacaaatcacgtgctctggccaactgagctaaagaggcgtttttacttaaaaaatgcaaccgtcacgtcctaacgcgagcgaaacggctgcaaatttagttatttatttctttcccgcaaaatatttgcgatatttttatttatttcgttgcttttccttgtatttaaccaactgtttttccaatgcttccacacacaagtcgactgcttcctcaaaagtatcgcatattttacttgcatgaaaatcattattcggaaccagcaccgtaatgccggcttctttattctccgcagtttctggtttaactacctttaatgacacctccactttctttatatcttcgtaatatttttccaacttagacactttcttctgaatgaaagcctgcaattgttctgttgcatcaaagtgaatcgattgaattctaatttccatacttacctccttttttaggctcgtggatgagcttgtttatacacttttttaagttcttcaaaagtggtatgcgtataaatctccgtagtcgccagactactgtgacccaaaagctctttcaccgcacccaactccgcatcattattcagcatcgttgtggcaaaagtatgtctcaacacgtgaggactacgctttttaagcgttaccaccttcgaaaggttccgtttcactaaattatagaccagattcttataaagccgctcaccattctctcttacaaaaaaggcatccgaccttccggaaatcatttcgtttcttataccaacatactcaagcatcgtctctttcaactcatcgccaaaaggtatcaaacgctgcttattcctcttccccgttactttcagaagagaagcagagaaatccacatccttatcatccagaccgatcaactcagagagacgcatgcccgtagcataaaacatctcaataatcagacgatcccgacaacctttaaacccttcaccaaaatctgtatcatccagcaatttattcatttcactctctttcaagaaagagggaagtggctttttatttttcggtcctgttattttacgcaacggatcgacgctcacctctccctgcctgagaagatatttataaaatgaccggagagaacttagcttacggtttaccgaagttgaagtatacccctgatccatcagtgaaacaatccactcacgaaccagttctggcttcacctccgccggatcaaacttctccatcctttcctgagcaaactcccgcaactgcgaaatatcctcgccgtaagccagtacggttttctcagaataattccgctcgtaccggagataatcaagaaaagaatctgttaacataatatcgctacatctataattctgcaacgaatgtatgaaaagaattcaataattcaaaggaaattacgaattattaatcttctacttgctgaagtttttgcacgtaaactgcacgttctttcttaagtcttttagttacagacggtttatcaaactgttgtctgcttctcaactctttaacgatgccagttttttcaaattttctcttaaacttcttcagcgctttttcaatgttttcgccttcttttacaggtactacaatcattttgttattattaaatatgttatggtttaaaatttccgcagtcaaattgcgccgcaaaattacacatactttctttattcacaaaactttcggcaattatttctcaaaatcaatgcaaaaggtacagaaagtagttatctttggagagtataacgatataatatatataatgtatgaaacagtctatcagtgaacgaatacatgcattacgcatgtggtttaaacccaacattcaagcattcatcattcccagcacagaccctcacctcagcgaatacgtagcaccgcactggaaatcaagagagtggatatcaggatttaccggctcggcaggtacggtagtgattactgaaaaaaaagccggactttggactgactcaagatattttctacaggcagcagagcaattgcagggaagcggtatcgatctatacaaagagatgttaccggaaactccaagtatcacaaaattcctttccgacgagctacagccgggcgaatccgtaggtatcgatggaaaaatgttctctgttgaacaagtagaaagtatgcaagcggaactttcagcaaagaacattcagattgtgttctgtcccgaccccatggacgagctttgggaaaaccgaccacccatgccggagtctcccgcttttgtatacgatatcaaatacgccggcaaaagttgctctgaaaagattgcagccattcgtacagagttgaaaaagaaaagcgcagaaagcgtgatgctgtcagctttagacgaaatagcctggactttgaatctgcgtggcaatgatgtacattgcaatccggtagtagtgagctatctgcttataacagaaaaaaaagcagtattattcattgcaccggagaaagtgacagaaggggtacggaactatttagaagagcaacagatagagatacaaaactattcagatacagagatttacttatctgatctcaatagttcaagtatcttaatgaatcctgcaaaaaccaactattctgttttctcttcggtaaatccccgatgccggattatacggggagaagcgccggtagctctattgaaagccatacgtaacgaccaagaaatcaaaggcattcatgcagccatgcaacgtgatggcgtagcattagtcaagtttctgagatggctggagtcggctgttccctccggaacagaaacagaattaagcattgaccgtaaattgcacgcatttcgtgcgacacaagatttatatgcaggcgaaagcttcgataccatcgcaggctacaaagaacatggagctattgtacactattcggcaaccgaggaaagcaacgcaacattgcacccgaaaggttttcttctcctcgactcaggagctcaatacctggatggtactacggacattacacgtaccattgcgttaggtgaactgactacagaagaaaaaacagattatacattggttctgaaaggacatatcgcactggcgatggccgtattcccttcaggtaccagaggggcacagctggatgtcctcgcacgcatgccgttatggagtcataaaatgaacttcctacatggtacaggtcatggtgtaggtcatttcttaagtgtacacgaaggaccgcaaagcattcgcatgaacgaaaaccccattgtattgcaacccggaatggtcacctcaaatgaaccgggagtgtacaaaggcggtagtcatggaatccgtacggaaaacctgacactggtatgcagcgccggtgaaggcctgttcggtgaatacctgaagttcgaaacaattacgctctgccctatctgcaagaagggaatcatcaaagagttattaactgccgatgaggtcgactggttgaataattaccaccagcaggtatacgaaaagctgtctcccaagctgaacgaagaagaaaaggcatggctgaaagaagctacagcagcaatctgacaaatcggaaaaatagctcagtccttactggctgcaaaatagttatttatgcaagtcagcggctgaatttgaaataagtataaaacaacaatctatggctttaataaaatcagtaagaggttttactcccgaatttggagaaaactgttttctggccgataacgccaccatcatcggcgatgtaaaaatgggacagaattgtagcatttggttcagcaccgtgttgagaggagatgtaaactcgatccgcatgggtgatggagtgaacatacaggacggaagtgtcttacacactctttacgaaaaatcaaccatcgaaataggtaactatgtatcggtagggcacaatgtgacaatccatggtgcaacagtaaaggactatgctttgatcggcatgggatcgaccttgctcgatcatgcagtcattggcgaaggcgcaatcgttgccgcaggctcacttgtactgagcaataccatcatcgaaccgggaagtatttggggaggtgtaccggccaagttcataaagaaggtagatccggaacaagctaaagaactgaaccagaaaatagctcacaactacctgatgtattctgactggtataaataatttatacaaaatagagggtgttcaaaactcgtattcaccacagactgcacggatttacacagataaatattatcggttatcagcagattaaaaatcgttttgtgtaaatctgtgtaatctgtagtgagttatgaaacaccctctattttatttatctcctttcgaacaggaaacttaaaagtttatcatatgcagcactttctctgttgctccggaattaccaatgacataattaccggcattcgtgccagtcttcctcaggaatgcttcatcggttaaaagtctgtcgagcaatgttttcagttcattgtaatccttaatggaataggctcccccggcttcgattagttgcatagcttccataaatttctggtatttgggtccgaaaattaccggaatgccatatacagccgcttcaagcgtattgtgaatcccgactccaaaaccaccaccgatataagcaatttccccataacgatagatcgaagagagcaaaccgaaacaatcgattatcaagcagtccgccttccggacattcttttcatctgcacgggtatagcgtacagaaggacgtttcaatttacctataatctctaccagatgattttcatcgattacgtgaggagctataatcaacttcatctcagggtgactattaaaatattcgatgaaaagatcttcgtccggcccccatgaacttcctgccacaaaagtaaatgcaccgtttttaaactgctccaccaacggcaactcttttgcctgctcccgaatctgcaggacgcggtcgaagcgggtatctcccactaccgttacccttgtgataccgatcttggcaagaaaacgctttgaagcctcattctgcacaaacagatgatcaaaatctttcagtacatttcgataagtccctccgtaccatttgaaaaaaatctgatctttgcggaaaatagacgaaacactgtagacgggaatacgacgtttgtgcaattcgtccaaatagttcttccagaattcatatttaatgaagaaagccatacaaggattcacgatatccagaaacttcttcacattacgaggtttatcaaacggcaaatagcaaacaatatctgctcctctatagttcttccggacttcatatcccgaaggagaaaagaacgtttgcagtattttataatcgggatatcgctcccgtatactctcaattaaaggacgtccctgctcaaactcccccagagaagcggcgtgaaaccaaatgtaacgctcgtctttctctacctgttggcgaagaagatcgtacaccacccagtgccccttcatcatcttccggggtttgcgactgaatggtgcagccaaatgcaccagaaggtcgtaaattcctattgccagatcgtaaaacatacctccggatccttatttcaaaacctctacggcacgtttcatgcgagccaatgtttcttcttttcccaacacccaggaaatatcgaacatatgaggacctttgccctcacctaccagtgtcaggcggaaagcattcataatattacctgtatgataacccttctcggcaatccagtccattactattttttcttgaccttcaatgctgaaatcttcaattccggccaatacctccgccagttcggtcatacatttagccgaatcctctttccagcgtttcttaaccgtcttttcgtcatattccgtcggagccacaaagaagaaactgcatacctcccatagttctttaacaaagctgacacggtctttcatcataccaaccaccgtcaccactttttcgaaaggagcttctactccatgctctttcagcaccggtacaaacagctcggctatctctttgtcagatttctgctgaatgtaagtatgattgaaccagataccttttttataatcaaattttgcacccgacttgctgcaacgatgcaggtcgaacagacggatcagctcgtccatagacatcacttcctggtcgttacccggattccatcccagcagagcaaggaaattgataacagcctcgggcagataacctgattcacgataaccggaagaaatctcaccgctcttcgggtcatgccactcaagagggaatacagggaatcccaaacgatcaccgtcacgtttactcagttttccattgccttcaggtttcagcagcaaaggcaagtgggcaaaagccggcatagtatcttcccagccgaatgcacgatacagcagcacgtgcagcggagcggaaggcagccactcttcaccacgaatcacgtgtgacacctccattaaatggtcatctacgatattggccaggtgataagtaggcagttcgtcggccgatttatataaaactttatcatcaaggatagacgaattgataaccacttcgccacgaatcaagtcgttcacatggatatcctcgttcggttctattttgaaacgtaccacatattgttttccgtcagcgatcagcgcttccacttcttctttcgggagcgtcaacgaattgcgcattcccacacgggtagacgcatcatactggaaattagctatttcagcacgcttggcatccagttcttccggagtatcgaaagcgatgtaggcctttccgttatcaagtaacacttgtacatacttcttgtatatttcacgacgttccgactggcggtacggtccgtattctcctccgaaacttacaccttcatcaaactgtattcctaaccatttgaaagactccagaatatattcttccgcacccggaacgaaacggttggaatccgtatcctcgatacggaaaatcaaatctcccccatgctggcgggcaaacagataattatacaaagcggtacgcacaccacctatatgcaatgctcctgttgggctcggagcaaaacgaactcttacttttctttctgccataatttgcgttagtataggtaaatcgtggcaaaattaaacctttttttccacactattgtttttttttgtacttttcgcaaaaaattcaagggttatggaacactggaagaagaaaaatagtttctcatacaaagatttgttatataaagcgctgattttcgtcggtactgtggcgttcattgtttacttcctgccccgtgacgggaagtttaactatcagtttgacattaacaaaccatggaagtatggccagttaatggcaactttcgattttccgatctacaaagacgaagcggtagtaaaacgggaacaagacagtcttctggcttctttccagccttactttgaactggacaaagaagtggagaagagtgcccttgccaaactgaaagagaattatcatgcccatctgaaaggcatattgccttcgacggactacatccgatacatcgagagaggcctgaaagccatctatcaatcgggagtcgtatcgacagaagagatgcggaccctcctccacgacagcatcttttctgtcatggtgattgaagataagttggccaaccaacggacgaccgacggcatctataccgtaaagagagcctacgagaatcttatatcgggtgataccgcccattataacagagacatcctgcggcaatgtgcactcaacgactacattacccccaatctcatttacgattctgtgcgtacggagacagcccggaaagaattgctcgacaactactcctgggcaaacggagtagtacaaagcggccagaaaatcattgaccgtggagagatagtcaacaaacaaacctataacatcctggaatctttgcgcaaggaatctatcaagcgaagcgaatccatcggacagaagcgactgatcttgggcggacaaatcttgtttgtcggcatattgatactctgctttatgctttacctggaactgttccgcaaagattattatgaacgcaaaggcagcttatcgttactcttcgccctgatcgtgttctattgtgtcatcacggcgcttatggtgacaaacaatatattcaatgtgtacatcctaccctatgccatgctcccgattattatccgggtcttcctcgattcgcgtacggcattcctgacacatgtcatcaccatactgatctgctccatcaccctgaggtatcctcacgaatttatcctgacacaaatagccgccggcttggtagctatcttcagcttgagagaactgtcacaacgttcgcagttgttccgcacggcccttctggtcatactgacgtatgcagctatctatttcgcttttgagctgatcagtgaaaacgatctttcgaagctgaacgtaagtatgtatatctacttcattattaacggtgtactattgcttttcgcttatcctctgctattcctgcttgagaagacttttggcttcacgtcgaatgttacgcttgtagaattatcgaacatcaacaatgatctgttgagaagaatgtccgaaactgttccgggtaccttccaacactccatgcaagtggccaatctggctgctgaagctgcgatacgtatcggagccaaaagccagttggtacgtaccggagcattgtatcatgacatcggcaaaatggaaaatccggctttctttaccgaaaaccagtccggagtgaacccccataagaatttaagttatgaacagagtgcccaggtggttatcagccatgtgacggacggattaaaactggccgacaagcataatctgcctaaagtgatcaaggactttatcagtactcaccacgggcgcggaaagaccaagttcttctacatatcctggaaaaacgaacatccgggcgaagaaccgaacgaagaagttttcacgtatccgggtcccaatccgttctcgaaagagacagccatactgatgatggcagactccgtagaagccgcctcacgcagcttgccggagtataccgaagagagcatcagtaatctggtagataagattatcgattcgcaagtacaagaggggtatttcaaagaatgcccgatcacattcaaagacatcgcgacgataaaagctgtattcaaagaaaagctgaaaacgatttatcacacacgcatcagctatcctgagttaaagaagtaaggagtccggcacaagcatcctcaagtatgtcgagcacgtattcaaagccctccgcacctccataataagggtcgggcacgtgatcggcagggatgcgggtgcagtattccgtcatccggtggatctttttccactctgccggagagggtgctttctccttcagatcgtccatgttccgatcatccataccgattataagatcgaagttgtaaaaatcttccgtacggacaggacgcgaacgatgtaccagttcatatcctctgcgggcggcatgggcacgcatacggctatcgggcagttccccctggtgataagccaatataccggctgaatcaatcacaaactctttttccaggccggcttctttaatcagatgaagcatcacgccttctgccgtagaagagcggcaaatgttgccgaggcaaacgaaaagtattttctttttcatgctttcttacttttgaaatataaagatataaaaatccgcatgcaacaacgtgccgcatggatctcccagctacgcgtttctgcatgcggtatcatataagtacagtcaataattctacaacgaattcagtattttgttcgccttattcactgtttcggcagccggaacttcagggaagtctctcaagttaaatgtggagagcattttttccagcttcttaaatccggtcttgtttttcttatccgtaaattccttgcgaaggatcgttatcttttcgtgagcctgaacaccctcgatcaatttctcgaaacgaatggaagagcgtgctcccggataaaccagataagtgtctccaccggcccaggcctcaaaacgtgaatcgagcagtggctctttcggccaactattataagcccaacgcagatagccgtcaagatgatctttggcagaataataactcatccaggcagcctcggcaggatcggagaaggtaaaggtattcgggaaagcttccgtacagcacgtataataggtagtaggaagattgttttgtgcacgacgtgccaatacctccgccggataagaagctccgataggaatacaatagtcgtagatatccgcttccagttctttgtggaagttacccgccagcgatactttaaactcaggatcggctttgcggatcacctgcaatgtcttctgcataacctccatcgggcgttcgtccatggcaatggtacaaatatcgaaccaacctttctcacgtaaatgtttagagaatgacttcaacatagccacccacatctcttcgtaagctttttcgcccggagcggttttcacatactgcatactgtttgtagcctgatcgaaatattggaaagacaacttccacggaaccatcgagtagcaattgatctgcttgtcgatgcccacgctcatcatcatctctacccacttgtcgaacacatcataatcgaaagcccaagtgccgttcactttctttgtccaggtgaccatcgattcaaagtagtcataagtctgtccgttccaaggtttatgcatgatggaagccgtaataatcttctgtccggcatccgccagcatcttcatcacaggacgcatggcatctatgtgtgcctgactccagagcggaacctgataataacgtgccacggcaaacggactctgccacaaatcgaggtggaaagcccactgagacggggcaggcaacacgcgtgaagagactttgatatccatcttcaaggtagacagacggttatctccgtctttcacctcgaccgtaccacgatagactcccggtgacacagtctggggaacctggcaattgatccagatggcctgagtgcttttagcttccataggcatcgaagtcagcaagtggtcaatcggatcggcaaccaacagagagtcgtaaatggagtgatcgggacgataaccacagccgccacgtccgtctttattcaattcgtcggtcatcacatagcggacaaaacctccgctgaatgcatcggccggaagtacatctcccttagagtttttaaattcggagagagaatagttcaatcctttcaggtcggtaccggtccagacaacagcctgcgcatggagtttctcaccgcgccatccctccagcgtaatgcttttctgtggctggatcacaggtacggcatgtttcgcataccgggtatcggtatttccccattgtacctgaggggctttgactgccgcccattctttttcggaaggagcaaccggatcgggcaattctttataagactggatggggaacggggcctgtccggtcggtgttccacattgtgtcactccttgctgggcaagaagcgggcctgtactaaccaggcaagaaagcaaaagtgtcgtgattcgcttcatggtttcattttttaagggtaatatattaagattggttttcattacataggatctacatcatagtaaacaatcagcgatttaaaccgttcgtcttctatcatttcacgttgtacccgcaaaagtaattcacgggcacgactcatcggcgcattttgttctattttaacaactatttttcgtatgaacaaagtttgaatacgggcaacgggcggtttatccggtcccagtatccggtttccgaacaatgcgcgcagtttctcggccatggtgtgtgccatcacatcaagcaacgtctcgttccggtttttcagatagacatacaccatccggtaatacggaggataatgaaacatctgccgctcagccagttgtcccgccaccatatcttcataatcgttcgtcatcacctgacggatgatgggatggtctatacttttggtttgcaacactaccctgccccgtttattttttcgtccggcacgtccggcaacctgcgccatcaactggaaggcacgttcgtacgaacggaaatcgggataattcagcatcgtgtccgcattgagtatccccaccacgctgacgtggtcaaagtcgagtcctttggataccatctgggtaccgatcagtatatcggtctttccctgttcaaagtctgcaataattttttcgtatgccgaccgcgtacgtgtagtatcgagatccatacgtgctacggaagcttccggaaaaatcagcttcacatcatcttctatcttttccgtaccaaatcctctgtgcatcaactcgaccccttcgcaagccggacacgaacggggcaactggtaagtatacccgcaatagtggcaagtcagctgattgatacctttatgataggtcaggctgacatcacagttcttgcactttggcacccatccgcacgtgcggcactctatcatcggagcaaatccccggcgattctgaaacagaatcacctgctgtttattatcgagtgcctcgcggacatattgcagcagcaacggagagaactgccccgtcatccgcttcttgcggtgcaactcctttatatctaccggaataatctccggcaattgaatttccttatagcgttctttcagttccacccacccgaatttgccggtagtggcattctgccaagtctccaccgaaggagtggcagtacccagcaacgtctttgccccatacatcgaagccagcacgatggcagcattccgggcatgatagcgcggtgcgggatcttgttgcttatacgtattttcgtgttcctcgtccacaatgaccagtccgagattccgaaacgggaggaacaccgaagagcgtacccccagaataatatcgtaaccctcctccgtcaactgcttttgccagatctctactctctcggcgtcggggaacttggagtgatagattcccaaccgggagccgaacacccgtttcagccgttcggtgatctgggtagtcaatgctatttcgggcaacagataaagcacctgcctgccttgcctcaacgtctcttctatcaggtggatgtatacttcggtctttccactggaagtcactccgtggagcagacagacattcttctcctgaaagctctgcatgatttcatgataagcccgttgctggtgctcgttcagcacgttcagttctaccgtctttccgaccaaacggttcaaccgcccgatttcctgataatagacctcgaatatctgtttttctaccaatccgttgaaaatagcgggagaagcagaggcacgttgcagaagttctttcttggacacttctttggatgcaccgtcccccaacacgccggaaagctccacatacttcatcaacaacgccaactgtttcggagcgcgctccagctcgtcaaagatacgccggagattctcttcaccggaagcgtctgccgccagccggacccgggcttccgttttgggtttataggtgcggcggagctcttcttttacaaacagagcttccttgtcgagcagcgacttgataacggtgagaatgtttttcaatccgctctctttctcaagtttggtgacacattgctcgggttctttagcaagcaggtcgagcaccagttgctcgcgttcagaaagaggagcatccgcctcgaagtcgggattatactccacaatcgtctcgctctccaacttcaggccggaaggcaatgcggctttgtaaacatcaccctgcgtacacagataataatcggccagccattcccagaaccggaactgaccgggcagcagtatcggagaggtgtcaagtacggtagaaatctctttgacttcatattcggtcggtgcatagtgatgcacattgcgaacaatggctgtatagtacttctttcgcccgaaaggtacaactacccggcaacctatttgcacctcttcagccccttcgtccggaagggaataggtaaagcaacggggcagaggcaaaggtaatatgacatctacatactttttcattgtgaggacaaagatacaaaaaatccccgacgcaagcgccggggattcgtttatcataaaatgattctgtcttcttagaaaatgtaagctgcggaaatctgccacattttagtcttataagagaaatcagcctctttccattctgccgttttattcaacggaatgttataattggcacctacttgtaagtgtctcaacagcttcacaccagcacctacattgattcctacctgagcattttttttattcaaccgtccaagctctccatagtttttatcaccggagaagttgaaatagaaatccggaccggctgctacatagatacccaatgcgctacccaaaccgatagtatactttaagttgattggaatatcaagcccattctgtctgatagactcatcaccgacttttacacctctctgagcaaataaaagggcaccgtcaacacccagacctaccaatggaatagtaacctcagccatcggaccgataaagaatccggtgaagttgtctgtttttaaatcagacttattaaaatcagcttttgccaggtttacaccacctttcacaccaaacttgataagttgtgcctgagcaggcatagccataccgatacatacagctatcattaaagcactaataatctttttcataactaagttgtgtttaaaattcgggacaaagatatagttttaaattaaaaaaacattaaatctgtttgcatattttcagcaaagctttctattctataacattacgctaccctattttgttttttgataacgttcatataaaggcacatgcaatctatcggaaagcccgtgtgagcatcttcctaaggcagcatataccagttatacaactcgtcatacaccagttgcacaactggtatcgtccgggttgcccatccggtagttcctttccttaaaagatacccttaccgtctcaggatggaaacattcagatgcaggcaagaagaaaaaaacaccttttccggaacaacggaccgaaaatccatgtacctttgtggtacttcaaggaaagatgccagagtgatcgaatgggccggactcgaaatccggtgaacggcttgtccgttccgtgggtttgaatcccactctttccgcagtaattttgttgtttgtccgtctcccccacaagtggagtcaccaaaaaagaagagatgcaccgagaaataagaatctacggcacatctctttttttatgtcaaatgcaagcggaagctttctatgccggacgagagcatacgacgcgactttcttcttgcgtcctcggcgaggaaggcttccttactttttgaagtgaatcaacatcaataccgggttgtcatcggctttcaggccggctgctatctctttcaattcaccgctcagctgaccggcttcgtaagcatccatcaggtcttcggacttcagaacagccaagccgcaatcttcgggatagcaaaagaacatgataccttccacacgtttcgaagcatcgtctttattcttcaacaagtaacggcagacttcctgcgtgcgacagtcgtacagccactcttcacttttcagatccaatgactcgatactgttcatcggcacttccataggttgcttagtcagaaagaaataagcccccgccgctccccgtaaaaacaaaccatacttgtttccctcctccgaatgtgaaggagtacggacgagcaatggctctaaggtgcggtccggattcattgcaaacaaggtatccgagtcgggattgccgatataaaagcgggagccattacgaatcaaagagggttccagaagataagcgtatgaatggttttccgcattgacaataagcttgacgagaatatttcttttctgcacatagtccagtgaatccagatgcccgtcccgggtggagaccaaaagataaggatagaagttggcatcctgatcgtccggcacctttgactcctgttccgctatcaaatagtcgggagagaacaggcacatgcgactcatccgtttcccttcagggaaagtaaaagagtgcttgaactttccgtccagagaatagacgtgaatctgctgacggttcatctccttcaggtaaagttcgccgttcgccgggtttacatctatcgaaccgatatccttgtattcacccgggccgttaccgcccctgtggatgcggttgagtactttcccctgccggctgaagaagcaaacgtcgtttccccgatgtcctttggttatcacatattgatcggtgaccacttctaccgaaccgtcgaacagaaattcgtcgttagtctccaaaggaatatagcttatgtcagcaatatcctgcaacacgatctccttttcgggataatcttcattcatatcaatcacaggcagagcctgattcactacttccttgccaccctgacacgaagccaatgcaagggatacccaaaaataaaacgggagtcttttcatagtacaaattattaaccgacgggaaagatacatattattactgaaaccgatgtactactataccctaaaaataaaaaagaaggagatacccgaacggtcatctccttcctcctacttactgaaaattatacttcatattcctgatatcaatgattgggcttaatatcgagtttcaccggatgaatcatattttccggtttaaggatcgtatcgaggtcttcttttgaaagaatgtcatgttccagcaccagttcatagactcccttaccggtctcctgtgcttctttggcaatcttggtagagtttttatatccgataacaggattcagtgcagtcaccacaccgatactgttgtgaacatctttccggcatttttcctcattggccgtgatgccgtctatacacaaggtacgcagcgtatcgaaaccattcatcaacaaatcggcagattcgaaacagcactgggccatgaccggttccatcgcattcagttccatctgggccgcttcaccactcatagctacacaaaggtcgttacctattactttatagtcaatctgattcatcacttcgggaataaccggattgaccttacccggcataatggacgaaccgggctgcatggccggcagattgatttcgcccaacccgcaacgcgggccggatgccaaaaggcgcaagtcattgcatatcttattcatttttacagctatacggcgcatagcagaagagtaacctaccagacaagaagtgtcggaagtagctcctatcagatcatcggccaaacggatatccagtccggtaatcttccggagagccgctatgcatttgcttgcatattccggctcggcggtgattccggttccgatggcagtagctcccatattgacggtcaggaagtcctgagcagcaaagtccaggttcttgacttcatcctgaaggatactggcaaaaccattgaacgtctgtccgagcgtcatcggcaccgcatcttccagctgggtgcgccccatcttgatcacgtgtgcaaactcttcgccctttcttctgaaagcatcgatcacctccttaaaatgtttcaccagtttgaggtgcgtataatacataccgatatgaatagcggtcggataagcgtcattggtagactgcgaacggttaacatgatcattgggcgaacaatattgatattccccacgtttatgtcccatcaactcgagtgcgcggttggctatcacctcgttggcattcatgttggtggtagtcccggctccaccctggatcatgtctaccgggaactggtcatgatgtttcccttccagaatttctttacatgcacgaagaatggcatttgcctgctcttcggtcagcagtccaagttcaaagttagccatagcggctcccatcttggtaatggccagtgcattgataaataagggatactcacaaagatgatatttgctaatgcggaagttctctatcccccgaagggtttgtacgccatataaggcggtttcgggtacttcacgttcacctattaaatcactctctgtacgagttgctttcgataattcttctttcataatatatctttattaacaattacattcttaactgtgtttacaataaccaaacttaagcaatattgttttgaaagcatacatattcgcaatttagttaacatactttaaacaaggaacagtttttatacatgaagacaaatagatgtatcatattgtaaacctcccctcccaacagggattttaataaaatctccttcataatgaaaaaatatactaatagacaaaaacctattaacttcttttttgttgattagcatatcatttaccgattcagagacaatttattcaattatctttgccaaaataaaaaagaaagatatgattctacaattggcttttgtactgacagctatcattatcggtgcccgtctgggaggtatcggactcggagtaatgggcggcgtaggtttaggaatacttacttttgccttcggattgcaacccacagctcctccaatcgacgtgatgttgatgattgccgcagtcatctcggccgcctcctgcatgcaagcagccggcgggctggattatatggtgaagctggcagaaaagttattgcgtaagaacccgtcacatgtcaccatattaagtcccattgtgacctacctgtttacttttgttgcgggaacagggcatgtcgcttactccgtattgcctgtgattgcagaggtagccaccgaaacaaagattcgtccggaacgtcccctcggcatagccgtcatcgcttcgcaacaagccatcacggcaagtcccatctcggcagccacggtcgccttactcggactgttggccggtttcgacattaccctgttcgatattctcaaaataacgattcccgcaaccattatcggcgtactggtaggtgcacttttttctatgaaagtaggtaaagagctggtagacgacccggaataccagaaacgattggctgaaggatacttcaactcaaagaaaatagagattaaagacgtacacaataggcgcaatgcaatgatatcggtgttgattttcatcttagctaccgcctttattgtatttttcggctctttcgacggtatgcgccccacatttctgatcgatggcgaaacagtcaccctgggcatgtctgccattatcgaaatcgtcatgctttcggcagctgcgcttatcctgctgatcacgaagacagatggtatcaaagcgacgcagggttctgtttttccggcagggatgcaggcggtaatcgctatttttggtatagcctggatgggcgatacgtttctgcaaggcaacatggggcaactgaccgaatcgatcgaaggacttgtccgccagatgccatggttgttcggcattgccctgttcataatgtccatcctgctctacagccaggctgctacggtacgtgcactgatgccgttgggtattgctctcggcatttcaccgtatatgctgatcgccatgttcccggctgtaaacggatatttcttcattccgaactatccgacagtagtggccgccatcaatttcgaccggaccggtacaacaaaaatcggtaaatacgtattgaatcattcgtttatgatgcccggactgatatcgaccgttgtagccatcgcgctcggattgctctttatccagatattctaaaagaacggaactatctatttttttaacctaaataacagttgagtcatgaaagaattaaaaagactaagctttgtagtggtcacactactactttccacgatgatggctttcgcgcaaaagcctaatattcacatccttgctacgggtggcacaattgccggtacaggcggttctgccacttccaccaactatacggccggccaggtagcaatcagtacgctgctcgatgcagtacccgaactcaaggatattgccaacgtgaccggtgagcaaattgtacgtatcgcatcgcaggacatgagcgatgaagtgtggctgatactcgccaagaagatcaaccaactcttgaaacgcccggacatcgacggtatcgttatcactcacggaacagatacgatggaagagactgcctatttcctgaacctgaccgtaaaaagtaacaaacccgtggtacttgtaggagccatgcgcccttctaccgcgctgagtgccgatggcccgctgaacctctacaacgccgtagtcactgccggagccaaagaatctatcggcaaaggtgtgctgatagccatgaacggactgattctcggagctgaaagcgcaataaagatgaatacgatcgacgtacaaactttccaggcacccaactccggtgcattgggctatatctttaacggaaaagtattctataaccaggctccgctcaagaaacatacgacccaatctgttttcgacgtaaccaacctgaactctcttcccaaagtaggcattgtctacagctactcgaacatcgatcccgatatggtgaccccactgttgcatcatgactacaaaggtatcatccatgcgggagtaggaaacggcaacttccacaaaaacattttaccggtactgctggaagcacgcaagaaaggaatcctcgtggttcgctcctcccgcgtacctaccggtcctaccacaatggatgccgaagtagacgatactcaatatcagtttattgcttctcaggaactgaatccgcagaagtcacgtgtattgctgattctcggactgaccaaaaccaatgactggaaacagattcagcaatattttaatgagtattaaccggacatcggaccgataaaacctgaacacttatgaaaaaattaatggccatgttgctccttgcgggcagcatacaaggagtctatgcccaaaagacggaaaagaaagagatgtttcttgaaaataaatcgttgtatgaagagctgaccaacgtgcagaagaagacggataagttcaatctgtatctcaatatgcaaggtagtttcgacgccaacttccgcgacggtttcgacgaaggagtattcaagatgcgccaacttcgtatcgaagccaagggcaacctcaacagctggctctcctatcgttatcgccagcgtctgaaccgttcgaatgagggaggaggaatgatcgacaacataccgacttcgattgactatgccggtatcggtgtaaagctgaacgaccagttctctttctttgccggtaaacaatgcaccgcttacggcggtttcgagttcgacctgaatccgattgacatctaccaatacagcgacatgatcgagaatatgagcaattttatgaccggattgaacatcggttataacattacacctacccagcagctcaacttgcagatcctgaacagtcgcaacagttcgttcgacaagacgtatggaatcaccgaagactcggaaggcaaacttccggacctcaagtcgggcaagatgcctttggtctataccctgaactggaatggtaactttaatgaggtgttcaagacccgctggtcggcttccgtcatgagtgaagccaaaggcaagaacctctattattatgcagtgggcaacgaactgaatctggataagttcaatatgttcgtcgatttcatgtattcgcaggaaggcatcgaccgtaacggtaccatcaccgggattgtgggcaatgccggcggacacaatgctttcaacgccggctacttgtcggtagtgaccaagctcaattaccgtttcctccccaagtggaatgctttcgtgaaaggcatgtacgaaacggcctccgtcaccaaagcagccgacggcattgaaaaaggtaactaccgtacttcctggggctacctggcgggggtagagttttatccaatgaagactaatttgcacttcttcctgacctatgtagggcgttcatacgacttcacacatcgtgccaaagtactgggacaggagaattacagtactaaccgattgtctttaggcttcatctaccaactgccgatgttctgacctgaaataaaatagtcccgataaaccggatggtttatcgggactattttattattttcaatcaattcgttcgtatcaatactcctcctcattgaagagttgtgtctcatttgattatcaatcaattatatttcaaagaatgatttttagccaaacaaaccacaccatctgaggctatcaatggcaaagatatgtgttttttgacaaacaaatgaaaacaagcacaactttttgctatacacaaggaaaaatcattgcccatgttttttctttcccttatttaatagtagtttgttcgttctaacgaacgaaattatcagctaagacttctaatcatattttcaacatgattcatgcgaaatacatagtcatacctttctgataaaggttcaagctcttttgtcagagtttcaaacgaaggtttaccgaatagcacagccaggctatctactgctttttgcaagcgtttacccaatatgcgtatagtttcaatgtgagaaagtctattaaataaggtcccatataatattgcatatttcatagaacgagacgaaactttattgaaattctcatctctttgtgctggaagtttcattgtattgcaaaactttacaaatttttccaatgagtcaagaccaacgttacttatgctcctttccaaactatcataaaactgtttctgagaaaagtttcttgatgaatagggtatttggtcaaatttataacgaaatttattaagataacatatctccattgcagcaaacatagacagagaaaagaagtttaagtcatctctagttataacgccatcacctgtagcttttacctgctcgtatcgcttacttatcatcttctgatatttcattaacaaagatgttgataattcaccataaccttttaacagttgcttgctgaggaagatatcctcctgttcttctatttctctattattgcttgtttctgccgagccttcttcctcttcatcaatgatcgcatcatctatcgaacgaatcttttttttaatactctcctcaatacattcaatcagtcttgatgtacgatctatttggaaaatcctgctactttttgcatcgtcattgtcatattccgaattgtattttatttcgggcaaagataaatcagattgccttttatcttctgatgaaactttaatctttggagaaactttttcaccagcatcattaactaagtcccacattacatcagatagcatatcagcaacctccataccatcatatccttcattctcaatacgagaaatgaatctattaagattacgactcattttcgacggatttgttgtggctaagaactcagtccaattgacgaacagcttattagatatagatttcttgtctttatccactaaataacatgtatattgagtttttgctaactttatatcagtactatatctattgcctttatcatgtttaagttcacttacaagagtctcaattccattgtcgatagacagtagtactccatcaggaatctcctcattgctatagacatttaatttacctgattcgtaataagcggataatagtcttaatcgtcttccagtttcagaaggagcttcattagaatgtttggatctattagttggcacatctattcttttcttggttttcagaccaagtgtagatagaaaatcttgctttgtcgaatgatacaagactccaaactcttcatttatgcctctgtgagttattgttccaagtccggctaatgttgcatttgcactgccaaccatacaatattcagcatcattagtcttaaagtgcaaaacctttgcatgcaattgacgttcatatgttttaaaagctattttacccctttttgtttcgctgaaatcataaaaatgaatactgctatttggaagcattccgcttggtggcaaagcacaatcttggtgaatcaaaacattcaccgttgagttcggacaaagttgggataatgtaatcaatgattctccatattcatcaaaatatggactgagaagtgttatagtctgcacctcatttaatggcactaaatttgaaatttgttgtaaaatcccagactgagaatcattatacagtaaagcagcatttaacccttcttgtaccttgcacatactatgaggcacaatattgaaagaggaatctaaaaatgtacaattttcaggaatctcacgaagaattctattatgatcatagtcgttacattgctttgtaaatcggcagagatactgccaacattcttcaatgagaggacgatgcgtcgtatcagtctcatctatcataaaacctgtaaatgcctcatgattttttccatgtcctgtaactgttagattaccagtaccaaacacaaccaatacagcgtcatctcctacaaagaaattaatcttaggatgaaaagctccgacagcacttatagatgtaatggagtactccttaccaatatgtctaatataaataggagatacatattccatagatttatccatttgattggtatcggcaaacacatttatgctacatacttgcttacgatgaagcatgttcaataattgattatcgaaatgtatcaaatctatggcataagtagtcaatacagctgaatgatatttgccatttttgccgccgctaggaatatccaataatattgcatgctcattcttttccataattctcaatgaattgtgatgctatctcagttagtgtattatcttcatcaagataacccatgtcttgtaaaaaattaaatagagaattaatacgcggcgatgtttcaacgggataccgttgctctactagaacaatccgtccatcctcaagaataaattttcttaggtctgaattattctttcccattttagcaatagcaaccacagtatgttcctgcattatttgtactatcagagattctataaagctagatatagagaatgacaggtaacgctccatataagatcttaacccttcactgagtatgcctcgctgacgtttcaaatcattttttttctcaaactcctctatttcttttgagttattctcaaattcagtataaagtctcaacaggagtcttatcgcatgtactgctgcagaaatataatcttgtttgctgacgtaatcccttaactcatcatagattatatttatattatcactcacatttttcctccattcgtcaagagagttataattcatctctttctctataaccgacaataaagattgtttaatatcttgagaaagtagtgcaattggaggattgtgcaattcatgaattttgtaaagtattaagcagaagaacaagtcaatacaataatgtagaccttcacataaataatagaaataccacccaaatgcggcatgcaaattaccgtcttcagttatatgcaaaaaacgattctttacaaactcttgaatctctacgccttttgaaatatcatttaggagcaaaaagattgtttctcttcgcaaggaagagtcctcgtcacttttcgtaagcaaattattcaagaacagccattcctcagagcctacatttatgcgatgtatagctaaagattgtaagtcttctattgcttcttctttaagacttccatccagaatacatttaagaaataatttccggatgttttcatcaatactatttctgacagcatcagctagctcttttcctttgttacgaagatagaatctgccttcttcaatttttacaagttcataataaataagagaaccaagatagtactggccaaaagctccacttttgaatgtccagtacttatctttagattcataatcagcaccatctgcaatatcataaataccatcctctatttgcttatatctaccttgtgaaacaaacaaagctccaaccacagaaccaacattttgttccttcataattagtgccattgccaactctgcacgacgtataaaattatattgatgcagagatgtttgaccagcaacttcaaatttgtcatattcactaagtagccaacaataaaggctgtaatagcggatgtgacgggttagattggtgagcccaggtaacaatttgctataggttgcaattgaactgttctggattcccaatgggtcacgtccacctttgaagccatcgttcgatgcccaaaatacatttgtgatttcagattgcttgtattgtgccattgtacaacagaatgaacaaaatactaatagtacatctcaatatattggtatgcacgttcaaatacatcattgtcttttatctgatacttaacccaaaggatagcgcgtagtttctttttaatttctctacgggctgtaacactttggaatgcatcattaaattgacgtacaatgttaaccacctcattatctatatcatttacaacttgctcaacgataattggggtttcttcagtcttaatactttggaaaaggtctgttaaggcagcacgagcttttgctcttttatcctgggactcatcctttttcttttcttcttcaagcaagtcttttgctaatgcaagaagttgtttcaagaaatcaatactactgattagattttgttccattcgttcacgtagttcatccaatttttctgcaaatttcttgaagttaggatcacctttatgctcgcccaatctcaatcgaagcattttctctacttcaacaatcttcttctcacgtgctttttcatcttcaaggactgcatctatcacatcggcatcaactaccaaatcctctagtggagtaccaatgtcaatagtttcaatgttgcgatgtataatctcaatggtcttagctccaagcaaagtccagataagattaccaccacttacaggacgtacactttgatacacctgagccaaccaagtataatcattttggaattcggccaaacaagcatcgggagaaactatctcccacgctttattgaggcgggcaaagtggcgtccaaagtttgtcttcacaccatcatcttttaagcattgttgagcagcagtaagcccctcccatccaccaatagttctatctacgccagggaagaactcaatacattgttgcatgaatgtaggtataagacttttgatttcatcgatattctgaacaatggtcttaaccgtctcttcatcaaaagcaagactcttagcaacatcctcaaatacaccaacaaaatcaacaatcaacccacatttcttattttcattgtaggtacgattggttctgcaaatggcctgcaacaaagtatgattcttcattggtttgtccaaatacatacactggagtataggtgcgtcaaagccagttaacagtttacttgtcacgatgacaaatttcagcggagacaatgggtctctgaactggtcaagcaatttcttttcctcatcgcgactacgcttatacgccttatattcatctgctttatctccagcagtatgcattacaattgttgtttggtcatctgtgccaagaagagcatccaaagcctttttatacttgacgcaacattctctattgtaaacaacaacctgagctttcatgcctgttggcttcacatactctctgaaatgagagacaatatacttacaaacgtcattgattcttttttcagcggtaaagaatgcatcaacgcttgttcttcttaccaattcgttcttgtcttcctcgctaatttggtcggtaagctcatcaaactccttttgcaacttagcatcgtccaaatgcatttcgactggaacagtcttgaaattaagttcaagagtggccccatctgctactgagttttggaatgtatattttgatatgtatccgtatttatcctcctcggctccaaaacatgcaaatgtattatggtcattacggttgattggcgtacctgttaatccaaagaagaacgcatttggcaatgctgtgcgcatctttttacccaaatctccttcttgggttctatgagcttcgtccatcaagaggatgatattgtcacgttcatcaattacctcaccatcattcaaatcaccgaacttaaagatagtggtaatcaaaatctttctttgatggatcttttcctccagttcttgtttggatgatatgctatcaatgttaggtatttctgcacgtgtgaaatcgccggtaatttggtcttccaaatcaattctatcgtccacaatcacaactgttggtgcttttagcacttcctgacgacgaagtttttgagccgcaaataccatcaaccacgacttaccagaaccctggaaatgccaaatcaaacctttacgaggaccagagccctttgtatatgttgacaaaacacgttgaacaatagcttcgccacccaaatattgttggtaacgacatacaattttaattttcctacctcctgaggttcctgtaaaaacagaatagaagcgatatatatccaatagtctttcaggagtcatcaatgatacatagttatgctcaacatcttccaatgtaccatgcttacgctcctcatcagcaaaccaaggaccccatttgtcaataggacatccgatacctgcatactgtaattctcttccttcgcttgcaaaggttagaatattcggaacaaacatttcagggatactcttctggtaatgcataatatcagtagcaccatcagcccatgttacagacgccttaacaggagtctttgcttcaccgataaccataggtataccattgataacatatacaaggtctaaacgcttgcctccctccttactctttctcggatactcccactgattagtcactatgcaacgattcttatattcatcatccttgcctgcaaagaaacgaatgttgatattatcgccattgtccccaaatgggtatgagttctcttcaaacagcaacttgcggaacttatcattggctgtaattagttcatcagaagctcctccacttgtaatacaagctcgaagtttatatataacctgttctgcttgttcagcagtaataggattcaatgccaacaatgcctccatgagccattctacaacaagaacttcatcaggaagtctcggaacaaactgcggttccacatatatccaaccgcattgtcctgccgcattaatgagcatttgctcaaccgtattttcttcgttaaagtatgccatatgttattatatttttgtttctaattgtaatattctgatttatcggcttgtgtgaggacctcaacaaacaagatttgttcatccatactaggaacaggaactttcattttcttgatatctgagaatacgatatcaacttgatttgtagaaccagttacatattgcctgtatatttctgcttgcgtatcatttaaagaaaggtatgtattaagcacttctggaagaatcactgctctatctgttgacaaggcaatcacatgtccatcatttatgtaggtattattgtctgaaggacaaataaatacacaacatcgtccaagagtaccatttccagttgcattcaagagaacatctcctgattcaagtattctcttcctaactgggatttcctcgttgtggtattttatattacccaaacgttgaccatcccaatggatacatgcttgattaatcactaagacagaagaagattcaacatattttggcgttatccccttattcatgattggacaaaccgattcaagggtttgcttattatgagtattataatacatctcgataaattgcgatttgcaaccaacaaattctgatttatcggcttgttctgcaattgtaacaaacgctttctgatcctcatctgatgcatttggaatgccgatttccaaatatttactcatgttgagattctgaattcctgtcgtcttgcttcccatgcttctgattgcagttctatttgtctgatagaagtagtataatgcatagaatgcaaaccttggatcaacgtctttgaatctcaaaacctgcgtgaagttattgcacaaaaacaagttatcttcttcaaatagcacaactctacccaccggattatcagcagttccacctgatctttcaagtatggtatcgtactttttaatttgctttctaactaccttcctatcttcaatgctgcgggtaacaacatctgcaagattcagctttcctgagtttgtgaagtttgtagtacgtataacctttactccattaccatccttatcttcagtaccccattcaccaggaaaagaatcatcaatataatcttttacaggagtagtttccatgccataaaatatctcgataaattgcgacatactaaccaatgaatttatgatgagacaatttaacattattctgattaaccattgcatattgcaacgtcgtatcgagactctgatgaccaagcaggtgttggacttgctctataggcatgcccttatctattgccattgttgctaatgtgcgacgaaacttgtgtggatgcaccttgggtatattcaaatctttccccatctgacgcagtctaatctccacaccgctaatctgcaatctttcataaggagccaggagtgatacaaacaacgcttcattgctatctgtacgactattgatatatttctgcaaatgaatctttgtacgagcatcgaaatacaccttacgctgcttatcacctttgccggtaacaatacattccctattgtggtagtcaatatctgagcgattgagcttaaccaattctccaacacgcattcctgttgatgccaataaatctatcaatgccaaatcacgtggatttgaacaatggtctcgcatcaattcaagagattcatcagtatatgtttcctttacggttttacctacctttactttatggattcttcgtacaggactctttactatatagttttcttcttctaaccaagaaaagaaactggatagtattcgtcggatattatctaccgttactttgctcgcgccactttcgctttgatatgtatttaagtaatgtcgtaaatcgtcagttgtgatatggattacctctttgcccagcttaatcaatgcattatttatagtactgcgataataggcgattgaattaggagaacatccttcaactttcttggctgagataaaattctctaccaagatttgattattactttctgtattgacagcatctttttcagtcacgacaatgttacggaaggtgtaatcaagcaccttacgcaactgggccaactgctcattattcaatgaactgagcatagcctgttctatttcgttaatcaagttcttaaccataatcttactatattataaagttagtcaattaacgcgcgacctaaaagtaactttatcacctaacttagtcacttttgtatagcaagtgactaagttaagtgaccaagtttatctaatcatccccttcaactattactactattcccatattaaattattgcctaggatttactctgcaaaaagaaatatactgattaacaagtatttagatatatatctgatttattctgcaaatagttctatttttttattgggagtttagaagaagatttttctatctttttatcatcagaaaccacacgacgctcaactttctttatgtcttctgcaacaggaagttcttctgggcggattccacgttctccaagcatacttcgcacactaacattgttctgtacatgttcacgcgtaatagaggattctccatacagatttttctgttctacattataattagtcatttctgttgccaggttctttgccgcaatagttaatgttggcaaaaaatccgctaatggacgatttgacttaatccctaatctgtgtttcatatcttcagttgtatgccctccaaatagtgcagtatcaccttttgaacgaattctaccatatcctttatcatcaactcctctctgataaatattttgagatagttgtttttcggacgagcgcaatcgatctcgagcttcaagtcttgatatttcttggattcgttctgctattatctcagctcttcgagtttgaaccgcaaaataaccttgagcaaaagcaatttcttcttttttaggatctccgttttgtgcaatcaaataacaagcatatcgggtcaacatgaagtctatgacctcacgctgtgaaccactacctaaagataccattttcgtgacctcacgaaaatggtcatctacattgacattctgttgtttacatgattctactgctctacctatagcaacctgaaaattttcccaacgagcatagcctaataatttttgcaaatctcgcgcaaaccaaacttccacattctcactaccgtcatcactcttgatgatttggccaattgcatcaaagttggctttatgttgattaattctttgtatatccataatgtattctattaattatttatcaaactctttattacttggtctattgcctctatcgatttgcggagttcaaattctgatttatcggcctgttcaacaatagaaccaaatcgagtttgttcttccattgatggaattttaatccagagattaagaagatcaacctttgttgtactaggaagagttgtacctttgttcagcacattgaaatctattgttttgcaatgccaatagaaataaacgtaatgaaggactttttcatcaggaactgctccaaatgcagtatcaacgttccaatacttttctcttattagcaaaggcttgtcaatagtaccttttctccctaacaatatagaattagcaggagatagataatctgaggcccttgccatctcgccaccagttccatagacaggatagcccccatcctcaacttggattgatttataatccttgccgttaattatttcgacgacttctttccattgacggctatgatcactcctcatgtgagtatccccaaacatctcgataaattgcgatttcaccatttcttgggtggcggtgagaagtttcttatatgactcctttagtctgtatgcagcccacaatttatctgctaagatacgctgctcttcgatggggggaagatcgaattcgtagtctttcagatgttcccactttactctaggagatagacctccagctgagcgagaaacggcataatcgaaaaacttatcattctgaataatgaacggaagcaacaaagggtctaccttaccaggtatagcctctatcacagtaatatccccagaacaaataccatcaaaatcagcaatagcggccttttttagatatgctcttcttcggccaaacaagatttgtcccttcttgaaagtcttcgtaaatgtattctcggtgtctacatcatatccagagaacttgatttcttgaggaataagatgctctaatcctacaatggggacacccgatttatcacctttatgagttgccctactttctcttgcaaattcttctaatttcatactcatttgccgattaatgtaaacatttcagttattgaagaagtcatctctgcatgaacactcttccaattgctcaatgtttctgaaactgataaaacattaaagttattttcattattcaaagcattggcatataaagagatattgagattgtagttgtaatttgcaatctgttcaagagatgccacggtgctgaaattctgaatttcagaagcattaaaatatgcagatacaatcttttcaatatgtaccttttccagatagctctctgcgttttttcgtgtaacttccttaagagcgttgataaaaatgattttgttcttcaaggtgctacgtttctgattattacatatcagaatgcaagcttccatgggtgaattgtaaaaaaggtttgcaccaaggccaataacacattctacaacatcactctttatcagtttttctcttaaactttgttcttcatctctaaacagaacaccatgagggaaaagtattgcacatctacctgtcttatcatccatagatgcaaggatatgctggaagaaagcgtagtctgcacgcccttgaggtggagttcccaagaaattacgtccccacttatcgttcataaaagcttcacgattccaagtcttaatagaatatggtggattagccaacacaatatcaaacttacgcaacctacttccgtctacaaatgcagggtgtgctaaggtatcttcacgaacaatagaaaagtcttctacaccattcaggtaaagattcattcgggcaatggcgctggtgagtgcattaatctcttggccaaatacctttacaccttgccatggttcaccctttttacgaagaaagtccaaacacttcacaagcataccacccgaaccacatgtagggtcatagatactttcacctggacgtggctgaagaatctctgccatcaaatctactacagtacgattggtgtaaaactcctgtgctgtattgccagcatcgtcggcaaacttaccaaccagatattcgtaagcctgtcccatttcgtctgcagggcatgctttaagcgacaaattgtatcgtgaaaaatcttcaatcagagacgttatgatatggtcgggcatcttcgccttgttggtccagccgtctttagggccaaagattccttccaaacctccaatcacacgaccatctgcatgctcgcctggattggcctgttcaatagcaataaaggcttccaccaagcgttggcctacattttctgtacactcgcgtacatcacgccaatgggcaccatcaggaatacgaattaccaattcttgagcttgggcattggcatactctataccaccttcgcaaacataaccttcaaactgctcatcgtacacatcagaaattcgtttgaagaatagcaaagggaaaatatattctttgtaaccagcagcatcaatctgaccacgaaggcgagtggctgctccccaaaggaacgatttcaagtcttccaatgaaataggttcatcgggatttctataatattttacaagttgttccatagggttataagtttatcagttttctaaattcttcttcacatctctttacctcctcgtatgctgccttgaactcagcaagcacttcggcatatggacggatttcctctttgtgatattccacgtatttattaggagaaaggtcataatccttggcggcaatagcatctagagtgaccactttagcaaagtcttctacatcttcgtagttgatgtaaagttcgtaaaggcggtctacattttcaggagaaagtatattctgtgcacgctttacggtgagaatctttgttccatcaatcatcagtactcgcgcactatgtgcagctggtttcaagcgtcttaatatcaagaaacagggagaaagacctgtgccatagaatagtttatcgcctaatgtcacaacagcttcaatcaaatcgctctttaccagtttctcacgaatgcggccttcttcattaccacggaacaatacgccttgaggcataacaaccgccatacggccattgccggatgccatacttttcaccatgtgttgaatccaggcatagtctccgcaagaatcgctgggtgttccccaaacattacgaccatatttatcggatgaccattctactgaaccccatttctcaagagagaagggcgggttagctataacacaatcgaatttagcaatctctccattctgcaaaatcttaggtgaacgaagtgtgtcaccttgcatgatattaaagtcactggcaccatgcaggaacaagttcatctttgcaatggcagagttgacaacgttcttctcctggccgaatatacttccacaacaaagacttgaatgattcatgtgctgtaccgcctcaatcagcataccgccactaccacatgccgggtcatagacagtttcacctggtttcggatcgagaatgcgtacaagcaagcttacgaccgaacgaggcgtatagaattctccagcttgagccttactgtcatctgcaaatttctttagcaatatctcatatgcatcacccattaaatcagccgggtaatcattgttgcccaatcggcgggtagacagatgttctatcaaatcacgaatcttgccatcagaaaggtttttcttatctgtccatttctgtgcgctgaacatcgacaatacaccatataatgtatccggattggccaactctatacctcgcattgctccaacaattgcagcaccaagattctcagagcgttcgcgaatatcactccaatggcaaccatctggaattacaaaacgatgttgttcaggcaaggatgcatactcctcatcgccaccactttcttcaagcgcagtttgagtttcctcgtcatatacatcagatatacgcttaaaatagaggataggtgttatataatctttgaagttatcttgactcacaggaccacgcaatatgttgcatgcctcaaacaggaagttgtacagattctgcacgccttccattttaagggttttctcgtctttgggaaccagagattcttctttatttttcttttttaccataatatattgctatcatatgaagatagagaactattttgtagagttaagaagctcttttacatctatatc

SEQ ID NO: 4989 - DNA, 7112 bp, Unknown
  gut microbiota DNA sequence
aaatacgcaacgcaatgaacaggactgaaacctacaactccaccacacaatagaaattcccatttttcattttcttgcaaggcactcccaatttacgaagtatcctgcccaaatgcacaattttcgtagccgacagtttaaaaccacttttcttttgtatgcgccccaaaatatcgacagcgagcagcgtttcgcacttttccccctcatcggcagagcgaaaatactgttgaaagaggtgtccaaccggggtttgcagctcaaattcctggttgttctccatcaaaacggcctcttcttcgggagagaaataaaagcactcaccctcacggagttcctgcactgcctgcgcatagggttgcagatagttgatggcaacaccattacggatcctgccggtgatattgatacaaatgaagcggcggcttcccgaaggatcggagagtaaatcactgtgattgctgatcgctatgaacgaagcataacgcttcagttcgcttatagccgattcgtcgaaaggtacgtacgtagcgggccagcgcccggatgcagtccttcccgtcccaacgaggcaagtcatacaagaagtcggtaataggagagtacaccggcacacgttcggagttaatccaacgttccacatcccggtcccaaagttcaagggttcttcttcaaatttggtggtaagttttcttttactcatggaatctaattcagttttcggaagtgtaagccctcttttatagttgacaaaaaagcaagtatcccggctttcgcccgaagagtccatccgtgaagtgaagaagctaatcttagactaaaccatctgaaaatcaatgtctttaaaaagtaagatttctgtcctcaaaagctttgttttaacacagagttaaagcttgttctttggatgtgaataagaagttctttaaatgcaaatgacttgttatttgcgcacaagaacctgacaacctgcaaaagacgttaacaatgttaattgaagaaaggtataaggatgaagacaccggttcaggcggcgtaaactcacttccgaaacttgagctatcttattcagccggtgtctgttttttcttattaaagcaagcaaaaaggacaattatcaacttgaaaataaagaaagaaagaatttaccaccaaatttgaagaagaaacaaaatcttttaaacgagacatgaagtcctctattcacaagaatcatttaccacaaactgcctgatctggcaggacgtacccttactctgcggatgatggtctttcgacatccgaagagtcaggcgatgttttcccatcggtaactccgtatcgaacatatacacccaagggatatacagtccgccactccaggctgtaaacgtatctaactttttgaatggggcaccatcgacactatattccagtatcccggcagccggaccactcacacaaaagataccgacagcagtcccttcaaagtcaagtgttaacttcgctccgggacgattggtctcaagcataggtacgtcgacaaagcccggacgcgtttcggcagcaagccggggagtccatggagcaaccaactgccaacctttacctatatgggcttgccggatatcgaccaatctgccatttgtataactatatgcatccagtggcacggcaggaagagcatgaggcttggcagcatctttggcagtagcgcaaggggcatacatttcatcgagtaccttgtttatggtagctgcataataggcatgtcccaaagggttgggatgtgtgccgccaaactgttcccatgtgaattcaccactccgcatccgcgcagcaatctcagaagcaagattaacagaaggaagcaggtaatgattggccacccgctcatggttcagaattacatcaggcatctgccctttatccaacttcggaataaaaggatcgtaaatgaaatgtaacatcatgatatccattgacggattggagaccaaggcatgccggacaatgccttccatgcctcttacctgctcaatggcactaaatccattggtgtcatcgttcaccgcagcctctacaaaaagcagatcgactttgcctttggacaacacatcatccgtcaggcggaatgccccgggagtactgccggtcgaaggaattccggctgcaacaaaagtgaactttgtataaggaaaacgctgtttcaagtcttcgcaaatcatatcccgccatcccttcatttcggtgatggagcctcccaggaaagcaaccgtacccacccgttctttctcaaacttccgatatgaattctgataattgcctctcagcgtataacattgtccggcttcatagcctgcctgatggcgaacaataaaatcgactaccggagtgggattctccagactgtggggatgatgatccaccccgggtttcagaataagttcgaacggagcccccattgctgtataacgttgacgaaccactgccgagttttcggaaaacggcactaccctgtcactatcgccacatacacaaatcaccggaatacgagcatccgccagaggtttcaaccggtcgatcggattaccgggaaatgtattcatccggacttctgtcaatccccattcgtccaacattcctttccataatccggcatttccggacgaacgtcccggccagctgaacacatcgcaaaccggagcatcgacatagatacaagccactttatccggatgatcggctgcccaattataagcaaacaatcctccccgactaaagccttcgagtgtcacacggggagagagaccgtacatctgtaccatattccaatagaaatcggtacctgacttccgggcacgcggacttccgtaaaggtgggtcaagtcataataagccacatgaaaaccccgcttcagcaaagcctcatctaccgaagcaaaagcaccgaaaaaagcaggacgccaaatccagggattacctgccgccgcccgttcggggcaaacaacaatcgcctgacgatcctgataggtaaaagtatattgatcgaatccctgccacttgcttttatgaccggggaaaggctgggagacgtgttcaggtgcttctttacccgtcagttgccgataaatgacccgggcaatgcgggctgcagctttttcattgggatgcacatgatcggcaaagcactctttcatacctgtcagcggagtatgcagatcgattactttcaatcgatatttagcagccagctgatcgataaccggcatcacgccgtgtacaatcgtactgtcattaatcccccactgtacagcataggcgggaatagggtaacacaggtagatttcaggttttgagggtaaagcgcgaatcgtccgtatcatcgtttccatatccttcttaaaatccgatttgtaccgccagttctgcggtttcgtatcattggttccaagtttgatggtcacaatatcgggattataagccaatgcctgccgatagcgttcctccttcatataaggatggtcacccttcatcaacatggtacgggcactgactccaaagttccggacttcataaccgtcgcccagcatctgccccagcacagcgggataactgtctttcgcaggattgcgcgtacctacaccatacgttatactattgccgatacaggctatcttaatcacttttttctgtgccgtcacatactgggtgaccatcaaaagcaggagtaaggaaataattgcgtttttcatttttctatttgtttattcgcccccaaagatacacaacgattttcaataaacggacgcaatcctcctcaaatatcaccttgatagaagagcccaatccgaccatacattttacagataccactttataaaatgaaataaaacaatcatacagttatgtgaagacttattccatcattatacagaaagggagtccatgccgatatctctacatgtactccctctcttagaatagtgtttaatccgtgatagccacctggctatctcctcaataaattccctcgtaacgaaggttttgttgcataatacctctccaaaaataacttatgtttatagatttgcattgccagatccataatcgattcgcgcaaattgagtaaagcctgtttgtattggggtgaaatagtatgcacagagttaatcaggctatcagcccgcaaagtcaactcctctgaaacttcaatcatccgacgtacttgagcctccgcttttcggggacgaaaacccgctttccggtaacgaataaaaacattgatagaatcaaccgcccgattttgcagatcggtagcggccgcataaacatcaatggcttccgaatctttccctacctgtgtattagcctgatttagctgcaaaaaataatcaactaaatcattaccttttccattcgccaggattctactccgagccgcctccagttgttccacccaactctgccgatcgtacactttcagggagtcttgccaacagaaaaacggcacattccgtccggattccaaaactcccttttcaaattcactatacgaataaggacgtttcaggaattgccacaaggggtcaaaaggcatatgagtctgaatgaagcgttccggcaactgtttaaagtatacatcatccggcgccgatacaaaccgatagtcctcaatatatcccgtatcataagtgggatcaaagaaataccattctccattcacctgcgcaacgcaccactcgtgcacttctggaagcaccacattgccactcttcccgtaaccgtcaatcagatatgcttttatcccgactttaccggctaaagttttaaaaagcagggcgaactgccggcatactccttttcgggtcgaaagtgtctcctgcacctccttttcctcgctataaacctcgttccgggaggtaaaagtagtgaaaacattataggccatacggtgggtcatccacacataaatagcacgcattttcgcttcatctcccttaaatttccggttaatatactccgcaaaagtatctaccttcttcgtatattcatccggaatacttaaaatagcggcatctacccgtgcatatctgttagaggaaggctgagcctctccataaaaaggcatgcaaattgccataagtgacagaaaccaaaaccgttttaacttcatatctatctttcaataaagaaatgatcaaaacatgatgcctatacctatattagcttcgacttgcttaaattggttggtctgtaccccaagcgaaacagccactccgccaaaacgagcgacagcgcccagttccgcctcaacacctttgtaacagtcactgttaatcttaacatatggattttgtatcccatcgacttccccgtctacctctttcgcataattgcgggatccatatccgacacccgcatagagataaagcgtcttccagtcacgttgaaaaacccgttgaagaacacccgcagtaatggcaaaacgactttgttgttctccaccggtataccatccggaggccttgtccaccggatctaaatcagaagagacactgccaaagtcagtctttactttcaaatatcctccagtctttttcactacgcccaccatcagtccgtaagaagtctgctcaaacgaaccgtaactaaacaccggcatcaccaaggttctgattttgttgtttttatcttcaaccaacttgatagacagttcatataccacttgcttctctattttttccggaaactcgtaccgtaacacaccatacttttcgtgcttcaacgtcagtcggcgacagccttgagtgacatatacctgcacttcaccttttcggtaaagaggagcacctatcacatttccttcaaattcaaagtccctacctgtagtctctattttaataagcgcgcacggattatcattcaaatccagtctcggtctggtacgggccgttaaatcacgttccaacttctgaaagctcttcacttgtatctcctgagctgccacgtcagcaaacatcagtaccgaaaagagcatcgtaaacaaacaaaatttcttcataatcatcattctttatcaaaattacatatccgtaacagaaggttttgagcctagcggatgaccggcacgggtagaagcatgcgaaccgacaatgccgataaagccgcgcgtcgatgccgatgggttattattctgcagataacattcaaaaggagcgacatcacgcaatgatgggacaaacacactgcctttttcgtagtaaacgctaccatccgaccaattatccagattcaaagcatacacctttcgggtacctgttacccagtcataagtgccatacatggaatatgcaccgccatccgtgggaactatttccggggtttcgccaagagacacattgtcagcctcgaaagtgacattacccgagatgcaatactcactggcatactcttccgcattgggcatagcgatcagatatggtttgttggcctcaatcgcagtgacatctttataggttccgtccgcctgcaattcacgaagccaaaagcgcttccagataccatctccctctgccatgaaaggagccagccgatttccgtccttatcagtaatggtctgtacagagaaaggaagaatgatcgtctgccatccggcggcttttccgggaatggttttcatcgtaaactcacgagtataggatattttgttagccgtaaaggcttttggacacagatagcgcttctcgtttttcaatacaatagtctgagcgaccccacccggctctattacattcttccaggtactgggacatttcacatcgtgagaaagatacagcaaacaacttgtggaattcaaatcaataatattgggaacatctctattacattcccaaaagatagaagttaagcgggagcatccgttcagaatacctcctcccacggaagtgaccgtttcggggattgtgatagaacttaatcctgaataagcaaaagctgaactattaatctcaggggttccttcttgagaaagattcatttcattcagactggaacaatattcaaaagactcatcacctatggacgtgacacttttaggaatcgaaacggacacaagactagaacagccttgg

SEQ ID NO: 4990 - DNA, 62424 bp, Unknown
  gut microbiota DNA sequence
ttcaaggacttataactttgttttttgtttccagcggagagacagggattcgaaccccgggtacctcgcagtacaacggttttcaagaccgccgcaatcgaccactctgccacctctccagaactacggttaagtagtgcttttctcttaaagcgctgcaaaggtacgaatcattttttaacttgcaaattattccgcaaaaaaatattagaaaagtatatttggaagtaataactgctatctagcttctccccataaataggtatttttatgctattcaacataaaataggacccttttatatacctaaaccgaaaaaaggttgtaaatttgcgcgctctaaaggataactaaccactaactgattaattttatggaactgaataagacctttaaagatggactttggagcaaagaaatcaatgtaagggatttcgttagtaacaacatcactccttatgaaggggatgcttctttcctgcaaggacctaccgaacgcaccaaagctgtctggaatcactgtctcaaagctctcgaagaagagagaaacaataatggtattcgtgcactcgactacacaactgtatctactataacctctcaccctgccggctacatcgataaagaaaacgaactgatcgtcggactacagaccgatcaggtgttaaaacgtgccatcaaaccgtttggcggaatcaatgtggttatgaaagcttgccgtgaaaacggagtggaagtagatgacagagttaaggatatcttcactcactatcgcaagactcacaatgatggggtattcgatgtgtataccgaagaaattcgttcgttccgttcattgggattccttaccggacttcccgacaactatgcacgcggacgtatcatcggtgattatcgccgcctggctctctatggtcttgaccgtctgatagaagctaaaaaagaagatctgcataatctgacaggtcctatgactgaagcccgcattcgtcttcgcgaagaagtagccgagcaaatcaaggccctgaaagagattaaagtattgggcgaatattatggtttggatctgagccgaccggcatataccgcacaggaagctgtacaatgggtgtatatggcttatctggctgccgtaaaagagcaggatggtgctgccatgtcactgggtaatgtatcttcattcctcgacatctatcttgaatatgaattaagccagggtacgataaccgaaacattcgctcaggaactgatcgaccaattcgttatcaaactccgtatggtacgccacttgcgtatgcagtcgtacaacgatatttttgcgggtgatcccacatgggtgaccgaatctatcggtggacgtttcaatgacggacgtaccaaagttactaaaacttctttccgcttcttgcagacactttataacttaggcccgtcaccggaacctaacatgactgtactatggagccctgagttacccgaaggtttcaaagcattctgtgcacaagtatctatcgacacttcttccgtacaatacgaaaacgacgacctaatgcgtgaagtccgtcaatcggatgactacggaatcgcttgttgtgtttcatatcaggaaatcggaaagcagattcaattcttcggcgcacgtgccaaccttgccaaagccctgctactggctatcaacggaggacgttgcgaaaatacaggtacagttatggtaaaagacatccctgtattgaccggtgaaacactgaagttcgaagaagtaatggccaactataagaaagtattgatacaaattgcacgtgtatacaacgaagcaatgaatatcatacattacatgcacgataagtattactacgaaaaggcacagatggctttcgtggatactgatccccgcattaacctcgcttatggtgtagccggactttcaatcgccatcgattcactgtccgccatcaaatatgcacatgtgaaagcccgtcgcaacgacatcggactgacggagggattcgatatcgaaggtgctttcccttgtttcggtaatgacgatgaccgtgtagaccacctgggtgtggacctggtatatttctttagcgaagaattaaagaaactccccgtatataagaatgcccgtcctaccctttcgctgctgactatcacttcgaacgtaatgtatggcaagaagaccggtgccactcctgacggacgcgccaaaggcattgcctttgctcccggtgccaaccccatgcacggacgtgataaaaatggtgcaatcgcctcactgagttctgtagccaagttgcgttatcgcgactcacaggatggtatcagcaatacattctcaatcgttcccaaatcattgggagcaacacaagaagaccgtatcgacaatctggtgaccatgatggacggatattttacaaaaggcgcacaccacctgaacgtaaacgtgctgaaccgggaaatgttgcaggatgcgatggaacatcccgaaaagtatccgcaactgactatccgtgtctcaggatatgccgttaatttcgtgaaattgagccgcgaacatcagttggaagtaatcagccgcagtttccacgaaagaatgtaattgaatgataaacgtacactcatacgagtcaatgggaacattcgacgggccgggtctccggctcgtcgttttccttcaagggtgtaacttccgttgcctctattgtgccaatccggacacaattgaagccaaaggagggacagcaaccgaccctgaggaaatagttcgcatggccgtcagtcagaaagctttcttcggtaaaaagggaggtatcaccttttccggtggagagcctacttttcaagcaaaatcgcttatcccactttttaaaagactaaaggaagcaggaatccatatttgccttgataccaatggcgggctatggaacaatgatgtagaggaactattggaattgactgatctggttttattagatatcaaagaatttaatccggaacatcatcagtctttaaccggaagaagcaacgagcagaccctgaaaaccgcagcctggcttgaaaccaatcataaaccattctggttgcgatacgtattagtgcccggctacagtgacttcgaagacgatatccggcagctgggagagcatcttggaacgtaccagatgattcagcgtgtagaaatattgccttaccacaccttgggtgttcacaaatatgaagcaatgaacaaagaatatatgctgaaaggagtgaaagagaatactccggagcagatagaaaaggctgagaaactattcaggcaatatttccagaccgtacaagtaaattgacttatataagtgtcgaaattcgtattcgccacagattacacgaatttacacagataaagattcattggcaatcaacagattaagttcattctgcggtgaattatgacgactgcacttatttataattttgtaagtcacgatataaaagtctccctgttcttgccttaattcattacaatacaaggcaagaacagggagataatgtaaccggcatattttttgccatcctactttaataagtgaatcgcaatcctgcctgcaagttaaagttacaaggcctttcttttcggatggtttgtactttggagccatcatcaaagaaatacgaaactcccggttccacatataggccgacatgatctgtcgcattgaattgcgctcccacggcaccggctacagaaaattgcaaaggcttcacattcaccttatcatccgccaactttccataaacacacttttcaaccattcctccggcagatacatagagtgtaaaatatttcttttccagaaaattccagtttccacgtacaggaatacctatataatgcaatttctgactctgcatcttggtatccccctgccgtttgatgtcagaagacaacaatgtataagtcaatcccgtctctacagagaaacctttgggaagagacttacgtacagacagtccgaagctaaccggctgatgatgttcataatccaccacggcagttgtattggacttcaggtaagggactccttcttcaaatataacttcctgatcggcaggaatactcacagctccattcatgatcgtcatcaagtcgaccctgttagtcatcggacggggcgcaaaattttcggaaccatttgtcggaagtccacctccattaccgatacccactcccatcgaccatttaccaccacgtttagcagaagagtctccgataggcaactgatacttgtctttaccggacggtcgccgcgcttctttcctctttggaggctgcgccgtcgcactttcttttttctcgattgcagcaattgcttcctgttgcggctcagatctcttttcctccgtcactgcctccggtcgcttctctaccagggaggatacctccggaacaatcaccggatcagtattctttgccaaatagcccgaaacagggttaatactcgtcgttcctaccggcttaactggttcggatacagctacctgtacatccggcaaggcaggttccggcaatacatccgggttgacagccagtgaaggagccgttgcataacggatttcatcagctaccggactattcagaaaatacaaactgacagcagtcgttagcaccaataccacagctgccgcagcaaccgcccaccggcgatacggatatattcgtttttcggttacaggcatcagttccctttccagtcgttcccaaccggaagcaggcatcggctccgaataatcttcgagcttatccttgaatgctttaatccatttttcgtcttctttcatcattctatttcatttttgaaatccaaggttcacctcagtatctgtaaatacatgtcaaccattggtcaccaaccattctttcactttctttgccaatacactttttgcgcgaaaaagctgtgaggcagaagatttttcattaatccccaacatctgtgcgatttccttgtgcgacttatcttcaaaggtgtataaattgaatacggtacgatatccggcagggagttcattaataaattgcatcagcactttctgtggtattacttcaacagccgaagcatccggttcttcatacgtttcgggaacttcatccagtgccgtggtctggttcatcacgtcgttctttcttaagaactgtaaagccgtattcaccattacacgctccatccatgctctcagagagccttcaccccgccaggtaaacttgtcgaaggagtcgaaaatcttcaggaaaccgtcgtgtaccaagtcttgtgccatgtctctgtctccggcataacgaagacagacaccaagcatgcgccctgcgtactgctcataaagttctttgcgggcacgattatctccctgcctgcaacgttccgacagctctaattcattcattctcctaaacacgtgtttaccttataaatgcagcaaagatagaaatactgcacagagagaacaactcttttatcacttttgtttctttaacattttaggatgcaatatttcatcacttcctgcattttctcaatacaataaagaataaatctcaatggataaataggataaaaccaacaagaaacttatgaagaaatttaatttaataacttttgccgtcatcctgatgttattgcccattttacagtcatgtctggacgatgccaacaacgacgagtgggtcacttgtcctccgggtggaatattggccatcggcacaatgaagattcccaatgcggacactccaagggactttttcattgcattggacaatggagacaatgtacttccggcagatacggccgatatacgcaacaggaaatacactgttgcagaaggtcaaagagtcttcgttggctatctgcagatgggagaagagaaacctggatatgagaacggtaaaatattcacgatagaagatatattgacgaaagagatcatcccactgacggaagctacagcagacagcattggagacgaccgtatcaacgtcacagcgcatgcacttacgaaagattatctgaccatcgaatatcaatatctgggcagcatgaatgaaaataaaaaacacatgctgaacttggtacaaaacgaaataacaggtcccataaaagatgacggatatatctatctggagttccggcataatgcctttaatgactcccccaatcaattgggttcgagccttgtttctttcaagctggatagtatagccgagcaattggcgacagccaaaggaataaaactccgtgtgaacaccatttatgacaatatacagtatgtcacaatagatatcaacgaagacaaaaacttaaaaataaaatcatttcattctcaataaaacaacaagaaacacctacacaatcaggcaaaacgagtaataattctgatacataaaagaaataaggcggcgatgtttgtgaaaatatcgccgtcgtttttatattataccagacactgaacggcctgcagggtaagcatctccttgggaaccgccgcctgaatctcctctttcaaaacctgcagcagactggtgcggatgaagtctttccgggtcaccaggacaatctgacgggtaggccgcgggatagcaaacggacggaccagttctttctgctcttcgctcaattgcatcactgccagttcaggaataaacgtaatccccttaccactctccaccatatgcataaaggtttccatactacccagccgatacgccatttggctgatcttaaccgcttccatctgacaaaaacgaaccaactgatcgcggaagcaatgcccttcgtcaagaagccaaagccgttcccctgtcacatcggacgtacgaatcacatcgtgcttgaacaacggttccttctttgagacatagcccaggaattgctcgtagaataaggtctcttccgttaatgcggcatcatccagcatgctggcaatgatagcagcatccgcttcaccggtcagcagagccttgcgaatgtcgggcgtcttcatctccatcacccgtatatcaagatccgggtatttctccatcagttgcggaaagaaacggggcagaagataaggtgcaatcgtcggtaacactgccaatcggaatgtacccgacagggagtgctgttcttcgctgatgatctccttgacacagataacttccgaaagaatcttacgggcctgttccagcactttcttaccaatggtagtagggcaaaccggtgtcatgctacggtcgaacagtttcacccccaattcgtcttccagcttttggatcattgcactcaaagtaggttgcgtcacccggcaatactcggcagctttagcaaaatgccggaactggtccacagccagaatatattccaattgttgtatagtcatcgttctctgatttattaaagatatagaatctatcaatgcaaagatagaaattttcagtttgacacgaatcattttgtgccgtatctttgttccagataaaaagaagaaatatagtattaactcaaaaaaaacaatatcattatgaagactttaaattatacacatttggaagaaaaaggagctaacaccatcgtactgtcattacagcaactgcttgccgattttcagattcattatgcaaacctgagaggatttcactggaacatcaaaggacacggtttcttcgtactgcacagcaagtttgaagatttatataatggagccgccgaaaaggtggacgaaatagccgaacgtatactgatgctgggaggaactcccgccaataaatacagtgactatctgaagatggcgcagatcaaggaagtggacggagtgaataaggccgacgacgctctgaatcatattctcgaaacttacgggcatctgattgcggaagaacgtaaaatcctgtctctcgcctcttcacacaacgacgaagtaacagtggccatgatgagcgactacctgaaagaacaggaaaagatggtttggatgctgactgcatacaacggataacagccgaaagggtgtagccatctgaccgaaaaggtgtagccatacaaacaaaagggtgtagccatcccggcgggatagctacacccttcctgttttattcgattcagatgatacttgtacgtttggtaaattcaataatctccggaatgtatccgaatgcgagcccggtcactgtatccgcacacccataatagatggcaatccgtccggtctccgaatcatgaagcgccgcgcatgggaaacagacattaggcacatcacccatacattcgtaatccttctgaggtgaaatcagataaggccccgaacggaattttactttccagggctgatcgatgtcaagcagtgccgaaccaaaactatacacaaaaccgttgcaggaagccaatacaccatgatagatcagcaaccagccttccgaggtttcaatcgggataggccctgcaccgatcttggtacactgccaggcactgtcttcgaacggagccggcgacataacatgacgatgacgtccccaaaactccatatcgggagactcgctatagaaaatatctccaaaaggagtatgcccattatcactcgggcggctcaacatcgcaaaacgaccgtttatcttacgagggaacaagactccattccgattgaagggaataaaggcattctccaactggtgaaaagtaacaaaatcataggtgtaggccacaccgatagtaggaccatgatagccattacaccaggtcacatagtagcggtcttcgataaagcaaacccgtgggtcatatccatagacccaggttccaacctcagcatcatcacattgaaactttaacggttcttcgttgatatcccaatgaacagcatccttgctgaatcccacatgcaaacgcatgcgacgattagtatcatcacaacggaacacccctgcatagccatccttaaacggaactacggcactgttgaatatactgtttgaagtagggagcaagtcgcgcggaataatcggattggccgaacaacgccacactacatctttacatcctgccggacgttcttcccaaggcatagccggcaaagcagcacctgcaattttaatttcttccatgattcgattaaattaatattatgtatatatcttgtttatattgaaaatctctttttatttcttctttccgtccggatatgtgaaaggtaccagccaagtcacgataaaagccggtatggtagcgataagtacccagataaagaaatcgcgataacccagccaatcgctcaggtatccgctcatcattccgggaagcatcacccccagattcataataccggtagcaaaagcataatgtgccatctgatgtttgccgggagccacttgctgcatcataaagagcatcaatccgacaaaaccaaacccgtaacccaagtattcagacacaatggccataccaataatccatagatcggaaggctggtaaagggctaacaggaaatataccaagaacggaatattaaaagcgcaacataaagaaaacaaagtcttccgaagtccgaaagccgaaatgtaataaccggccaaaagcgaaccgagaataaaagctcccgctccgaacgtaccatataccagtccgatatcctgagtgctgagtcccaatccaccatccgcaaccgacgctttcaggaacaacggtacaatcttgatggcatatccttcggcaaaccggtacaaaatgataaagacaatgtagaaagcaatatgttttttttggaaaaaagagcggatgacttcccaaagcatattcaatgcgtcactcatcgtattcacttcaccggaagctcctcctcccgaaggcaaaatccggatgtggtaaagaccgatcagaatcataatacccgcacacatcaacatgacaatcatccaggcatgtaccactccaaattcatccttcagcatacctgccagccaaaccaagcctccgttggcaagtatcttggctagattataaaaagctccctgccaaccgatatacttggcttgctgggtagcagtcagttcagtcaggtatactccgtcacccgcaatgtcatgagtcgcaccactgagagcaatgatccccatcagagcgatggcataacgaaaaaagtcgggcagcggcagcgaaagtgctaccaatgcaaatgccagtccggtaatgatttccgtagcgacaacaaagtattttttcgttttaaacatttccagaaacggactccataaaggcttcaatgtccagggaagcataatgagagaagtccagaaagcaatctgtgcattcgacacttccatatcggaaaacataaggacagaaaccatcgaaagggccacaaacggcaatcccatagcaaagtaaacagtaggcacccaacatacagggcttatcggctttttattcatcagttagttttttataataattccatcggttaacaattccagtaagcaaagataggggatattaaaaacataacccaagattacgacaagaagttgctttcattatttaataatacaactcacccgggaaaactactaacctctatcaccctttttttattaaactttatcaatacgacacacgcaaagaagcaccgaagactttcatccccgatgcctctcgcccccttatctacaatctaaacacctctattgcttcacatataaatttatctcagcaaacccggtataattatccggagtcagacagtttattctgaattcctttacattcgggataggtggttcgatggccgcatattgcggatcagcccctttaaaatttctgaaagtcaagactctcgggtaagtaacccactcggtttcaccctctttccgaaccttaatctcagcacttctcagattataacccgatccgtaggcactctgtttagtgaccgaaaatccggttaaggtaacaggccggtccagtaccgtattccaccaacactctccggcattagccactccccatgtaaaccaagtagtatttatctcaccgtcaatagccagatgtgcaccatatttggcatcatcatcggcataaacattgctgcaacttacactccacgcacttcgatctacagcggaccaattcccgggtttcgtataactggtataaagcacgctggtataaatccggatataaaccgtcttcatagatgtactgacagcctgttcgtccatgcccgtaactcctttaagcgtcacgggaagcacatatccgccaggattagtcaacttttctatattcttcaaaacgacctgaaaagatgaatcggccactgtctgtcccgtttttaagacaacttcacttgtttcaatggtataattatcttggggcaacaacttacatttcgtcttattggcagaattgtaagtatccactttcagcgtatctactcccaaagcggcagtggcatcccgcgtaaccggctgtacggcacacaattgtatttcaaaatcagaacagtcggcagtagaggaattgctcacacaatccaccactaccgcagcacccatttcggcccccggtgcaactcccgttctgatatatatcttttgatatttgtccatttcatcatcatcgttgctgcacgaagccaacgatacaaagcctgttatcaggcagattaaggtcacaaaattcaaatgtctattcatatcttatcttctttttacatagttattgcttatcaaaacgaacatgctctttccagacaagagttcctcctgccaccaaatcgtatccgtgtccggtacagtcggcaaaggcatttcctttaccttcatccattttccaatagcctatcaggttcggatcggcgggtttcacggcaaaatacatgttggactgaatttgcgtctggctgattgcgctcttccaaagacgcacctgggccatctgacaattgttgcggaagtagctaccgctcgaaaccatgttcatcttgtcgaatctaaccgggccaccctttgtctgcagagtcacgtcgagcactccgttgatataaatcgacaataacccggaagaattataaacgaaggccagatgataccacttattcttctcaaacaaagtcaccgtattgacctgacttccaagtgtcttcacctgtaatgaattataagggatcatagcgtcaccgaaacggatataaacctcgtggtcgctgctgcccgaattaaatatagcctgattattaatatcgaatccgtccatctgtacccaagcctcgagtgaccattcattggttgtcactccccacaattcgtccttggagggcttcacggcattggtcgtattcataaacggtacagactgtatcagcggcttatccagcaaaatgataaacttcgacgaaagcccgattgtggacaccggtccctgaatttctgtgagagataccggaatagcatacaattctccgttttcgtttgaataaggtttcactctaaactcactggggattgcgctaacatcgcctgccgctatctttatctctttgtcataagtaaaatactgctcgggaaggacttcgtacgaagtttcattagcttcattgtactctttaagaatagaaggatctaccgtcaggacagcagtcacattttcggttacaggctgtcccacacgtacggtcagagtagttgttgttacattttcaggatcaacggtaacctttgccgaaccattctcggatgcttcattcaaataaatcgcattgtcgataacctggtaatcggcattgttgcatcctgccaggatcatcggcagaacgaaacaggcaagcaaacattgttttattgttattcttttcataatcaaattctttaaagtcattttacagcaggattcattattctgattgcttcacgcaggtacttatattcgatgtcgcccggatagtcatattccatgtgataggtgcctactccacccttccgtacctgttttccgtcaatagtcggagtccagcgtgccatgccggcaagtgctctcattttgtttccgtaacgatctacataatcacctcctcctgtcggagcataagattcgaaattctccgtaacgatgtacatattagccactttctccggaggaagtattcctttaaagttggcaatcgtaccagccagacgtctgtcaagattagcatcggaattacccgcaaggttagagtatgcctgcacaatgaaatagtcaaagtaaggcccggtttccggatgaatactttgaggctcgccatcaatcacaagtaaccgtcccgtacctgatttaggtccgattctttctcccagtgctttcacgaaagtgagcatattctcgggataacttgccaagtttccgggagaaccataattaggttcataatcgatgtcgaaaccatcgtatccatacttatcaatggagtcacaaatagcattcgcatattttctgatggcaccgtcgatagcttcctgatcaccatccttccagccccagtactccttataattctctttatgctcttccggagtcaactgatcgcctacattagccacgataaaacacattaaggcgcgtgtacccttctgttctttcaccttctttttgtccaacatccgggcctcatcaagatttttccagttaccccaaatcgaaacgaagtccacactatcgggaagccccatcagactgcccaccatcgaagccccgacacccgtccagcctccaaaccaaccgaatgcaaccgaatgctccgaacgtttatatgctctcagattctcgtaataatcatttcccggcatttcaaaaaagtcttccgcttcaggtttggtccagtcactgcaaccccaaagcatgctgacgaacaatgcaaaaactactatatttaaatatctctttttcattttcttttctctttattagcttaaacatcaattctttttagcccaccaaagatcggtagctccggtatccggaccacccaacattgaaacggcagccgaaacattggctgaatttccctgtttttcggacaagggaaaaggtaaacgccgcaattgccgattggtgtcgatcactccattactcaaattgctgacagatggaaacacttccggataacctgtgcgccgatagtcggcccaaccctcaaagcccagagggaagttagcaatccatttctgagtaatgatccgctccagtttctcttccgtcgaagcaccttcgttccaggcaatcgtaatcttggttttcggtgtataattgcatttagccgggtttaccggatcgacaaaaggttcaggcacagccactgcattggccagatattcgtctgccccgctcactttccgttggtcgaatgatagcttaacgccttgctcgtagaagtcacgggcactacctcccatatcccaaccacgcagggcaccttcagcacgcaaaaaggcggtttcagccgcacaaaacatcaacatgtcgtctttctgttcgtaattgggcatggaatatcccgaataagttgccggcttcactccttccaaccctgaccgcatacccatatacgggctatcgcctcccaacttggaggtggtgaaatagactgcactgcgaggatcggaatatcctttcatataactggctatagtggcattgatacggatctctccccaactggaggccaccagccaaagaggattgggctcggcacctacaccgacatacgcgttattatcgttcgtatctatcagtccgcgggtgctctttaccgcttcttcggctttcgtacgggcaagttcgggggacacattactgatgcggacagccaaacgcagtttaagtgaattagcaaaacgcatccatttattataatcaccattatagaccggatcataaccctccaacggtttcagtccccccacttcatctacaaattcacccaacatctgtattgcataatccagatcttcaaacatatgtttatacacatcttcctggctatcgtaggcaacagccgttttaccattggccacctggctgtagggaatgggaccgtaacaatcggttacacgcaacattgtattcacacgaaggagttttgccatcgcccaatagtggccttttccacctgtcgcagtctccaacttgaagtaattggaatagaatttttcaaagggtgtgttgaaaggaatctgattccaggattccgtctgattaaaagtattgaagttggacccaccccatgagttagccatcgtaagataaccactgaaaggtccggctaccatttgatcgatcatctgattgtcattctgctgtacattgattccggtagtaatcatggttgcaaacagcatgggcggattgagtgaatggggttcatagggattggtattatactcctcaaaattatcggtacagcagcacaggaaaggtgtgacagctgcggccaaaactatatttaatattttctttttcatgatcgactggttttaaaattgaaatttgacattgaagccaatattacgtgtactcggttgcataaagtaatctactccctgatagaagttactggtagtggaaggtgtcatttcgggatcgaacggtgctttacaataaatcatccaaagattcttccctacgatacctgccgttatgcctactttattattaaaccatttacgaggtaacgtgtagcttaggttcagttcggacaatcgtatgttcgttgcactataagtatagtactgtcccaaccctccggtagaaccaccgatggtctgataataagatttggcatctacaaatccgttattgatccacactcctccggcatcgcgagcgtcggctgtagctttggacacaccataataatcaagtataccctgagtgttcgagacgcacaatccaccgacacgagcagtcagaaccactcccagattgatgcccttataagagaatgtattgctgaatcccatgttgaaatcaggattcatcgtaccaattttcttcggttcggcatactcctgcactccaactttgcctgtctgagaatctacccagatattaccgttaccgtctgtacgcaaccctttatccacatagaggtctcccattgttccgccctctctcaatataactctggggccatatccgtcggcacccagcacagccatacgcagttcgggcatatcgataatttcaccggttatcggattcgtagcaccgctggcaagacgtttcactttattacgattcatcgtataagtcagactactgttccagctaaagtctccccatgtattattgtatcctaacgccaactccaaaccgtagttctgaatattacccgtttgtacaatggccgaagaataaccgctcgacgatgccagagtgatattaaaggtctggttataggtattcgaatgatagtaagtggcatctatactgaaatgattccacagtctggcattcaaaccgatctcccacgaacgggtatcttccggcttcaagttggtggcaggcagagtggttgaagatccccactgatgggattgttcattgaactcaaaacccggattcgataaataacgttcaaaagatgaagccacagaactgtatgagccacgtaactttgcataagaaataaactcgggcaaccggaacatctcggataaaacgacagaacctccgatggaaggataaaagaatgaagaatgcttggtaaatgcaagttgggactcccagtcatttcgtccggtcagggtcagatatgccatgctccgccatcccaattctatattggcaaatacaccctgagattggtcatgatatccgaactgtttaggtttataattgctttcataattgatgtttctcactgtaaagaagttaggtatccctgccaaatcaccttcattccccatttgttcgtaaaccaaatccttgatagacgcaccgatattggcattcagcgagaagtcccctattctcttatcaatgtttaccatcatatcggcatacgtattgcggtccgtacgattttgatcggaatagaaaccattggcaccggcaaaggtagtcagagtcgatgcataacgttcctgagtcatgcgaatatcggaattatccaccttgacacgtccggctacattgagccaatccgtgagcttataagttaagcttgcattaatcatgtagcgcttcttttctgtcttgcggttcatgcgtttcataatccaatatggattttgcaaacttaatccctgatgtccgtaaggccagaactgtacgttcactccacggctttcgctatatcgttcgaacatacggatctcctcaaaattgtcgttacggggaaagaggtagagtgccggcagcgggttgaagtattgtccctgtgccgttatattcttgtcattctgaatgatatagctggcacctacatccagagtcagcctatctttcaggaaagtggccgtattccggatagagaaattgtagcggctataactgttattaggcaaaatacctgtcgcattggttgttgaagccgacgcataggtctggtttttctttgttccggtcgaaaaagaaatagcgttaattacattcactccggtattaaagaaacgggaagggtcataactttgcttggttttattgccccagcttgcaaattctcccggattgtttccataccggttttgcatctccggcatcatgtatgcgtcagagaacatcgtattattgctgacagtcagagttgtcttttcggcagatcctttcttggtattgatcaatacgactccattggcagccgcattaccatacaaagctgccgcagaaggaccggtcagcatattgatactttcaatatcatccgggttaagatccgctactccgtccgaaccgctttgggtggcaaaagaaccttcactcttaccaaagcttacattgaacatcggaataccgtcaattacataaagagcattattatctttcgtaatggacttggtaccgcgcatcacgactctcgaagcagaaccaactccaccggctgagttattgattgttactccggcaactttaccttgcaaagagttgataaaattagcatccttcactgtattgatagcatcgccacctacttgctgtacgttgtaactcaacgccttttgcgcccgcttgatacctaaggcagtcactaccacttcgtcaagcacttctgcgtcttctttcataacaatcttcaaaggcttggagtctgtcaccgtaatggcctgcggagcataaccgatataggagatctcaataacatctcctttcgcaaccggcaaggagaagtgcccgttcatatcggtaatggtcccgttcgatgttcctttcaccaaaatactcactccgatcagtggttcgcctttggcatccgaaatatttcccgtgaccgtaacttgctcctgttgaatcgaatggttcttatcagtggtcgaaagaataagatgtttgttcataatagaataggaaagtcccgtcccacgaagcagacggttcatgaccgtcgtgatattttcgttagaagccttgatagaaacaggttgagtggggttaacatccccggtgttatacacaatagataatgaggtttgacgtcctatttcattcaggacactgcccaaagaggctttggtaaagtcgatattcacccgtatatcttgcgctgaagcaaagataaaagcaggcatcgacaatagaaaaaatagcaagtactgaaacttgtgtttcactgatttcttcatcttgttcttttttttaattagaaaatgtttttaggtaaaattgaaaggtttagcataaaggatcgctaatacatgttaaggttggttttaaattaagggtcattattcatcactacagatttttaggttaactatatctcttttctgttaatagtacatttcaacttataaacatactaaatcaagaagcggattttttcgaaaaaagaataaaaaaagaataagaatacagatcagaagataaaaaaagggaactatttctttacagaaacagccccctcttcgtgatttaggttataaaatatttttgttatctattcgtcttaggagtcaatattatattgttatcctcacatttataatcgaaacgtttggtaagagcgagtatagaaagaatttgtcttatatcatcgtccgtactaaaagtacaggtaaaacggtccttttgcagttgtgcatccgaaataatgaaatgaacatcaaaatgtttttcaagacactgcactatttcctgaagtgtggcctgttcgaatttcagttttccgttaatccatagcaatacatctcccggacggttggcttctgtaagcatgggttgcatcgtacgggtatccacactcagcatctgtcccggcttcaacaaaataccttcctcttcagactgccccggcaattggacttttactgatcccttcaataaagtggtcaccaccttttcttcggacggacgtgcccggacattgaattttgtaccgagcacgcaagtcctgacatcattactattaacaacaaagggttttgtcttattacgtgatacctcaaaataagcctcaccactcaagtcgacctgtctttcccgcttccagaaagaaggcttatagacgatctgtgttgaagcattcaaccatactttcgttccatccggtaaaactgcctgtgcccgctgccctgattcggtagcaaaaatatatcctgccgactttccggaggaaatccagtatagggcaccgacagacaccaacagaccgcacaggaaagctgccaaaggcatcgcgtaacgtttccattttgatacatgtattctatgcactgattttttctctgactctttgtgctttatccggtccttcaaaacgcttagcgaattttcggtgtccacaccatccattgccaccttacgttcaccgacaaaaagcatataataaagttggtccagttgttttttgtgttctgcagaagcatgataccatgcctccacttccagacactcttcggcatctgattctcctttcagatagttcagtagttttgtttcatccattgttttaaccaaatctttaatacctatatcatacactgttacgtataatacagttcagaaaacaaagttactaaataaaacacaaacttttttttcttcagaaaatcattttgtaggtagcaaaaatttagctacgtttgttcgctaataacaatggagagaagaatggcacagactctgactaacctaaacataaatgataataatgccgttatatcagccctgcgagaaggggatgaagaggtgtttgatcatatctaccgttactattttcgtggattatgcgccttttgctctcaatatgtcactctgagcgaatcggaagaaatcgtgcaggatactatgatgtggctatgggaaaacagaaaaacccttataccggaacttactttaaagactcttctctttactatcgtcaagaacaaagcgcttaataaaatctctcattttgaaataaaacgcaaggtgcatcaggaaattgcggaaaaatatgaaacggagttctcttcacctgacttttacctggaaaacgaactattcagattgtacgaagaggctttaagaaaactaccggccgaatttcgccaggcatacgaaatgaatcgaagtcttcaaatgactcataaagaaattgcggagaaactgaacgtctctccgcaaacaatcaattatcgtatagggcaagccctgaaaatattacggtccgaactaaaggattatctcccgctgatcatgttgtttttatttctgcaagggcataaatgaaatagcttgtccgccaccggctgccatacggatattcaacgtatcgtctgcagtcacctcctgttccgtaatctgatactctgtcggattggttttccaatcagctttctcaccatcagcatagatgattgctttataggtcttccccttctctaaaaaatcaagactgacaggcaagacccgcggttcttcattcgtagaggcacccaggaaataattctgtttagccttccgtaccactgctacaaactctcccggctcaccggccaatgccctcgattcgtcacaatcaggatcgaaatcacggaagaaccggaaggcaggatgcccttcatagtgctcgatcatatcagatgccatttgtaacggagaatataaaatcacccaattagccaactgcttggccaatgttgtattgacgcgactattgcccttatcctgatcattccacttctgacgtttaggagaatctttcgtctgtgtaaacaaaatatcaaaagtacccggagtatagtccatcggaccacccaataagcgggtaaacggcaacatttcatgatgtgaaggaggattaccttcgctccaggcattccactccataccgcgggcgccttcacgtgtcatcatattgggccaggtacgtcgtataccggtatctttgataggttcgtgcgcatcaagagtcatacgataacgggcagccgtctcaaccactttttgataatggttcactccatattgtccatgatgtgaatgtccgtcaggaaaagcaccggcataacctgttttcagaatatgaatacccttatcggtataccacttgattgccttctccatctggcgctcgtagttgggaatgtttccaccggtttcatgatgtccgatgatctgaacattcttttcacgtgcataacgagttatttcatccatatcaaagtcggcataaggtttagtaaagtcaaaactctgcatacctccccaactttcccatccttcgttccacccctcaaacaacacaccttcgatgttattggcatgagcaaaatcaatgtatttcttggcattggcggttgtagcgccatgccgatcgtccatcttccaggtttccactcccagatgcatcccccaccagacaccgacatatttcatcggcttgatccagtcggtggtatccagtttacaaggttcattcaggttaaggatcaacgacgaattaatcagtccgacagcttgcggagcgatctgaatggtacgccatgcagtggtaaaacgattctctttacgagctttaattccatcgggccatgaggcaagttcggatttcagagtattttcaccatccttcttcaaagtcatttccggaaaatcataaagagcagcttcatgaatgctgccatacacccctccggatgttttgaaagtgaaaggagtattggcattctccacttcactgatcttctgtttcgagtacagcaattcataagtctcgaaactggcaggaatagaccaagaggtcccgtcttcatgaaagcggaaagcagtcagttcatcggtgatcaacaaagagtcgacacctggcacctcatactcgtaacgaaaggctacaccatcatcaaatgcacgaaaacgaagagtcaattccacattagcggcatttttcagaagaaccgccatttcattataatgattccggttcgttttattctctccccaaggttgcgtccagatctcgtctttatcggtaaagacagtgttcaccacacgaaatccccgattaagatcgattccctctttcgcttcgaaaccgagcggagagttatccaataaaagggtatcgttgacagtcacccgatacatcatctttccatcggtatccgcagtaaaagccactttgatatgtccgtccggagaggctaattccgtcttcggaacacaactataaaagcccatcagcatcaaggcgatgagtaatatatgcaaaatcggtttcatggttacaattcgtttatacggtttagaattccaaatcagccagatgtgcattatgatcggacaaataggtggaatctgtaatcgcagaagaaataatctctgcatctgccaccttgatttgcggagttacgaaaataaaatcgatcttttcccgttcggctacaggtactcttccgaaatcatggaaagtatagttctcaccggactgtttcccggctatcttccatgcatctttcaagacaaactcattggatgtgatcgttttgtaagcttcccactcttcagaaacattaaagtctccggtcatcatagcaggatgtgtaccggctatttcttttatcttatcaataataagcagggcactgttacgacgagcttccgtaccaacgtggtcaaaatgggtgtttaacatcagaaactcttttccggtagttttatcctttaatttagcccaagtagccacgcgggtacacgcggcatcccaaccaagtttgccgatactatccggatgttcggaaagccagaatgtattactgtctaacaaatcatatttatctttccgatagaatacaggagcatattccccctgagtctttccatcctcgcgtcccacacctacataggcataatcaggcaggccggacaacaggtctttcaactgatgattcagtacttcctgcattcccagcacatcgggatgtttctcacggataaattcacagaccttctctttacgatacttccaggaattcaaactgtcgcccggattatcataacggatattaaaggtcgccacacgaacatgggtaatcggattagaactgcaacccgccaaaagcagggtaataaaaactccgataaaaaagcaaatcttattcattagtttatatgtgttggttattaaatttaaagctatttcgtatatgatacaactaaagaagaaaaaacacttagcgatctgtccgataagtgagggcaagttgccggcaagcggcacgattgatttttcccgtttccgtcaagggtatagccccgactgacaaaatcatcttgggtaactgatatttagacagaagctccttcatctttgtttccggtaactctgcatctgcccccttctctaccaaaagcacaaccgcctctcctaatctggcatcgggtacagaagtgattgcaaaaggaactctcatccagggacgaagtatctcttctatctgctctgcctgtactttgatacctccggtattgatggtattatccttcctgcccaaaatagagaagctgccatcggaatagatttccgcaacatcatttgtcaccaaagtggtatcacaaaccaatggagcatcgatcaccaatgtatgttcggacgaaagagaaagccgtaccgaaggaaaaggccggtacaacatactcgcatccggtccgttcaaccgtcttaaagcaatatgtgaaagggtttctgtcatgccatacgtagaataaaccttaaccggtaattgccgtatctcagcttccaaccctgcatctattgcccctccgcctataataagaatatcggtccggcagagcttctctttttctgccgatacctgcagtgtgttgtaaacctgcaacggcaccatagcggcaaagcgaagcggtatgtccacgtccgccatcggatgcccggaaggagtccggataaccagattcaaccctgccaccaatgcccggaccaccaccatcttcccggcaatatattgcaaaggcatacacaacaatacgctatctccttgtcgaagtcccagaaactcacaagtcagccgggcactttgcatcatctgctccttacggaccttcagcagtttgggagtcccggtagaaccggaagttttcactgtcagataaggagaatcactgaaccactcttccagaaaccggtaaagttcgtacaaaaatcccgatgcctcctccgtgtgacaagctaccagccttttcacgtcctccttggaaagcacactgccttccaacattaggtgttgttcttctctattaaatatcatgtgccgactcctcttatttgcaaaaccataaacaatcttttcgaatctcgaggggcatctcgacattgtccgtaaacagtagcccggtacctaatccttgtggcaacggattccggaaagtcgcacaccattgggctatggcattcagaccgatattcgactccagcgcagatgtgatccaccatccgatatgttgcttttccgcttctgcaatccattcgttgccaccactgatcccgccatgcagagatggtttcagtatgatataccgggggtggatagccgccagcaattcccgttttctttcaagggcattgcaacctatcagttcttcgtccaaagcaataggaagcggggactcagccgccagacgggccatttcctcccactgcccggcccggataggctgctctatggaatgtaggtccaattcggccaaccgattcagtttatccatagcatcggcaggtgagaaagctccattggcatccactctcaactctatttctctggcggaatagtgagcacggatatgtctcaacagggctaattcttcttcaaagtttatcgcaccgatttttagtttgatacagcgatatcccgcctgcatcttgacttcgatctgttgcagcattctgtcaaaactccccatccagataagtccgttaataggtataccggcttctccgcgcgaaaaaggagtatcccataatgcccagctctgtgtttcgtaatggcgcagtgctgtctcgagtccgaacagaatagaaggatacccacgtaaagattctatatccagttctcccgtttgttccagtcgctgacaggcactccgaagcacctgttcataatccggcaagtcatcacaactcagtttgggtaacggagcgcactctcctactccgacacgtcccggacactctatggaagaaagatggatataccagacattccgggtagtataagaaccacgcgaagttcccgcaggttgcttgaaatgaagaacgcgtggaataatgttgattgtatacataaaaatgatataaagaaaaggcctcccatcaagaaggcccctgtctgcttatggaaatttaggatattgtttaaagtccggtttacgcttctccagaaaagcattcttgccttcctgtgcttcatcggtaaggtaataaagcagagtggcatcacctgccagttcctgaataccggcttgaccgtcgagttcggcattcagacccgctttaatcatgcggagtgccaacggactaagctgcatcatctcctccgcccactgaacatactcgtcttccagtttatccagcggtaccactttattgaccagccccatatccagagcctcctgcgcattatacttgcgacaaaggaaccagatctcacgggccttcttctgtcccacaacgcgggcaagataagatgatccgaagccggcatcgaaactacctacacgaggacctgtctgtccgaagatcgcattttcggaagcaatagagagatcgcatacgacatgcaacacgtgtccgcctccgatggcaaatccgttaacggcagcaataaccggtttcggaatcgaacggatttgtttttgcacatccagtacactcaggcggggcactccgtctttaccgatgtatccgccacggccctttacgttctggtcgcctcccgaacagaaggccttatcgcctgcaccggtcaatatcacaacattgatatcgggctcttcacgacagatgcgcatcgcatcactcatttcgcctgttgtagtaggggtgaaagcattccggtaacgttcgcgattgatcgtaatacgggcaatgccgttatagtaatcaaacagaatatcttcgtattctttaataggagtccattctcttttagtttccatttctatttattttgatgattattatttcagtaattcctgtactttcttttgcagttcgggtgtatgtacattgggcgtgttcaataaagcaattgcaaaattatccgccagcacctcttccggatctatgacatatccggtgttccgccctactttatcaaagaagtcggtcgctttctgtaatggataaataactgtcttcccactctcccggagaggcttgaacgactcgtccaacggaatcagccccacattgatatactgatagaacttacccgtggtatagggtctgttggtatagataatcatagtgcagttctgtggcttaccgtcaatggtaaaagtcgcataactatcgcaacgactgacatcgggattggagatacggcttttccgtatatcttcgggaaactcaatctctttgggcaggatgttgaagtcgatagctctgtacagtttctctttgaatccgggattgagacgtgtcaggatgtggaaagtttcatgcaccagcaggcgtgtgtgagaagtttcggtcccccgctgaaaagtagcgtccgtcaatgcgatccagttactgcgtgtgtatcctcccgcccctccttcgtctttcattgttgtctttaccagcacaatctctttcggaaatggaatccgatagccgtatttacgaatcgtatcattcaggttcttcctgatctgctcgatctgctgcgcttcttccgctgtccattcacgcacttcacgaacggccaggctgacgaggtcttctcttttgccttcaggattttcaagtcgggcagcgatgtcaaacggactccaattagccgtataagaatctttggccgctatcaggcgttttgcttctccggcagaagccaaccgaaaattgattgtatctgccctggctgccgattcctccgatacgtatctctcgggaaacatggcttgagctttctccacaaacagggaagctgacaaaagtagcatcccacaaaataggttcatcttgtgcttagtcatcatattagttttttagttggtgatagtagtctttcaatatccgtgcatctttatttttattggtgaaaacctccataatgacaggttgagtcagtaactcgggttgagtgaaagttttcatggcttcgtccaactgtttttcatcctgcacttcctgatagaggaatccccgttcttcggcccatcccttggcagacgtcttatgcacggcagtcacaaagcgatgggaagtaccggacatttcaagtcccggcaaagtatgaaaaatctcccctcccccattattcaaaagcagaatacggaggttacttccaaaatgattgttccacagggcattcatatcatagaaaaagctcagatcaccaatgaccacaaagttcaacttcttcgaagcggcagcataaccgatcgctgtggaaagggagccttcaatgccgctcgtaccccggttgcaacaaacctctaccgtatcgggaagcgaataaagctgggcataacgcacggcggaactattggccagatgcaaagcacacgaagcaggcaacgcctgaatgagtgatccgatagcagacatttcggaataaggcaactccggtcggggaagctccttgcagaagttctcccattgccggggatattccggtgtacggttatccagcagaaaagctatcttctccataaattcaaatgggtccatctcgataatcgtagtcaatgccccttggaacagatcgatcacttcaccatccggcgacacatgccaatgctctttgggcggatgctggcgaagatactttttcattcgtttagagacgatatgccccccgtaagtgatcaccaattcgggaatcatcttctcttgcatctcgggtgacatggcatagagggctgcatcgaagttccggatcgggatgcccggaacggtctgattgcctaaatgctccgtgaaccaggcaaactgcttgtagagcatctttgaatatttcttttcgaacagataaatcaggttcatctggccgacgatcatcatacggcggttgtatttattgaggcggtcgatcaagccgtcatagtcgcgatcataaacattcagtccttgataacgtgtgatgacacgtacttcgggaagtgactctgccgtaaactggaacaggggttcggaaaccggcacgttgatgtgcacagggcctttaccatgatgattcagttcaagcaatgcttcgttcagcaagcggttgcagtaccattcatcctcgtccgtatgtatttcgggcagatcgacagacttcttcaccaatgaccggaaaacacccggctgaggtaaagtctgtccgtccatctggttgatccaagcggcaggacgatcggcggaaataactactaaagatactttctggtagtaggcctctgctatggcaggatgcaaattcaacaaagccgtgcccgatgtgcaacaaacagcggcaggagttccgccctgcaaagcaagcccgatagcaaaaaagccggcactccgctcgtctgttaccgagtaacaagtgaagtcgggatgtccggcaagtgtatgtacaatcggtgcattccggcttccgggacataaaacgactttcgtcaccccatgtgcacggagcaacgctaccaactgcaatatgtttttcttatctgaatacatcgctttatatattattttatttaggagttcaagttctgcatggtctgcatcttcttttccgtctcctgaaactcatcatccaattcggaagaggccagcaggccgcctccggcatacaatgtcaacgaatcttctttcacattcatacagcgtaagttgacatacaggtccgttctcccttccggcctcaaccagcctataaatccggaataatagctgcggtcatagccttcattgtcaaggataaaccggtaagcttcttcttttggcaatccgcatacggcgggagtgggatgcaacaacttcaataaatctcccaacctctgactgtcgttcagcgagaagtggaaatccgttttcaggtgagacaatgccccggcaaaagccggataaggtcctttctctgtcggagaaatccccaacgagcggagttgtttacgaatatatgccgccacatactcctgctcctcccggttcttttcatcccattgttgcggaagctcaccattctgtaaagactgggttcctgccaacgctaccgtattccattctcctttctcacccgataaaatgatttccggagtactgcccatccacaccccggtttgcggagtataacaaagatagacatacgaatagatgtaacgcctgcaagcccggtagaaagccgctgcgggagagaatcccggctctctcctcaccgtcattctgcgggatagtaccaacttatcaaaagtacgttccctcaaagccctgataaagacatcgaaacaagcctcataggctttcttcgccccgagtgaccggtcgcttcggagctgttgcccgtacgatgccgcatcgtccccctgtgcaggggtatgcaagtttccggcgcaggaaggaatctcgtgacaatccggccggatcaatatgataggacattgcggagtgacccggaaaggggcgatgacaaagcctgtccgaccattcaaatcttccattttccggataaggtgtacttctccgcaagtctgcatcagaaagtgaggttcctcttcgcccggattacgatacattgcgaagctccttccctgacggatcaattcatctataatctcacaattatttgtttcttctaacgtcatctcttctttaatatactattcactacccgtatggaagacaccaacttgtccgtcgacgtaaatacgtccacattccagacatgtgatgaacgtcctttgtggataatggtaccgacggcacgtacggtatctccctcgtgggcagatgacatgtggttaccgctgacctgcataccaaccacaatctcgtcgggctggcagagaatcatcgaacccagtccggcaacagtctcggccagtgccaacgtggcacctccgtgcagaatgccgaaaggctgacgggtccgctcgtctaccggcatagtagcctctacccggtcttcggaagcataggtatattgaatgcccagatttcccatcagggcatgacgtgcacgctcgttcaattggtcgagaggaatctctgccggacgaatctcagaaagaatcgctttttctacggcaagagcaactccgtcttcttcattcgaagccgtcaccacatcggcacatacctttaccgaatcctgagcattgcccatggcgatacccaatccggcaaactggatcatggaaacatcgcaaacgccatcaccgataacaatgatttcttccggagtgatatccaaatgggaaagcaaggctcccaacgaagttgatttgtcaatgccacatggcaggacttccaggaaatagggttccgaccggaatacatcgagcgctccgttcaaacgttttttccaatgttcttccaatccgataagcgcctcttcgtcatcactgaccaacatacatttggaaggagcaaaatcaacggcaaccgaaaattcgggttcttcaatcaactccatccgattgaggaatgcttcctgaagaatgtgttcattatctgcctgatcagcaatcattcggtcttcggtgtaagtaaagattgcaaatccgtttttacgggctttcttctccagataaggcaacatttcggggttaatacgccgttcgagcaatacttccccatttttggcattaatgacctgtgcgccgttataggacaggatgtatccgccatagttacccagctccagtttctttgccaaaggcaaaatcccataagtgggccgaccggaggccaaaacaatatgtactcccatctgctgtacttttaacaaagtggcaagggtacgaggagtaatctccttctcatcattgagcaatgtcccgtctacatcaaggactaacagtttatacttcatgacctcgagttttttgtttagattacaaaggtaaaatatttaaggcaacatccctgtttctttagggaaaattataccataaggtacagaaagaaacctgcgtccggactcacagaagatgcgggaatcatcgtttcacccgataaccggacagaatgaaagcaccacgcttcaggtctgtaaacaaacgtaccggactgttactcttaaggataaaagtccggtcagtacatccagcctctcgcaacgactgccaagccgaaattttcattaagaaggtgtttttgtatggacagaaaggtcgatgccctctcttacctaccaaccggaactaagccttaaagaaaggatatccgacatgggggtgtcgacacatccgacatgggggtgtcagcatgcccgacatgggggtgtcggacaacgttggtttaaaggataaaagggttagggtggaatgtatcgggggaaagctcgccgacccaatgccatatacgacaaacggtggacaaatagcactgcactgcaactcgtccaccgtcttgatccggtcttttttatgaagcgaatcagaattcgcttgtaaagtggaaccggatatttttgaaatccatctgtgccatctgaagcacatagttcgaatcggccaggaaaacatcgcgtccttcacgatccttggccatatactgatatttacgtttcttgaatgcttccaactcttccaggtcatcgctttcaatccagcatgctttgtacaaactcaacggctcccaacggcaagaagcattgtattcgttcagcaaacgatattgaataacctcaaactgcaactgacctaccgtaccgataatcttgcgaccgttgaactgattgacaaacaactgggccacaccttcgtccatcaactggtcgatgcccttggcaagctgtttctgcttcatcggatcggcattctctatgtacttgaacatctccggtgagaagctcggcaaaccacggaaatgaagttgttctccttcggtaagcgtatcgccaatcttaaatgttccgttatccggcaaaccgataatatctccggcccaagcctcgtcaatagtcgtcttacgttgtgccataaactgggtgggtgaggagaaacgcatagtcttaccatgacgtacatgcagataaggggcgtttcgtacaaacttacctgaacagattttgcagaaggctacgcacgaacggtgattgggatcgatgttagccgtaatcttgaaaataaaaccggtaaatttaggctcctcggggatcacctcacgttcttctgcatgtacgggacggggggcgggagcaatctcaacaaaacagttgagcagttcctgcacaccaaaattatttaaagccgaaccgaaaaagactggtgcacactctccctgcagatatgtttctacatcaaattcgggatatacaccttctatcaattccaaatcaccgcgtaacttatctgccagcgtatcgccgatctgccgatccaactcgtcagaatgaatatctatttccactttctccgtcaccacttgtttggaaggttgatagaggtccagtttctgttcgtagatattataaactcccttgaagcggggtccctgttcgataggccaagacagaggacgtacctgaatcatcagttcttcttccaattcatccagcaagtcaaacggatctttaccttcacggtccattttgttcacaaagatgattaccggggtattccgcatccggcagacttccattagcttgcgggtctgggtttccacacccttcgctccatctaccacgatgatgacactgtctaccgccgtcaaggtacgataggtatcttcggcaaagtcctggtgccccggagtatccagaatattaatcttatagtcccgatagtcaaactccatcaccgaagttgtcaccgagataccacgttgtttctcgatctccatccagtcggaagttgccgtctttttgatcttgttactttttactgctcctgccacctgaatctgtccgccgaacaacagtaacttctcagtcaacgaagttttaccggcatccgggtgtgcaataatggcgaaagtgcgccgtcttagtatttctgtattatctgccatatttcgagaattgaggatgaagaatcaaagtgtctccattcttaattgattaatgcaacgtttcaggctctcctcccaatgcgggatctcaatgccaaatgtatcttttatctttgttttatcgagtacggaatagtgtggacggggtgcctttgccggataatcggcggtatgcaatggttttaccttacacgaagcaatgcccgccaggcgatggatggctatggtaaagtcataccaggaacaaacaccttcgtcactgaaatggtaaatgccgcggacaacgcctttattgatcgctgcaaaaatagcctgggccaaatcattagcgtaagtcggtgtaccgatctgatcgaaaatgactcccaaagaatcacgctcctgcccgagacgaatcattgtctttacaaaattattgccatagatggagtacaaccatgccgtacgaattaccatagctttctcgcaatgatccatcacgttctgttcgcccgccagcttggtagagccataaaccgaagccggacaagtaggttcctcttccgtataaggaatatgcgctgtaccgtcaaacacataatcggtagaaacttgaatcattgcagcgccattagcctgagccgcccgtgccagatatcccggtgctatattattcagtttgtcgcaaagttcgacattatcctcagccttgtctaccgctgtataagcagcgcagttcacgatgatgtcaatcttatgttcactcacataggcataaacagcctgttcatcacaaatgtccaactcctgtacatccgtaaaaaaatacgtatgctgcaggttttctctggcaagtacctgcatttcattgccaagttgcccgttggctccggtgaccaatatattcatttcggtatttttttagttggattcaccacagagtaacacggagtctcacagagttttaatctcttgtttataggatattaagaaaaaaccatctctatggagccctgtactactctatggtgagtctgattcgttttattccagttttaactctccttttctatccttatcataatagttggccaacatagacaaaaagctactgatagcttccattgccttcgtagtctccggactgaccggcttcttttgcaagcgcaacagcatcatgccatacaaagcttcgaaacaggtttccagctccggttcttccttctgaccgtttttatttcgtaattctacaataaagggtaatgctttgaaataagccgaactatagaaaggaaatttaggtgatgccaacagggcagcgtgcaattcggtcaggttgatgattacgttccggttaatctggagatgtcctttctcacgaactccctcttcccgcatcatcgaagccagattggcataccattctgtcagttcacgacgctcttcatcgctcacttgataacgggaaacgatattctcctcaatccggtcgacatcacaatcattggcacggatcaaatcctctatctgccacatataaataaggtattcggcaatgttcttctccttgagttgttgcgctattttcatcttctgtcttttctcctatcaataaatagattctcccagcaaagtgaatatgagtccgaacacggatactgccatcacgatactgccaatcacccggttcaaaatccagataccccgcaaattgaatcgcgtccgcactttattaacaaagaaagttattccaaaccaccacgccagcgctccgagggcaatggccagatagcccgtaatctcttcaaagaccaatactccgggttgcacaaaagcaaaacgggcaaacagaccgatgaaaagaaaaataataagcggattggaaagtgtaaccgcaaaggcggtaatgaagttgtggaaataagaacctttattggccgatacaggccgaatggattgcacaggattgctgcggaatgtataaataccaaaagccaatagcatgatacttccgaggagttgcagataaaaaatatttttattgatataatcgaatacgaagctcatgccatatcccgtcaaaagagcataagcaatatcactcaacgaagcccccagtccggtgacaaatccataccaacgccctttgttcaaagtacgctgaatacaaaggacacctacaggccccagcggcgcagaaaccacaatgccgataacgaatcctttaaccagtatatcaagtatagtctctatctgaatcattccgcaaatatcgcatttttttatgatatgccagtatcttgttaacgttttctatcacaattttgtcctattaaccggtacacatcttcattctcacctaccacccacactacatctccttcttcaaaaggaacattcacgtcaggcgtcatcaaagcttctcctccccgctccacgccggcaatcaggcaatggtatttatcacgaatgcccgattcacgcagcgttctgcccagaaaagcagaatctgtatcgatcaacaattgcttcaaagtcatttcactcttctcaaacactcccgaatcgatcacagcaacatgcgacatctcttctgcgaaggtattcagctggtcatcagtaccgatcacttgtattttgtccatcggaaacagacggatagaaccacccggaatgttaatcctacgttttccccgaagaatggagactacatgcactccatacttcttacccagattcagttcaagcaaggtttttccggcccaagccgactctcccggtatttcaaaatcagtcagatgcaggtctcttgaaagcaaacgtccggcataagccggttttttctctcccaaatactcagcgcgtatatcacgtgaacgaagattctgaaaaaatttacgttctatcaaaatggattgtttttttaactgcctcgaaagtatcatcagaatcaccagtaacaaagccactccgaacatcagtcctaccgaagctttaaacaaacgggtaatgacaaacataacaaacagaactgacactgcgacacgaaatacaaccgtggaaaccagcggtccgcgattgacacgattatcattccacaaagttataaattcgaccgagtgattcttcttcaccataatggcccgcaaaaaaggggatatgcacaagatagtaaaaacagctcctgccaatgggccccagatacccggcaaatgttcgcgtagcaaaggtactacaaaacggaacgaaagggtaattaccgaaatactgacaatggaatacaccaccagaatacgtgctaaggcaaacaatagcttccgccacaaactttcgtgattgacagtccgcgtaccggtagtatatcgcatcaggaaacgtctccaggattcgggtaacttacgatcgacgaagtttgaggcaggctcggcaacacgaatcatataaggggtcagaaatgtcgtgatcacggaaacagctactacaatcggatataggaaatcacttgtcacatgtaatgataagcccagagaagcaataataaaagcaaactcccctatctgcgtcaggctaaagccacactgcatggcagtctttaaaggctgtcctgccaacataacccccattgttccgaaaaaggcctgtcccagaatcactgccaacgtaatgactatgataggaaccgcatattcaataatcatcgcaggatctaccatcatcccgaccgatacaaaaaagatagcaccaaataagtctttcacaggctttaccaatcgatcgatagattccgcctcaattgtctcggccaggatagaccccataatgaaagcaccaaaagcagccgagaaaccggtattggcagcaatagccaccataccgaaacaaagagccaaagatacgattaacagcgtttcttcactcatcagtttccgacagcgcttcaggaactcgggtatggcataaatgccaacgacaaaccaaagaataaggaaaaaaagtaacttaccgatactgcccagcatttctgtcccttcaaagttattgctgactgccatcgtcgaaagcatgaccattaaaacaatggcaagtatatcttcaagaataagaatactgagtactaaaccggtaaactgtttcttccgcaatcctaagtcatcaaatgccttataaataattgtagtagaagacatggcgatcatacctcccaagaacaggctatccatacgttgccagccgaaccccatcccgacggcaatcccaagaagaatcatacagaagataatggtacaggcggcaataacagccgtacctcccaccttgactatcttcttaaaactaaattccaatccaagagcaaaaagcaagaagatgactccaatatcagcccaggttttaatattggctacatccatcaccgaaggtgtatagggcatatgtggactggcaagaaatccggcaaccacatagcccagcacaagcggttgcttcaacttcttgaataacagagtcattataccggcacaaatcagaatcagggcgaggtcggctattaatgttggaagttgtgacattcgaatagaatttaaatcgaatgcaaaattagtgttttctgttaactaacaacagaaaaactataaaatcatactttataatctactcatctccccttccacctgtcgggctttcgaaccggcaagtgaatgtcccagttgtgcagcatgttcaaaacattcttttgctttgttcagaatatagtatctggtatttttaatattccgcttatcttttcttccttttacttttggtaattcttctacgacagagtgtagctcagtacctaatttataccacatttcctgttgtttattcattaactcctggctctgagcatcgatcgtcacctgttggctcgcaattgtatttttctgattagctattgtttgttgttggttcgcaatctcctgtttgagattgttgatttcaatctctttttgctcaataatacttttcaatttatccatcgttgccaacaggttcttactgccgtcactacgcttaccttcaactgcacttaagcgctttttcagagtctgaagtttctgattgatctcttctgcttgactcaattcccccactccatgctctacattcacacgcaaagaatgtgtattgccggctatctgatttaattccgtcaccacattattaataattttacttttctctaaattatcttcaataacagccgcttgctgttcgttcaactccttatactcggcaatcttagcatcatacttacttttagcaaccatctcagttgatgagttgctgcaggacacgataataaaaaacaaaaatggaatcgaataaatcactttgaaattgtccatgtcgtttgttcatttatattaaatactattttaattttatccaaatctttatcatagtggattgctccattacccagttctcctgaaacaaatatcattttatcagaattaaaatccaacttatacactttaggagaagatttaccggttatcaaaagttgaaacgttccatctttcaccttttttataataccactggatacttggatctgccccacaatagatttactaacagtataatttccttccagtctatccggagcaatcaattccatctttatttcattccgatcaatttcttttttatccggcatgggattaaaaaacagtcctatcagaacagttataaaagctattgcaaaaatgataagtaaattggttattaatgcccttcttctatctccctttatttgtgccggaagcgtatgattactcaccacatgataaatcttcacacattgcccgaccagcgggtaaatggttaaagcaatacccattataatcaaaggccgcggaatcaaaaataaagccgctattgccaatgaaacaatagtcacggtttcctgtttagatacacgcgaagtgaacaattcggaatatggttcggaacttgtttcaacttcattgagatccgcttcgtgtcctataaccaaagcagtcttttgagcatcgctcaaactacgataaacttcctgctgcttggctggttccaaaagactcattaaaaagatatctgatacgatatttcgtttcaatgcatacattaaaacaaaaaagaaagcggcaacaaacgatgttttcaaaacataatctgcagcggcaatctgaaaattctccataaaaggaattccaatagcctgcaacgctatcgcatcttccattcgtccactggacaaaataatagccgaagctgctgcagaaattgaaaataataaaccaagtccccaattaatgatcttttgagtccacataagggctataacattctctcccaataaacgcttcactagcagaaacatcatccaacggcataaaagcattatcagacatacaaacatgaaggtcaacaaccatgatttaaaaatataatacccaaatgatgttatttttaaaatgggggttaaaacacactttccgtaaaagttctccgaaggagttcctatgtattccaaacaggtagaaattactgaaattgcagagttgattcgatattttttatatgaaggtaattcattcaactcctgaatacgaactgaagtgttttgcagaaacaatggaagagtttcttctacacctctctcctgtatttgcttttgcaaatctaaataatccagtccggaagttgctcctgtcatattgcaataaacccgatatcgattacccaaacgtatttgaatgagtttcggatttttcgaaacaagcaccaacatccctctatgcttaaaatctcttgactcggatatcgaatctacaagatcattaaaacattcatcagcataagcccccatttggatggcctcgatactatctacggcaaaaagaattggaacaatcccggcaggataatcaaaattaagaaattcttctttcactctattgctcaatagattacccgtatcaaaaactttaggggaatatagacattgctcagtatcgtcagtacaagccgaaaacaaaaagagagcaataaaaaacgacaaaaacaaagatgtctttttcatataaaagcccgtaagattaacaatgtaaattatagtaagttagtatgcagttcaaagaacaaaagctgttcttcaacacacatacaaattcagtaaaccttctgacaaaagaaaaatatgaaaatcttctgatattccgcatctccgcaaacagaacattacggttaccgataagattcgtcattgtcggtagtttccgttatcaccagaattacactacctttattaagaaagcaacgacaaaatccattttctaatatccgattttctaataccaataaaatatttgttatgtaagtgtaatacctctatcaaatcttattatcaaagatcctaattttcacttagtagatcttttctaagaaagaaatgataatcattgaacaatcgattaacattctttcaatatcttaaattttctatttaatatcttttagtgttgcagcaaatatagtgcttagatttattatttccaatgattaagaaaaaaattattccaatatttactaaattcatgttataagactcactatttaccatcatacaacgatatttaatacacatttgtcactgaaaacagtgatacgcctatcacttttatattacacattcagttcataggaaacaaaatacaatcatttaattgatctaattattctttctattgcattatatatagatcaaaaatacaaataaatattaattccaagaaatcaaaaaaagtagaaatcagaatataatgcaaatataatagcctatataggcagaaatagagattattctgaaataaaaatatttcatagacataaccaagaataatattagaaaggaaataatatgtttgagtatagagacaaattgactaaggaagacttttatatctgttaaatgagacctctaatattccaaacatatccgaaagaacgtaaactttccatttaaacaaaaatccccctctgcctttaaagacagagagggatttcaacgctttattcgtcaatattctatttacggaaaggcggttttactactacagctttcaacttacgtccacgcatatcaatacatatttctgtaccgatcttactatattcaggtttcacgtatcccataccaataccaatcttacgaataggagacattgtacctgatgttactaccccgattttatcaccttccgctgttgtcaactcgtaaccatgacgaggaatcccccggtcaatcatttcaaagcccactaatttgcgaacggtgccttcagctttttgtttttcaagcatcgaacgatttgtaaagttcttgccgtccacaaatttagtgatccatcccagtccggcttcaataggagacgtagtatcgtccaagtcattaccgtacagacagaatcccatttcaagacgaagagtatcacgcgcaccaagccctatcggttttatgccaaactcagctccggcttcaaaaactgcatcccaaatcttcatggcagcatccggataaaaatatagttcaaatccacctgctccggtatatcccgtattggaaataatcacattcttctcaccggcaaactcaccgactttaaacgtataatagggaatatcggcaagattaatatccgtcaatttttgcagagcttgaatggctttcggaccttgtacggcaagttgtgccatattatctgaagagttttccaactcaacaccttccgtattgtgagaaatgcaccagttccagtccttctctatattcgaagcattaacaaccaaaagatatttttccggttcatattgatagaccagtaagtcatcaacgatacccccgtcttcatttggaaaacaagtatattgaattttacccggcaccaaagctgccacattatttgaagtcactttctgcaaaaaatccaacgcatgaggacctttcacccaaaattcgcccatgtgtgacacatcaaaaacaccgacaccgttacaaactgtaaggtgttcgtcgatgatacccgaatactcaataggcatgttatatcctgcaaactcgtgcatcttagcaccaagtgcaatatgtttctcggtaaatggagtggttttcatgaaatgagaatttaagaattatataaataatgattacttcgaagctaccagttcagcgatcttcacaatgaccttcattgccttttccatattctggatgggaacaaattcatagcgaccgtgaaaattcaagccaccggcaaagatattgggacaaggcaaccccttgaatgataattgtgcgccatccgttcctccacgaataggtttcacattcggtttcacccctacggcttccattgcagcaaaagcagtgtcgataatatgcattacgggttctatcttttcacgcatgttatagtactggtcacgcaattcgagcgtagcagtgccttcaccaaactctgcattgatcttattcaccaaatgttctatctcttttttacgatcctcaaatttattacggtcatggtcacgaataatgtaggatacagtgctctgttccacatctccttggataccgattaagtggtagaaaccctcatatccggaagtatgttccggagtctcgtgccggggaagcatagtaataaactgattggctatacggatcgaattgatcattttatgtttagcatatcccggatgcacattacgtcctttaaaagtgatcttggcagcggcagcattgaaattttcaaattccaactctccaacttctcctccgtccatcgtataagcccactcacaaccgaacttctgaacatcaaacttatgagcaccctcacctatttcttcatccggattgaaaccgatccgaattttaccatgcttaatttcaggatgctcctgcagatagacaacagctgatactatttcggcaatacctgccttatcatctgcccctaacagagttttaccattggtaacaatcagatcctcacccttatgatcgagcaactcaggaaactgactcggtgaaagtacgatattctcttcggcacaaagcacaatatccgaaccatcgtatttttctacaatacgtggagtgacattttttccactcatatcgggactcgtatccatatgtgctataaagccgatgacaggcaattctttctctgtattggcaggtaaagtagcaaaaagataaccgttctcgtccaatgttatatcttctagccccaacgactccaactcagactttagatattccgcaaataccatttggcccggagtgctgggggtaagtcttgtcagttcatccgactgtgtatcaaagcttacgtacttcaaaaaacgttctactaaattcatatctttaaaatttaataatttgctaaaatcttatttttcacgcctgtaaaggtaaaaaaagagccgtgaactgccaagcaattcacggctctttttttatacataatcttatattcagtcactaatagccacttagaaacaactggatccgtcaaaacaatgggtacaaactttacactttggcaatccgatggcttcaatcagtgtttcaatcgtgttgaatttgagagacgaaagtccgaaacgcttggcgatgatgcctaccatcttctcatattccggcgaacctgtagtagcatatttatccagattcttattttcatctccctccagttcttttattatctgcctggtgataagttccatatccgactttgaagctgtaaaaccaataaacggacagccataaataagcggtgggcatccgatacgcatatgtacctcttttgcaccataatcaaaaagaatcttcacattatcatgcaactgcgtaccacgcacaatggagtcatcacaaaaaataatacgcttatcttggagcatagcacggttaggaatcaacttcatctttgccaccaaagaacgtaattcctgcttgctcggagtaaaactacggggccaggtaggagtatacttggtaatagcacgatgataaggaatgcctttcccttctgcataccccaatgcctgcccgatacccgaatccggaattccacaaacacaatcagcatcgcagtcatcttgttcacccattttcaacccgctcgtaaagcgtacctcttctacattccggccttcataacatgaattgggaaaaccgtaatacacccacaaaaatgaacagatttgcattttgtcatcaggcttgcgaagttgttcaagacggtcagcatgcatacggactatttcaccgggtcctaaatagcgttctatttcaaaatcaagattcggaaaactgttagattcactcgtggctgcataagcgccctcctttttcccgataacaataggagtacgtccccatttatctcgtgcggcaatcactccatcttctgtcaacagaagcatagagcacgaaccttttatatggttatatacattctctattccttctacaaaatttttaccctgaataatcaataaagcgataagttccgtttgattggtactacccgaactaagttcggcgaaatgcatgttttgtgaaagtagttcctcttcgagttctttaaggtttgtgaccttagcaaccgtaacaatggcaaatctaccgagatgtgagttaataataataggttgggcgtctgtatcactgataataccgataccggcatttcctttaaatttatccagttcttcctcaaatttggtacggaaatatgaactctgcaggttatgaatcgagcggataaatccctgttcttcactatatgtcgcaagtcctccccgttttgttcccaggtgtgagttatagtctgtgccgtagaataaatcggtcacacagctcgttttcgagactgttccgaaaaaacctcccatatgattcttttttgatgttgtttttaaaaagatggcgcaaaagtacaaaaaagattcgtgttggcataggtttctcctagaaatcactttttcaaacgttcctccagaaaagcttgtaaaatacgggcatgattataaaccggctccttcgaagcatacaaaagagtcactgattcacaggatcgtatccgggataaaaactcggacgttttatcagaagtttcaagttcttttcgatacatctctgcaaactctttccagtgtcccggaacatcgtcatgaaaccattttcttaaatcagatgaaggagtcagttcctttgcccaatagtcatactttaaatgttcttttttcattccgcgcggccaaaggcgatctactaaaacacgatacccatctgtatcagaaggatcctcatatacacgttttatttttatttcagtcatacctaatcctattttaataaaataacccataaaaaccgaaaaggtttattaaaaaaaacaccctcaaacgggcacaaaaggcttttcacgaaagttacagacataatcgattaaacgacctcctttatttctcataacggaagttacaaaagatgaaatatagaacattcctgtttaacataccccttactagtgctacaaagagatcataataatgaatacctatttaataaagacaatatactgagaaacaaacaaatggaaaagtgattccacagacgaattgtccggatttcattcataagcatataatcttctatttcacaaagctttgcatctttacaaaatcagacaatcttaaaataaatgaagaaatatttgcaaccaacaaaaactatttatatttttgcgaccgttttgcgaattaggcgtatcaaacgccggattattaaaaacaattattggcgaataataacaattaatgtttaaccaaaccaatttaaaatttagagaaatgaaaaaaagtatttttatgtttgcattggcaacattgatgagcgcaagtgtatttgctcaagacaatgatgcaaaacgtcttccgggatataaaacaacctttgaaggcaatggattttggaacaactggttcatgtcagcaaactttggtgcacaatctctgttcgcagaaaattcaaaagacgctaaattcagaaacacaatcactttcatgccgacactttctgtaggtaaatggtttaatccttactggggagttcgtttacaaggtacaggcggttcactgcacggatttacttctggcgctaactcaatgttgcactatcaatatggtgctgttcacgcagactttatgttcggactgatcaatttctttgctccttataaagaaaaccgtcgttttgacatcgttccttttgcaggtattggtggagcatttattcgtaaaggcgaccagtcgtttacaatcaatgcaggtatccaggcacgttaccgtatctcaaaacgtttcgatattaacgttgaataccaaggagctatcctggatgacgatatggtggttcgcggtggtttcccgaatgatggaatcagcggtctgacagccggtgttactttccgtttcggcaaaacaggtttcaagaaaggctactcttcacgtcagtacaacgctatcaagagcaactactctgatctggaagcaaactacgcaactttgaaaaaagaaaatgctgcacaacaagctgaaatagcagaactgaaagcacgtaaaccggaaattgtcaaagaagaaacagtaatcgacaattctgaaatcaaggctcttccgagtacaattactttcccattcaacagcagcaaaatcgagctttcacaggaagttagtatcttcaatattgctgaattcctgaaagcaaatccagaaatccgtgttcgtctgacaggttatgctgacaaacgtggctcagaacaagctaacagaattgtttctgaaagacgtgccaatgcagtaactgaagtgtttgtcaacaaatacggaatagcaaaagaccgtatcactacagagttcaaaggtaccagcactaagtttgaaaatgatgactggaaccgcgcagtagtggtagagctgatcaagtaataacaattatattaccttcaaaaaagcgcattgattgagaatatcaatgcgcttttattttaatgatcttttttcagctctaccgcacattcagcacaacagcctttcaagacataatttatacttcgtacagcaaatccctcgggtaaatcgaccacaggaacgtggatattctcaaggcaaaaagtcttatgacaatattcacaataaaaatgtgtatgtaaatcctttaccgcacaagtacattcactatcacaaaccgcatatttcaaagaccctgtaccatcatctacactatgtgccaaatgatgagagacaaacaaagtaatcgtacgaaatatggtcgatttatcaactgtatccagtttattttccaaatcaagaagtgaaacagcctgctccgtctccatcatgacctttaaaaccaacatccgtatggctgtaggttttatgcctctctgctccaatatcttcaaacacaaatcttccattatcatttaatcattttctgtatacgaacagcattcattattgcaatcaatgtaacaccaacatccgcaaagacagcttcccacaaagtagctataccgcttgcccctaaaatcagcaccaacaacttcacaccaaatgccaacaatacattttgccagataatccgacgcgtacaacgcccaaccttaatagctgttgccactttcgaaggctgatcggtctggatgactacatccgccgtttcaatggcggcatcgctacccagtcctcccatagcaatacccacatcacttagagcaagtaccggagcatcattcatcccatcaccaacaaaagcaatctgattgcccttctcctccttcaatctctcaatatgctccacctttccctccggcaggagatcaccataagcttgagttattcccaacttatttgcaaaaatggtaacaatactctgtttatcgcccgacaatatctgaatattcttaatatttaactctttaagtgccttgacagtatctgacgcatcgtcttttaacacatccgataagatgatacaacctatatatttatccccgacagcacatacaaccgttgtttctgttattgaaaacacagccttcggaaactcaatggaatatttcgataacaatctggtattacctaccagcaccctttttccatcaatctcagtcatcaacccataacctgcaatctcttctatattcttagtgacaatcagatcaatccctttatcttgagcataagctacaatagccctggctatcggatggttactgtttttctcaatggaagccactacacgcaataaatcttcttctgaagtcccgggaacaacccgacaagattctacttcgaaaactcctttagtcagagtacctgttttatcgaatacgactgtattcacacgagttatggcatccagataatttccacctttaaacagaatacccaatcgggatgctgccccaattcccccaaaataccctaatggaatactgataaccaatgcacacgggcaagaaatcaccagaaaaaccaatgctttatacagccaatcattaaaaacaaacccaaacaacggatttataaatgaataaatatatggaatcaacacaatcagaaatgcaaagccgataacaataggagtataaacacgtgcaaattttctaataaacaattctgcaggtgccttacgttcggaagcatcctctacaagttccagaatacgagccaatgcacttttatcaaaaggctttgtcactttcatccgaattactttgtctgtgacaatcatacctgcaagtacctcttctcccctactaatatcccggggcacactctctccagtaagagccgccgtattgaatgccgccacttcatccaacattactccatccaacggtacacgctcaccggcttttatctcaataatttcatttataagaaccgatctcggatccaccgtaacaatctcattacttctcacaaccacagccttttcaggtcgaacatccagcaaagcgctgatattacgcttagccttgtctatcgctttatcctgaaataattcaccaaccgaataaaataacataacggcaactccctccggatattcaccaatataaaaagcacctaacgttgcaaccgacatcaacgtaaactcactaaagaagtctttctgaagaatactctcccatgcttcttttatcacaggtaaacctacaggcagataagccagtatataccaaaccaaagatatcgtattatctctgaaaaaagcaacatccaactgattcattattgcacccgctatcaacattaacaatgaaagtattaccttccaatattcctttatgaagccattcgcttcctgacagctttctactcgcacatttgcattcatttcacatttacaatgtcccataatccaatctactattaggtttatgatgcaaaggtagtagttttcaagtgcaacaaagttgcaaaaattctatcgggaaaagaatcaaggatattcagagaccgaaagaaacatcttcttacattaagacaggagcaaggagttttaccaaaaaatatcctccgacaattagccataaatacagcaaagaagcaagtacaaatggcttggcaccagctttcttaaatttgtcgatactggtttccgcacctaatgcagtcattgccatagtcagcaagaaagtatccagattattgataaaagctattaaactttgtggcaatagatcaaaggaattaaaaccgataaccgctaaaaaaccgatagcaaaccacggaatagatatgtccttcatactacctccttgtccaccagctttcacggcagccctggataccataaaactggttatcaacaaaacaggtaccaacatcatcacacgaatcatcttcacgataatagcaacatccgaaacctccttccccatcgcatttcccgcaccaacagtgtgcgccacttcatgcaacgtagcaccggtaaatatccccatctcgttgggtgaaagcacaaaagttccatttctatataatataggatagataaacatggacaaagttccgaaaataactacagtagaaacagcaaccgccgttttatatggttttgtctgaatggtcgattcggcccctaaaatagccgctgcaccacaaattccactaccgatagaagtaagtaacgccactccacgatccattttaagcatacgaccgattaagatacctccaagaatcgttatggttactacaatagcatcaatcaatattgcgggcagccccaccgccaatacatcctgaaaagtcaacttaaacccatagaggataatgcctatccgtaaaattcgttttgaacagaactgtatacccggtacccacgtctcaggaaggttgtttcggagactgttagcatacaacatgcccaaaatgattccgacaatcatcggactgaaagagagtttctttatgaactccatgtcacctatataaaaggccgcacatgaaaacagggctatcaacaaaaccccgtgaagcatactgtttcttttctcgctcaacataaatgaatttatttatagtgtctttaattagtacactacaaaggaagcattttaaattgagagacaaacacttaatttttttatcccttataacctatggttattcacatccactgaaaaagacagcaagaacaaccggtatcttgaaacaacaaccacactattcaaatcaacatgtgattctccggtgcatccgccaatgataaaatcactgtaaaacaacttcctttacctttttcagagtgtacttttatacgtcccgacaaccgctcgataataactttagaaatggcaagaccaagaccgcttccctgttcaaactcgtcagttttatagaaacgctcaaaaatcatcataagttccttttcatcaattcccttaccactatcttccacatatatacgaacctccctatgcttcttgtctactttacaccccaaagcgatatatccattttgggtaaacttgttagcattattcaaaaagtttgaaataacctgagccaaacggagacgatctgtatgaacaggcacagaaacagtatcatccaattcgagacgaaactgtaaagaagaccggattaagggttggtacgtcttataaatctctttgacaatatctgtcatattccattccttcatgtcaaaatccaaacttccggaatccaggcgggaaatttccagtacatcattaatgagcttcaagagcaattcattattatgattgataatctcaagcatactcgccttttcatccggatcaatctcctcggagccctcacccaacaatacatttgtaaaccccacaatggcattgagtggagtacggatttcatgactcatattattaaggaaagattgtttcagttcagctttctcagccatttgtttcgccacaatcaactgatgctcacgttctaccgactcttgaatattctgcatgatccccgccagcatcatctctcctttaatatccttcagactgcggcatcgtaattcataccattgataacctttcttttcatcaaaacggaaacgtacccgttgtatttctacacccggagatttgcacaacgcttcataaaaagaacttaataactgcgagtcatcaggatgtacatactccaaaaaatcagttctcttaaacttccttttttctactcctgtcagacgcgcataattatcatcaaactcgatatcacttccctgcatattccaaagcgaaatctgtcctccatccgcagaaagagtcaaacgcttgtgtgcttcttccaatattttcaagtttttgcgttcaatcagcgaacgccgccgagtatgcagcaaactgacggaaataaaaatgaatgcaaagacaaataatacccccaataaataaaattcctcacgataatgatcataaataggataattaataatacgcacattcttgcccacgtttttaatatcataaccattataagtagaaaaaacgctccaatcaagtacatattcttttctcaaatcccttattttaggcatacctattttttctttattcatcaaccgggtagacagatcggcagcagcctgcacagaaatctctttggtggccatatagccgccaacaattttatttccttctccgaatccggcatgtacacaactaaatgaaggtatgcttaaggcattcactatcggaaacgataccatatcgaatttatcaagcagaaatgctttcttcccctgctcactttttgaattttccatcattacaagcaaagaagcacctttaatataccggaaggggcaaaggcttattgtcaactcattcttttttatccggttatttgctacggcaggcatcagattataaaactcaatcatttctctcatttctttatattcatactccatggagaatgctgatttatgtcccagaatctgtacatcttttctatcaaccacctgatttaataagtcaaaagatttatgaccgagaggcgtcaagtcaatgttataaacgatttccagaccaacatgtggctgcaaagaccttataaattccatattatgcttaaagtcgggggtatctcttagagcatatacttttctggactcatattttttcaaaaggtcttcatcaggaaaatgcacattacaagctaccaccggaacagaatagagcaaaggatgtcgagtcgataataaagaatgggtagcctgatctcccatcaccataataagatctatcggcttatttttcagtacaccaagataattaccgatgtgttccatctcgactgcctgaccgaaatgggtacaatcaagataaaatttatcaaatatagcttctacacccttcgacctaaattccttcttcagcagttcttcaaattgtccccggtcagcctctttttttgaacaagaatagataagagaaatatgtttttcgtttcgatggttggttacataccattgtttgaaattatacccacataaaaagccccccaacaaaagaatggaggcaaaaatatacttaaatttaggatttatgaattccataattaattctctatccaggcaaaagtaacataaatttaattaataaaacaatatctgagtagaaaatggcaattgtattccatcttttattcttatcagtatctagacttttcccaatcctatttcttagcttttttcttgtaaacccgatatctttttaatatctttatcccggatcattaacatatctatgattatcctgttccaatctactcaataacctttttaactaaccacaatgagcaatagaatagttagccgaagtttgatgggagccctctgtagcgcatgtttcacaacagcaagtgcacaagaacgacccaatatcattgtttttttagtcgacgacatgggattaatggacacctccgttccctttgttacggacgaaaatggaaatgcacagagacaaccgttaaacgattggtatcgtactcccaatatggagcgcctggcaaaccagggaatccgcttttctactttttatgcacaaagcgtgagttccccttccagagcatccatcatgaccgggcaaaatgcggcccgtcaccgcactacgaactggatcaatgcggaaagcaacaaccgcactccatacggaccattcgattggaattggaaagggctcactcatcaggatatgatctatccctatttattacaacaagccggatacaaaacgatccatgtgggtaaagcacacttcggatgtctgaaaagcgaaggagaaaaccctacgaatctgggctttgatgtcaacatagccggttcggcaatcggccatccgggtagttatcatggagaaaacgggtacggctggatcaagggtcaaagagcaagagccgtgcccgacttggaacaatatcacaaaactcacaccttcttaagtgatgcactcacattagaagctggtaaagagatagaaaaagccgttgcagaaaaaaagcctttctatctaaacatggcacactatgccgttcactctccattcgaaaccgatgaacgcttcatcagccactataccgatccaaacaaatctcaacaagcacgcgcttttgccaccctgatcgaaggtatggataaatcgctgggagacattctggataaactcgaagatatggggatagcggaaaatactctgatcatctttttgggagataatggtggtgatgcaccactcggggatgctgccgattatggttcatctgccccattcaagggaaaaaaaggatcggaatatgaggggggagtccgtgttcctttcattgtcagctgggcacatcccaacccaaacaataaattccaaaaggcatatcctatagcccggaatgccatacaaacccaaatgggaacggttatggatatatatccaaccgtactttctgttgcgggtgtcaaacctgctcccaaccatatcttagacggatccgatttaagaaaactgttaaagggaaagagagataaaaagcatcgtgatgatttcttaatgcatttcccacatgagcatcgcggcagctatttcacctcttatcgtaagggagactggaaatttatctattattataacccacagactccggaggcgcctacctataaactgtttaacctctcagaagatccttacgaaaaaaatgatctgtcaaaaacaaaccaacaaaaagcgaaagaactcttccgtctaatggttcaaaggctggaaaaagaacaagctctctatccggtagatgccgataaaaacgtattgagtccgatatttgttgccgaataatccccaagacagggatcttgtaacaatatttgcaacacgggttacacggattatcacagactgaaagcaaataaagcagtgcttgtcttgataatccgtgtaattcgtattgccttttcaggatttaaagtctttcactgctttcttcagcctttctaaatccagttctccagattgcctccaaagctgttctccctttctcattaaaataaatgtcggaaccgattcgatcgtatagaaattagccaaagcatcttcctgatcgatatcgatctgtactacctcgagagtcccttccataagtttcttgaattcttctacaacgggctgcatacgtttgcaatgaggacaccacgtagcataaaattctgccattacccaatcagcagttgctaatttttccctgttccgtttttgacgggcttcttttttctcttccatatcggtatgtttttaaataacttactgcactccgaaacaatgcccaaagagaaaagtttgtgatataacatttatttaagctatagcggcctaaagaatttagatctaagccatgggaaaatgtttttctttaatttgataagaaccggataactgtaagtataacttcggcatatcactccttgaaagttggagcacgaagttcccaaaaagccacagaagcagcagccgccacattaagtgaatctacactatgcgacatagggatgcgaaccacataatcggcttcggaaattgtctcgtacggcagtccgtctccttcggtacccattatgatagccaacttgggctcagtcttcaaaaccggatcatcgatagagatggaatcatcagtaagtgccatagcagccgtacgaaatcccaaatcgccaagcctgctgagagaaccatctatccaagtccatgatacaagaaatattgaccccatagataccctgaccgcacggcgattgagcggatcacaagagttccgcgtcagcaaaacagcatctatgccgagggcagcagccgaacgaaaaatagctccgatgttagtggtgtcaacaactccatctattaccacgatacgtttggcttcgcggcatacttcctccacacttcttaattcaggacgccgcatggcacaaagcactccgcgggtaagtgtatatccggtgagtaaagcaagtatatcacgcttgcctgtatagacaggaatatcaccacaacgctcaatgataacggcagcgtcaccgatgatatgtttttgctcacataaaatagccaaaggttcataaccggcgtctaaagcaacttgaataaccttggggctttctgctataaaaattccccggtcggaatcgatgcgattacgcaactgggcttcagtaagggtactgaatatctctactccgggatgagacaaggatgatatttctatgataggcattctctttgatttgattaactctatgatttttcctttttcaattgtaatatgtgcagaaagtgtcaatacaaacactcccctacctgcctcccgttatagctatcttgataactccttccagcttgttttcaaagatacgataagcttcctctatttcgttcaacggaaacctatgcgtaataagaggagtagtgtctatcctgccttgctcaatcagactgagaatctcagcacaatcgcaaccatctaccccacctgttttgaagatcaagttcttgccatacatatcgggcaaaggtaaaaactgaggtttgtcataaagggctacgatggtaacgatggcattggggcgggcacactcccacgccagacggaaagtttcttcggaacccgccacttccaacacgacatccgctccaccatgatcgctgttgcagagtacaaaatccctacagttttcaggttctgtcaccagcacgtcaggataatgttcacgaacaaaccggattctctcagcagaccgttcacaaacaataatgcgccgtggcttctttaacatcacacagagcaaagtacagattccggcagggccggcacctataatcaaaaccgtatcatcttcggatatctccgaaatgcgggtagcccagaaccccgtcgcaagcacatcacctacaaacagagcttgttcatcactgacattatcgggaatacgattcaatccctgctcggcatacggaaccctgacatattccgcctgtccgccatcaatacggcaacctaatgcccatcctccgtcgaggtcagtacagttgttcacatatccgtgccgacaaaagaaacattctccacaaaaggtttcgacattgactgtcactctatcaccgggtctgacggaaatgacgccggagcctacttcctccacaatgcccaccatctcgtggccgactgtaataccaggaactgcacgcggaacactgccatgtttaatatgaagatcactggtgcagatactgccaagtgttacacgtacgattgcatcccgggcatcttttatttgtggcctcaacttctccaaaagttcaaacttcccatgttcgacatatgtatatgcaagcattatatctcctcctgattaatcaatatatccatatatgcagcaaaaatagtgatttcatcggtaaaacatatactttaatatctgtttctgactcatggatagcatcacttcaccggatagagtatgttttctgtgtacccttccctggagcattgccacttcaatatcggcctgtttccccgtttctttctataattaagtatacttttacaagtggtatgccgtacatttttatcagaattacgccaacattgcatcgtgtctttttgttttctttaaagtatggagaacgggattaaaaaaatattaagagataaatacggactttttgaaaaagatatagaaatattgcttgaaaagttcacaaaattttctgtgcccaagagagagattatccttcaagaaaggcaaacagatcactatatctattttgttgagaaagggattgtaaaaagtacgattctaagagagggcagagaatttatcatattttttgcattagaaaatgatgtcccactcagttcacccaacctgacagagagcagacaatcactatatactttagaggcagtagatacttgtattttatggagaatctcccgtaaagacttagccacctcattcaaagactctcttaatttatccaattggggaagaatgattcttcaggaatggcttacttcatcttctttctatttttcatctatccactggatgagcaagaaagaacaatatcaatatctacttaaagaaatgcccaaactgatacaaagattatcaatgagagacctctccgcatggctggacataactccacaatccttaagtagaatcagggccgatatgcattaattaccttttggtaacttttcattcttccctgtaacctacctttgcgctcaaattttaattctgtatgatatgaaaagtttaaaaggtattatttatgcaatgatttcatcaggtacatttgggctcattccattatttacaattccattaatgggaaatatggaaatgaatgaatccaacattcttttttatcgatttctattttctacccttatgatgggagcagtatgtcttttgcacaaaagtactttaaaaataaatatgaaacatctgatctctatcatcggtttaggtgccttgtatgctcttacagcgctatttcttatttattcctaccattatataactagtggagtggctacaaccattcactttctctatccaatctgtgtcagcttcttaatggtagtattctttaaagaacaaaaatccaaatctctattcttagcagcctcactctcactaatcggtgttgcacttatgtgttggtcgggaggaggcagtatccgattgatgggtatcggactcgcagctcttacgatattaacctatgggatatatattgttgctctgaatcaattggatataggtaaattacctgctgaagtgcttacgttctatgtgcttttaggcggttgcgtaatctttttcatctacagtctatttacagcaggtatatcctccatccccagcacaaaagccggattttatattttggcattggcatttctatctaccgtcatctccgaccttacgttgattttagcggtaaaatatgccggttcgacaacaacagccatccttggttcaatggaacctttggtcgcagtggttgtaggcgtattggtattttcggaacatttcacattacaatcattaatcggtttattactgatactaatgtctgttatcattgtaatattagccgatcaacaaaaaaagtcgaagagaatcacagaacagaaaatcattaagccacattgaggaatagaactcacaattagtctcagacaattgtcttctaccaatatctttattaaaagcgtaatgaaaagtcattagaaggaaagagagggtatctgattagcatatctctgtcgccttccagcaccttcctgtattcagcgatacaatatacctatgggggacaaacgagaaaagtccgatcatgcgcacatgacgagggtcaggagaccgatccgcaagtagccgattctgataatcatgaatatcgtgaaaatcatcgtcacaataacggtcattctttctaagaatctgtctccccccttcataccccgattaaatgtttatttctcacaacctttttattttgatattttcaatcgctttctactttctttcttcttctcattctctctcactacttgcagcatttcattgatcaattcctctccgtcttgcgaataaaaatactttgtcttttccaccctctcaaccatatttccccatttatcatatttagaaagtacaatacgtttagacgtatccgaaagataaacgcatcttacctctttcccattcttataataagtgctatcaatatccgtgcaatcgtccagtacaatacgatcaacgtgaatatcaaaactatccgacttaaattccgtgaaactacctgtgaacttcatgtcagcgtcgaatataaattcctttttccctttttcgtcaacaatcgtcttgttaatagaactgacaataccattctttatacatttcctgataagggtgtctcctgccattttctctatatcgcacacgatgtcatagccctcgtctgtacggggaatcctttttttagcttcctcataagatagtccccgaaagaagtaagtggttctttttttccctatgtcaaaatagtattgcactctttttgttagattaccattcccgtcgtattcattcttttcctcatagtcgttgtcttcatgcagtacatagtcattgtttatatttctaacatacactaatttgagtttacttttatcgtaatatttctgcaataaataatcaatggtatccccttgggcatttaatgttaacacctcctccctttggggagcatatcccataatcttgatatttcccgacctctttgactttcttcttaccgtaaactcttcgttgttgatatacgtataataatacgtgcttttatcatcaattaaatcaattgtttcagaatcttcttcatacctatgatgagatgttctggtcaattgtacctctgacaaacgattattttcatcatacttgttttcataagtcgtcatggttattcgatcataagatttctcttccgaaaccgttttagttccacacgcatacagaacgaagaccaaaaacaataattttactttcattgtatatcttttttttagggtagggcagtgtcggcaaatcaatagattttcttattaataactccttcctgtaaatcccgtatcgttaatcgttgatattcttgttttcttctcatgaatgtcacatcagaatacgtattcaaacttcctgcgtattcttctattagcctaatcaaatctctatttatttgtattttcatttaaatcatcaacttcaacagatcccattagtgtcaaagcacaataaatttcatttttcacacattcattacataagggcaacctatataaatcggcagattgttgctttggttgagacttacctaaacaacttatgacaaacaacatgcaacaaacaattccattgatttcataatacaaaactagtgtatagtctttttgcccgtctgtacagcctgcaaacgttatttgattattgttatgttcttggctgcgatgacaggctaatcatgtttttcacttgtccaagcataaatataaaaagtcccgtaaaaccttgattttacgggacttacttttacttttccgtcatttatctttgacgctcagcggagagacaggttctatcacctatcatttcaaacaatatcacaaactcgtaat

SEQ ID NO: 4991 - DNA, 154223 bp, Unknown
  gut microbiota DNA sequence
cccaattgggatatagatgaagatatcaattcagacaatgcagtacatggtatcaagtgggctaatggaaacgtgtccaaaggcgtatacgaccctgctgaccaaggatggtcagaggattacggatatattcgtagatgtaatctggtattacagaaattagaagaaatggaattatctcagtcggataaggaaccaatagccggacaagcttacttcttcagaggttatatttattttgaattgattcgtaaattcggagacgtcccatacatcgaccagcctttaaaattaactgatgtagaggatattacccgtacatctaaagatgagatctacaccaaaataatggccgacttcgataaagctttcagctacttaccagaagaatggccggctacacagtggggacgcataaccaaaggtgccgctatggcgatgaaagcaagagcagctttgtattttggcaattgggaaacagcggctacagctgcaaaatctgttatggatctaaataaatatgatctgtacgacaaagaaaacactggaaagtaccaagaattattctgggaaaagacagacggttgtgaagaaattattcttgcagtacagtacaacgcacctgataaaacaaactacctaattggatgggaatgctttccgacaaaaggttggggtggtttgaatccgactcaaagtctggtagatgcattcgaagacagtgaaggagctcctatcagcaaatctaaaatttattcagaaaaaaatccattcgctaaccgtgaccctcgtttagaggttaacgttttacacgatggtgaggaaatgtatggcgtgacaattaaagtagctccactaaaatcaagtggaagcactggtattgcacagcatggtgatgctacagcaacaggatattatcaacagaaatggcttgacccaagtattgaccctcaatcagcaggttgggaaatgggaaaagattgggtaactatccgttatgcagaagttctgttaacctatgctgaggccaaaaatgaagtttcaccactggacgattctgcttttgaagctgttaatcaggtccgtcgccgcgtaggtatgccggaattacaaaagacagatgcaaccaagccgacttactgcgcgactcaagatgatcttcgtcagcgtatacgtaatgaatggcgcgttgagtttgctctcgaaggaggaaagcgtcaatgggatattcgccgttggggtattgctaaagatgtgttgaacgcaccattccttggcattaaatacaaaatggtagacgatgcggttaatgcagatcccaaagatggcggaaaggtatgtgttctgtacgagggtgacaatgttaaactggccggtagtagatatgaagaccataattatatctacccgattcctcaatctgaaattgatttaaatcccaagttaactcaaaatccgggatattaatatctaacacacaaattcacggactctctacatttaaatgttatagagtccgtgaattttcccatatttaagcagcacttatcatgagaaagtacttcccttacatactcttcatttttcttttctttatttattttctctgttatcagagtgtgttatcacatgtgatttattatcaggaacaacatcatctttttctatattccaaaactttttttctacaacatatccagtcacaaggatggatgagttatctgacagcatttattatacaattttttcacatacctactataggcagcattttacttgcaggaattttagccctcatatatttactgactaacgatgccataaaaaaaattacagggcacaatgatctgctactgctatcactaataccttctatatatttgttcctctattcaatgactgtcgaccattcattaacaccaatcatcgctaccttcctgggacttctgattatgggcctttttcatcaaatcacagttcgcccttggtcttttatccgaaaaatttattctccacttccccccaacaataagtaccgtcttttaatatacagcttactaatagcaatttacgcaggcacttcattttacttttttgtccaaacctataacatgagtgaacaccgaatgataatggcggaaaagagtgtaaaagaaaagaattgggaaaatgtactgacacaaaccgaaaaatatatcaactcgggaagaaccaaccagttgatctcctactttcacaacctggctctgtaccatacgggaaaattgccttatcaactattcgattacccacaaaaactgggagtcaaggcgctatacttcccatggcacagcgatagccgtgagagtgagtacggacattttatatatgaagacttagggtacatcaacgaagcacagcggtgggaattcgaagcaatggtggtatggggagaaacggcaccccatttgcttaacctggcacgatacaacatagtaaacaaaagacctgaagtggcacaacggttcatcaatctcctgaagcagtccctcttctataggggagatgccgaagaattggaaaaacaacttcatgcaggcagtgtaccgggactgcgcatggcacttgaaaacaataaggaacatcccgcacgatttgcaaacgtcatcaatataggaccggaattacagtatctgtgtgagcaggacacgacaaacagaatggcttttgaatacctgatgagtgacctactgctgagcaataacgtagtacgctttgtggataacctgaagttcatcaggcactttaaatatccggaaatgccacccgcataccaagaagcactctatatatacaaattgggagtggacggggaaacgtttttcaaatcaggattcaacgtcagcgaaaacaccgaaaagagattccaaaggtattacaacctgtataaaaacaggcaaatgcagaggctgaaagcggagtttggaaacacctactggtattacctgaacttcatcagtccgtatggagacaaaatcataaggaactaatatgtaaagacatgaaaacaatctatatccttcttatcacggttctcagctggagcctgcaggcatgcaccgcccaatgcggcaaaccggatgcctgcacggacagtattccccgtatatatcccgattatgcgggagtcacattcccgctgaatattgcacctcccaatttcaggatcggggagaacgcggatgccttccaaacggaaattggcacaggggagacggcggacatcctctacacaagcaagaatcccgaagtgattataccgacaaagaaatggaagaaacttctccaaaaagccgcgggaaaagaaatattcatccgcatcaccctgctgaggggagggaaatggacacgctatgcggatatcaaggataccatatcgaacgaaccgatagatgagtacctggtctaccggttgctgtacccgggatatgaactatggaacgaaatggggatttaccagagagacctgacaggttatgaagagactccgatagcggagaaccgaaatttcggcaaacagtgtatcaactgccatacgttcaatcaaaactctccggaaaccatgatggtgcatgtgcggggaaagtcgggagggacactgatatgcaaaaacggaaaagtggaaaaggtaaacaccaaaccggagggattcaagaacgggggaacctatgcggcctggcatccttcaggaagatacattgcattctcaatgaatgagatacagcagttcttccattcatcgggacagaaacccatagaggtatccgacctggctgccgacctgatagtttatgatactgaaaagaaaacattcctcactgactccctgatatgcggggagcggtatatggaaacattccccaactggacaccggacgggaaaacactgtatttctgccggggaaatgcttataaagagaagatgccgctggacagtatccgttatgacctgtgcaggataggattcgatccggaatccggtaaattcagtacgccggagtgtgtgtacagagcctccgaacagggaaaaagtatctctttcccaagggtttctcccgatggtaaatacctgatgttcaccctgtcggattatggaaacttctccatctggcatccggaaagcgaactttgtctgttgacaatggatacaggagaaatacggcttttaaatgaagtgaacagcaacgacgtggagagtttccatacatggtcatcatccggacgctggtttgttttcagcagcaaacggttggacgggctttgggctcgccctttctttgccagtttcgatccggaaaccggaaaagcggggaaacccttcctgatgccccaaaaagatccggacttttatgacacgttcactaaaacttataatctgccggaactgattaaacaacccgtaagaaacggaaatgaaatgatagaagctatacattaatttaacacactttattctaaaagagagggctttctattttgcaataagccctcttttttagaactttgcaacatcactcaataaacatttaattcagaaaaaacacatgaaaaacattttccttaccatgagcctgggtataggactgctttttccttgcaagctacatgcccaaagccagtacccatttcagaacacgacattatccactgaagaaagagtagacgatcttatcaaacgaatgactctggaagaaaaaatcgacctactttccggatacaatgatttctatctgcacccctgcgaacgattaggaataccggcattcaaactggccgacggtccgctgggcgttgcatcctggggattattcggacgcgccaccgcatttccatcagcactttcgctggctgcctcttggaataaaaatctggcagagaaaacaggagcaatgtatgctcaggaatggcgtgcaagaggtattcattttctcttagctcccggagttaacaactatcgggcttcaaaaggagcccgtaattttgaatattttggtgaagatccttatctggcatccgagatggtagtcccctttataaaagcagtgcaagacggaggagtcattgctaccatcaaacatttcgcagccaacgatcaagaatttgaccgatacaccgtcagtaccgaagtatccgaacgtgccttacaggaaatctatctgcctcccttcaaagctgctgtgcaaaaagcaggtgtcaaggctgtcatgacgggttataacctagtgaacggagtatattgcactgaaaacaaacatctgatcgatattttaaagaaagactggggcttcaaaggcatgttaatgtctgactgggcatgtacctattccgccgaaaatgccgcaaactacggtttggatcttgagatgggcagcaatgactggttcacccgtaaagaacttctcccacttgtcaaagaaggaaaggttacagaagaagtaatcaatgataaagtgcgccgcatctatggtgcctgtatttcaatgggatttttcgacaggcctcagcaagacaccgatattccgacttttaatcctcaagccaatcagatggctctgaataccgcttgtgaaggaatcatcctgttaaagaatgaacagaataccttaccgatccaccgccccaaagtgatagctgtgatcggaccgactgccaatccggctatcgtttcggatagaatatacaatgtaaacagcatcgtttacggtggtgggggaagttcaaaagttcatccctggtatgtagtttcagcgttagaaggtatccgtcaggagtttccggaagcaaccgtactttacacggaaggaatatccaaccaattcaaaccccgcttattccgtaacagtaaattccgtacgaaagaaggtaaacccggactggaagcgagctattatgcactatcttccgacacttctgccacactctcggataaaatgatccaacagcaagcagtagcggcaggaagaactgtaagtgttaatcaatcggccgaccggactgtagaaaccgataaagaagaaagcggattgattctccgccgcaccgaccgcacggtaaattatgaatggtggggatatcctttcaacgaaagtaaattgggaaatgattatcgggtgtgctgggaaggatatgtagatgtcgagaaaacagacagtatccgattctttgtcgacgcacaaggtgcctatcgtttatggatagacggaacattagcattggatgcctctcaatctcaatcattcgatgttcgcaataccgcaatttccgcaaaaaaaggggatgccaaacatattcggctggagttctgcaaccaacgcagtacaccggcagagatccggatgggatatgcttatcaaagtgatattgacttttctgaagcgaaacgactggctgccaaagccgatctggtggttttctgtgccggactggatggcagtatcgaactggaagggcgcgaccgtcctttcgacctgccttacggacaagatatgttaattcaggaactggtaaaagtaaatcctaagttgatagttgccatccatgcaggaggcggaataaacatgacccgatggatcgatcaggtgcctgcggtagtacacgccctctatccggggcaggaaggcggacatgctttagctcatattctttcgggtaaagtgaatccgtcagccaagctgccattcactatcgagaaaagatgggaagactcacctgcctgcggtcattacgatgaaactcgcaaggaaaagaaagtgtattatacagaaggaatattcaccggttaccgtggatacgatcaaaaaggtatcgaaccccttttcccttttggattcggtctttcgtataccacctttgactattcgggcctcaacatccgtatgacggataaaaaacagaagcaactcgtcgtttcattcactgtaaccaataccggacagcgagacggatatgaagtcgctcaactttatgtacgcgacatgcaatctaaagagccacgtcctttgaaagaattaaaaggtttcgacaaggtatatctgaaagcaggagaaagcaaacagatagaaatcggtttgagtgaagacgcattccagtatttcaacgccaaacaaaaccgatgggtatttgaaaaaggtgaatttgaaattctagtaggcgcctcctctaaagacatcagactggcagagaaaataaaaatgtagtatttatcagaaggaaggcgtgtcggaactcactacagaggaaacagagtagcacagagtgaatttcccgtcattggttatcaacactcttaatctgtgataatccgtggtgaatacaagtttcgacacatctttcttctttgctgtcttccttttatcctttctttacctttttatattccctgggagacattcccattatctggctgaacagccgtgagaaataataagcatcttcaatacccactctataacagacctgattcactttcatatcggtaaaatcgagaaactgacaggctttctgaatcttaatctgattaaaataactcaatggggcatatcctgtacgcttcaaaaacagattagagaaatatgaggatgaataccccgtgtaatcagccagctcggctaaagtcagcttcttgcccagattctccttcatataatgaatagctgcatttacaggatcttcttctcctgccggacgatgctctgaaaaagcctcccgatactctctgagatagcgcaatgatcccaaataatgatggaatacagagctggcatatgaaagattctccaagctataccccatcttcagtacccgaaagatctcctcaaacagttctgtccggtaactaatacgcgaatgcattcccggttttatatccgtgagcctacaggtacgatgcgtacaataaagcggagcaagtgttcctccgaagtgaatccagtaaattgtccatggttccttttcatcagcgccatacgcatgaggaagtcctgcaggaagtataaagtattggttaggcactaccgggtgtttctgcccatcgagactgaaccatcccctaccctccgtacaatagataaacacatactggtcaatcggagtttcccgctcccgaaagtgattataagcctttggataatagcctatatcggttatatagagtatagaagttgcaggatcagtcttcatacgttgcacaatggcaggaggcaataccaatgcctgttcgcccagaaagccgtctttttgttttgccatactaataagattcatcggttcacgccacaaatatagagataaaaaagaaatatagtccatctttttaatcggtttctctatttatttctattctcaaacccgcttactttgcaatatcaattaaaccatttaataacatgaaacagacacgaggctatttactacttatctgcatcgtctcagccatgggcggattactgttcggctatgattgggttgttatcggaggagctaaaatcttctatgaacctttctttggtattgaaaactctgcggctctacgtggctgggctatgagcagcgcactgataggctgtctggcaggagccttgctctcaggaatctggagcgacaaatacggacgcaaaaagatgcttgtcatagcctcattcctgtttgcactttcggcttggggtacgggagcagtcgatcatttttcctacttcatcttctatcgcattgtgggcggattgggcatcggcatcgcatccaacatttctcccgtatatattgcagaggtatctcctgcccatgtacgcggcaaattcgtatcgctcaaccagctcaccatcgtattaggtattttattggcacaattggccaactggcaaatcggggaatactacacacaaggttccgatatactcagcgaaacaagtgtgcaatgggcctggcgatggatgttctgggcagaactgatcccggcaggaattttcttcctgttatcgttcatcatccccgaaagtccccgttggctggctaccgtccatcaacaggagaaagcacaaaagacactgacacgcatcggaggagaaacgtatgcccgccaaaccctggaagaactgaaccaactcactcaatctcaaggtaaccggcaaaacaacgaatggaaatcggtcttccgcccggaaatgtgcaaagtactgatcattggaatcgttctggccatattccagcaatggtgcggcattaatgttatcttcaattatgcccacgagatcttttcatcagccggatatgccgtttccgatgtactgatgaacatcgtagtgaccgggatcactaatgtgatatttacgttcgtcgccatctatacggtagacaaatggggacgtcgtacactgatgctgatcggttcggcaggattagcgctgatttaccttatattgggaacctgctactttctggatgtaagcggtttacccatgcttctactggtggtacttgccatcgcttgctatgctatgtcacttgccccggtagtctgggtggtgttatccgaaatcttccccgtgaaaatacgaggtatggctatagccatctctactttcttcctttgggtggcttgtttcatactgacctataccttcccggtattgaatgaaagtataggtgccgaaggaactttctggctatacggtggtatctgcctggccggattcctgttcatacgccaaaacctgcccgaaacaaaagggaaaacactggaagaaatagaaaaagaattaatcaaataatacatagaacaagatgaaagaaagtgttaatgtatgggaggaagacatcctgctccctacctatggcatcggacgccctgagaaaaacccgatgttcctggagaaacgtgtctaccagggaagcagtggagtcgtatatccgtatccggtcatcgagaaaattgaagatacctgcgaagagaaaagttatcatgccgtatggctggagaacgaatacatcaaagtcatgatcctgcccgaactgggaggacgtattcaaatggcattcgacaaggtaaagcaacggcattttatctattacaatcacgtaataaagccggcactggtaggactcaccggtccctggatctccggaggcattgagttcaactggcctcaacatcaccgtcccagcaccttcttgccggtggactacagcatcgaacgatgtaaagacggaagtgtcgttgtatgggtaagcgaacgggaacggatgttcggtcaaaaaggaacagccggatttacactccgcccgggacgtgccgtactcgagatacaaggaaaagtttccaacccgactccgcttccacaaactttcctttggtgggccaatccggccgtagcggtcaatgactgctatcagtcagtattcccgtcggatgtcaacgctgtattcgatcatggaaaacgggacgtgtctcgttatcctattgctaccggaacctactataaaatggattattctgccggcgtggatatttccagatataaaaatattcccgtaccgacctcctacatggcaatccggtctaactataattttgtaggcgggtacgaaaatgatacacaggcaggtgtcctgcatgtggccaatcatcacatatctcccggaaaaaaacaatggacctggggaaacggggatttcggacaggcatgggaccgcaacctgactgatgctgacggtccgtacatagaactgatgaccggagtctatacggacaatcaaccggacttcagttggttgcaaccttatgaagagaagacttttacccaatacttcatgccctatcgggaattgggagttgtgaaaaatgcctcctccgaactcttaatgaatctggaaaccgaaggagaagaatgtcgtttgaagctgtttgccacctcggctcagcaaggattacgcatcgtagtccgtcaagcgggtgttatacgctttgaggaaatcggtagcctctcgcctgaacaagtattcgaccggctgatccccataaatgatcttcacgaagcggaagtcattatctacgataccaacggacgaaaaaagctaagttggaaggccgaaccggaaacaatcaaagcagttccggaagcagccaaacccgcccttgcaccggaagagatcaaaaccaacgaagaactctatctgaccggactgcatctggaacaatatcgtcatgccacttattgcccgaccgactattatcgggaagcactccgccgggacaatggagatgcacgttgcaacaacgccatgggactatggctgatacgcaaaggagagtttgcgcaggctgaaccatatcttcggaatgccattgcccgactcaccgaaaagaatcctaacccctatgatggagaagctttttataacctcggacttgctctaaaatttcagggaaaagatgatgaggcctacgattcgttctataaatcgtgttggaacgcggcatggcaagacgcaggctactattcgctggcccagatttccgtgtcccgcagcaattgggaagaagctctcgaagagattgaaaaatcccttctccacaactggcacaatctgcgcggacgccatctgaaagcaatcatactccgccatctcgaacaaaaagaggaggctcttgcctggatagaagattccctgaagacggatgcattcaacttcggttgcctgttcgaaaaatacctgatcacccgggatgaaacagtattgatccaacttcggaacctaatgaaacgtggagcacccgattacgaagcactggtactcgactatacttctgccggacgatttgaagaagcactggctgtagccgaacttgccattgcccaacctgccggtgaacagacactcttacattattacaagagttggtgcctgatccgtctaggaaaaacagccgaagcacaaatagccattgccactgccgaaaaagaaccggccgattattgtttccccaatgccctggaagcgatagaagcccttcagtgtgtagtcgactttgcaggaaaagcccccaaagcactttattacctgggaaatctatggtatgataaacgccggtatcccactgccatcgcagcctgggagcgctcttcgcgcgaagacgagacattccccaccgtatggcgtaatctgtcactggcttacttcaacaaaatgaaccgtccggacgaagctgtcgccttactggaaaaagcattccgcctggatcacacggatgcccgtgtactgatggaactggatcaattgtacaaacggctgaaccgtccgcacatagaaagactgtgctttctggaacagcacatagatatcgtaatgacccgtgacgacctgtatctggaatacgtcactttactgaaccaaaccgggcaatatcgggaagcaatccgacggatagaccaaagaaaattccatccgtgggaaggaggagaaggtaaagtacccgcacaatatcagctggcacgcctggaactggcaaaggagttgataaaccggaaaaaatatgatgacgcactcgccttaatagatgaatgctacatatacccgacccatctgggtgaagggaaactaccgggggcacaggaaaatgacttcaattattacaaagcatatatcctgcaacaacaagggagaccggaagaggctcacagcctgttcgtcaaagcctcttcgggaaacagccagccagccgctgccatgtattacaacgaccagaaaccggataaaatattctaccaaggactggcataccggaaattaggagaggaagaaaaggcacgcaaccggttcaaccaattaattacttatggagaagaacatctcttcgaccgattcaagatggattattttgccgtatctttacccgatcttttgatttgggaagacgatatggataaaaagaaccgcattcactgcaactacctgatggcactgggacatctgggactgggaaatagaacaaaagccgaacacttctttgatatagccgcctcaatggataacaatcatcaaggagtacaaattcaccggaaattaatgaataccattctatcatgaaacaatcttttcaaaacacccggtaccgggcgattctgctcctgaccggattgatgcttgccatgaccgctatggcgcaaaccctaacgaatgatgctcttgacttgtcgggcatgtggcgcttccaactggatccgatgggattcggtaaaactcccggttcggaactctatctggacaagctctctgaaaccattatgctccccggatcgacagaccagggaggtaaaggtattaaaaatacggcacgctacgtagaccgtttaagccgtaaattcgaatatcagggagccgcctggtaccaacgtgaagtagtgattccggaagattgggcagatcgggagatttacctgaagctggaacgttgccattgggaaaccaccgtctacgtggatgacaaagaggcaggaatgaaagagcacctgagcacaccgaacacgttcgtattgactccgctacttactccgggaatccacacactgaccatttgcgtaaacaatacacttaaatatccgatggatcaatggaaccatggaacaaccgaatatacgcagactaactggaacggaatagccggagacatcttactatatgccaaggagaaagcgcatatccgccagatcaatgtataccccgatgtcagctcgaaagcagtggaagtatctgtacaacccgctcccctaaagaccggacagacaggaaaactggagctatgcatccgcgagcaaggaggtaaaataatagtccgccaaacactgaatgcagacagtcttcaggtacatgcaggcatacgccaaacgctcccgatgggaaatagggtgaaactctgggatgaattcacaccttatttatacgagatagaagccagttggaacgtagacggaaagacagatactcaaacccgaactttcggcatgcggaacgtagagcagggtaaacatcatatccgcctgaacggaagagacattcacttacgtggagtactggattgtgcagtctttcccctgaccggttatccgtcgacaaatgtggatgactggaaacgcatcttcaccaccattaaagaatatggaatgaatcacgtacgctttcactcctggtgtccgccggaagccgctttcgaagccggtgacgaagtaggtatgtacctccaggccgaacttcccatgtggatcaaagatgtgggtaaatatccttaccggcgtgatttctttgaaaaagagatgtatgccattctcgatgcctatggcaatcacccctctttcatcctgatgtgtaacggcaacgaaaacgagggtgacttcgccgtattggaagatctggtaaaaaaggcacagaagtatgataaccgacggctctatagcgcctcgaccgcacgtactcatactccttcggatcagtactatgtgtcgcatgtcacctcgaaaggatggattaccgtatacgaaggaaagccatcgactgactgggaccgttgcaaagaatcggatatcgatgtaccggtgattgctcacgaaaccggacaacgctgtatgtatcccaactttgaggaaatcaagaaatataccggtgttgtagaagcacgcaatttcgaggtattccgcgaacggcttgccaaaaacggcatgttgcaccaagccaacgatttcttccgggcaaccggagcacatacggtgctgcaatataaagaggtaaacgaatcgctgctccgtactcgcaactccggtggttttcagttgttgggactggccgatttccccggacagggcagtgcctttgtaggcatcctcgacgctttctgggaaagcaaaggactggtaacacccgaaaagttcagagaatcgtgtgctccgaccgtactcctggcacgtttacccaaacgcactttcagaaacggggaaaaactaaaggcaaaaatggaaatttaccatttcggtaaagatgccctgaacagccggaaactgaactggacactgaccggtgaagacggaaccgtataccacaaaggaagcctgaagacaaaaagcatacaacctgctacggtagattcactcggaatcatcgaactccccttgaacgggatggacagtgcccgcaaactgaccttgaaggctgagctgggcggtatacacaatgaatgggatgtgtgggtatatccggaacaaccgaaaacggaacagcacaacttcgtctacacccgtacctggaacgacgaaaccaaacagtggctcaacgaaggcaagaatgtactgttaattcctgaaaagtgtaaaggacgcaaagcgcacttcgccagccatttctggaacccgattatgttcaactggaatccaatgatcgtaggtacactgatcgataacgagcatcccgcctttcgcgacttccccacccggaactatgccgactggcaatggtgggacatcctgaactattcgacagccctggaactcgacgaactgaaagaaatcaccccattgatacagagcatcgactcatacgagaccaaccaaaaactgggtatctcgttcgaagctaaggtaggaaaaggaaaactattcgtgctctgtgccgatccggaaaagaaaatcgatgaaagacctgcgatgcagcagttactaatgtctgtccgtaattatgtgtcatccgggcatttcaacccgacaaagagtttacccgtctacctgttggatgcacttttcgccccggcatccgaagagaaatccggagacaagggtagcaaggcgatcgaattgctattgaataaatagtcagatgaatcttaaaatacattaaaagaatagcagccgctctatggtgactgctattctcattgtatttataatagcacaagtctgaaagtagaacattataaactgatcttttttaatattatgaaaatcaaactactattactactctgttgtggtctgtggagcagttgcaactcgtatgactattgtccggtcactccttcagagagtgatcttgtattcaccggacttgcccggtcgtgggacgaagcaatgcccttgggaaatgctaccgtcggtgccttggtatggcaacgtgactccaccctacgcctgtcactggacagaaccgatttatgggatttacgtccggtagacagtctgtcgggagataacttccgcttctcctgggtaaaagaacatattcgccaaaagaactatctgcccgtacagaaaaagctggactggccttatgacatgaatcccgcgccatccaagattcccggagctgccatcgaatttccattggagcagatcggcactccgactcaggtaagactttacctgaacaatgccttatgtgaagcagactgggcagacggtacacaaatgcagactttcgttcatgctaccgaaccgatcggatggtttgtattccgtaacctgaaaaccccaatagaaccctccatcatcactcctgtatacaataaaacgaagccggatggcagcctcgatccggtttcgggacaagatctgcaccgattgggctatcaacaaggaaaagtggttcgtgaaggaaaccaaataacctaccatcaaaagggatacggagacttttcgtatgacgtaacagtctgttggaagcaagaaggcgaaaccttgtacggtacctggagcgtcacctcttccttatccggcgagcaagcttccgaaaaggcagaagccgccctgcaacgcggtctaaagcatgattatcaggcacacctggaatattgggacaagtactgggcacaatcatcgatcactctacccgattctgtactgcaaaaacagtatcagaacgaaatgtataaattcggttccactacccgcgaacactcataccccatctccctgcaggccgtatggacagccgataacggcaaacttccgccctggaagggagactatcatcacgatttaaatacccagctaagttactggccgacctatacaggcaatcacctgaccgaaggaatgggctatctgaacacgttgtggaaccaacgggatgcatacaaacgctacacccgccgctatttcggtaccgaagggatgaatataccgggggtttgcaccctgacaggagaacccatgggaggatggatacaatactccatgtcgcaaaccgtagctgcatggctggcacaacacttctatctgcaatggaaatattcggcagaccgcactttcctcaaagagcgtgcttatccattcatcaaggatgtggcaatctatctggagcaaatttcagaagttacccccgaaggagtacgtaaactggaattcagttcaagtcccgaaatattcgacaactccctgcaagcgtggttcagcgacatgaccaattatgacctggcaatgatgcacttcctctttaaggctgcttccgaactggcacacgaactgaacctggccgacgaagccggacactgggcatccctggaagcccaactaccggattacgacatagacgaagaaggttgcctcactttcgccaaaggatatccctacaaagaatcacaccgtcatttttcacatgccatggctatccatccgctgggactgatagactggagcgacggagaaaagtcacaacacatcatccgcgccaccttgaagagactcgatgaagtagggccggactactggacaggatattcatacagttggctcgccaatatgaaagcccgtgcattcgatggtgaaggtgccgcacaagccctgaaaacctttgcggaatgcttctgcctgaagaacaccttccatgccaacggtgaccagacccaaagcggcaaatcccgcttcacttaccgccccttcacgctcgaaggtaacttcgcttttgcagcaggcatacaagaaatgttgctgcaaagtcacacaggcgtaatacgcatcttcccggcaataccgaaagaatggaaagatgtatccttcgaaagcttacgcgccatgggtgcattcctggtatcggcccggatggaaggtggagaaatcaatcgggtacgcatctattcggagaaaggcggcatgttgaaaatagcccgtcccggtacattaaagccgaataagaactatactttatccggcacggatatcttgaacatagatactcaagccggtgaatggatcgagttgaacccttaatgcactccgacaaaaagtcaagagtgtatatataatgtcattttgtattttctacccggtatagcttctgctatatccgggtagttttctttgcggtgatcaaaaacgccttttccggcaatcaggcttttgcagaatatcacctttcccgtctgttcagatacacatccctaccctttccggcaaaagcgccacattcatcttcatcaaaaggtgtaaacggctacattctgacacttttccgacattaaccgacacacggctaaaaagtgaaaaagaggcggaataagagcaatgaattttatcttctgacctaatgtaactttagttctaatgaaatagagcgttggttctaaacgaatgccgcctcccttttaaagaaagaaaactttcgtttaatagatttcatgcatagatattggaaaaatttcaccttttacgtgtttttttgcagtttacatccgttttttatgcagtcctcttctcttccagagctattttaccccaattgcgagtcagcaaaaaacaggatatactatcagaatcacacagattgagtcattcttctttcagaaatcaaaagtagttttaaagccggtcatttattaaaataatataaattaaaactattataccgagggtagccccccaatggtgtgtatttataacgtatatcaaaaagtaaataataagctcgagcaacctaacaaaggaaaagaatctcataaaaggaacagaagaatgaaagacagagttgcaacccacaacacactacacgcagcattatataccccggacaaacattgcactaccgggttcaaacaacttgtaaaagatgacattatcaggcttttgcagaaagaaaagccagcctgttgcagagatggcaacttccgttaaagaacagaagcagccatctctgtagaccgacaggaattgtcctgttataataataaccggaatatctatgaattaaagatgtaacagagaacgttttaatcgcataaaagataagagttgtgaaaagtattcttatctttgcacgatagaaatgaaacactattattaacaacaattttattaactaatcaaatcttattcaaacatgtttaaacatctaaatgccctgtttatcggacttgctctgtttgcatgcacctctggtgccgtagcacaaaccatcaagcctatcgagactccagtgcctgtacgtcccgccggacaaaaagatgtagtcggactgactactcctaaactcgacgtggtacgtgtcggattcattggtttgggtatgcgtggtccgggtgcagtagaacgcttcactcacatccccggaacacagatcgtagccctttgtgaccttatccctgaacgcgtagccggcgcacagaaaatcctgacaaaagcaaacttaccggaagcagcttcttactccggaagtgaagacgcctggaaaaaactttgcgaacgtaaagatatcgacctcgtttatatcgcaacagactggaaacatcacgcacagatggctatctacgctatggaacatggcaaacacgttgccattgaagttccttcggcaatgacgctggatgaaatctgggctttgatcaacacttcagagaaaactcgcaaacactgtatgcagcttgaaaactgtgtatacgacttctttgaactgactaccctgaacatggctcaacagggtgtattcggtgaagtgctgcacacagaaggtgcttacatccacaaccttgaagacttctggccgtactattggaacaactggcgtatggattacaaccagaaccaccgtggcgatgtatacgctactcacggcatgggcccggcttgccagttgctcgacattcaccgtggtgacaaaatgaactacctcgtatctatggataccaaagctgtaaacggtccggcatacatcaaaaagacaaccggcaaagaagtgaaagacttccagaacggtgaccagacttctacattgatccgtacagaaaaaggtaagactatcctgattcagcacaacgtgatgactccgcgtccttacagccgtatgtatcaggtagtaggtgctgacggctatgcaagcaaatatcctatcgaagaatattgcatgcgtccgactcagatcgcttcaaacgatgtacctaaccacgaaaagctaaatgcacacggttctgtaccggctgacgttaaaaaagcgttgatggacaaatacaaacatccgatccacaaagaactggaagaaactgccaagaaagtaggcggacacggcggtatggactacatcatggactatcgtctggtttactgtctgcgcaacggtcttcctttggatatggacgtttatgaccttgcagaatggtgctgtatggccgacctgaccaagctttctatcgaaaacagctctgccccggtagctatccccgactttactcgtggagcatggaacaaggtgaaaggttacagacacgctttcgcaaaataataaaacttctttttgacacgggtttcacgagtcatccggcagttagttcgctacacaaagccggccggttcgtgaaatccgtgtccgattataagactacacaacccatccatgaagatgaaaatatcaaagccctctaaacagggagtaatcagagaaacgaaagactacttaatgattgccttgggaatgatcctttacggcatcggatggactctcttcctgcttcctaacgacatcaccaccggtggagtaccgggcattgcctctattgtttatttcgctaccggattcccggttcaatacacttactttgccatcaatgctgtcttgctgatggtatccctcaaagtgctgggatttcgattcagtcttaaaaccatattcggtgtattcactttaaccttcttcctgtccgttatccaaaagttaaccgcgaacgtaaccttgctacacgatcagccgttcatggcttgcgtgttgggtgcttctttctgtggcagcggcatcggtattgctttctcagccaacggaagtacgggaggaaccgatattatcgcggctgtcatcaacaaataccgcgacatcactttgggaagagtcatgctgatatgtgacctgatcattatctcttccagctatttcgtactgaaagactgggaaaaggtagtatatggatatgtgaccctttatgtttgcagcttcgtactggaccaggtagtgaacagtgcgcgccaatcggtacaattctttatcatctccaacaagtatgaagaaataggcaaacgcatcaacgaatatccgcaccggggagtaaccattatcaatgcaaccggattctataccggcaaagagcagaagatgatgttcgtcctggcaaaaaaacgggagtcaaccattatcttccggttgataaaagactgtgacccgactgcttttgtctcgcaaagcgcagtaatcggcgtatacggagaaggctttgatcatataaaagttaaataaattatcattctaataccctcaaaacatgaagttaagactatctgacaccttaaatagccttatgttgggtggcctcctgatggcatccacctttgcttcggccggcaacaaaccgacgaaaccttactggcaggacgtacaggtggtagccgtaaataaagaatacccccgttcttcatttatgacctacgaaaaccgcgcaaacgccctgaccggaaagtttgaaaaaagcaagtactaccaactcctgaacggcacctggaagttctattttgtagattcatacaagaacctgccggccaacatcaccgaccctgcaatcagtacagccgattgggcagacatcaaagtaccgggcaactgggaagtacaaggccacggagtagctatttataccaaccacggatatgaattccagccccgtaaccctcaacctcctactttgccggaagccaatccggtaggtgtttaccgcagggacatcgatattcccgccgactgggacggacgcgatatttacctccatctggccggtgccaaatcgggtgtatacgtatatatcaacggacaggaagtaggttacagcgaggactctaaaaacagtgcggagttcctgatcaataaattcgtgaagcccggcaaaaatgtccttactttaaagatttaccgctggagtaccggatcctatctggaatgccaggacttctggcgtatcagcggtatcgaacgcgatgtattcctttactcacaacccaaagccgcgctcaaagatttccgtgtaacatcgactctggacgatacatacaaagacggtatcttcaaactgggcgtagacctgagaaacaacggttcgacagccggcaatatgacgttggtatacgaactgctcgatgccaatggcaaagtagtggcaaccggagagaaagcaactaatgtagcggccggagagacccgtacggtgtctttcgaccagacacttccggatgtaaagacctggagttcggaagcccccaacctctacaagttggtgatgacagtaaaagaaaacggtaaagtgaacgaaatcattccgttcaacgtaggtttccgccgcatcgaaattaaaccgaccgagcaactggcacgcaacggaaagccctatgtatgcctcttcatcaacggacagccgctgaagctgaagggagtgaacattcacgaacataaccctgctaccggtcactatatgactgaagagttgatgcgcaaagatttcgaattgatgaaacaacacaacctgaatacggttcgcctgtgccattatccgcaagatcgccgtttctacgaattgtgcgacgaatacggactttatgtatacgatgaagcaaacatcgagagccatggcatgtactatgatcttgctaaaggcggtacgctgggaaacaatccggaatggttgaaagcgcacatggaccgcacaatcaacatgttcgaacgtaataagaactatccgagtctgactttctggtcgctgggtaacgaagccggcaacggttataacttctaccagacttacctttgggtcaagaatgccgataaagacatcatgaaccgtccggtcaactacgaacgtgcccaatgggaatggaactccgatatgtatgttccgcaatatccgggtgccgactggctggaggcaatgggcaaacgcggcagtgaccgcccgattgttccttctgaatattcacatgccatgggtaactcaaacggtaacctttgggatcaatggaaagcaatctataaatatccgaacctgcagggtggatacatttgggattgggtagaccagggcattgacgcagtagacgaaaacggacgccacttctggacatacggtggtgactatggggtaaacactccgaacgacggtaactttaactgtaacggtattgtaagtccggaccgtactccgcatccggctatggccgaagtgaagtatgttcaccagaacgtggctttcgaagcggtggatccggctaatggaaaattcctggtcaagaatcgtttctacttcacgaacctgcagaagtatatgatctcatataccattaaggccaatggcaaaacagtgaaaggcggcaaaatgtctgtcaatgtggaaccgcagggaagcaaagaaatcacgatcgcgacaagcggactgaaatcaaaacccggaactgagtattttatatacttcaacgtaacgactaccgaaccggaaccgttaatccccgttggacatgaaatagcatacgaacagttccgtctgcctatcgaaccgggcgaacgtactttcgctaccggtggtccggctctgaaagtatcggcagaaggcaatgaactgacagcgtcttcttcaaaagtaaacttcgtattcgataagaagaccggtctggtttcttcctataaggtaagtggaaccgaatactttaaagatggcttcggacttcagccgaacttctggcgtgcaccgaacgacaacgactatggcaatggtaaccccaaacgcctgcaagtatggaaacagtcgagcaaaaacttcaatgtagtggacgccaacatcgttatggacggcaaagatgccgtattgacagctaactatctgctggctgccggcaacctttacattgttacataccgcatctctccttcgggcgtagtaaaagccgatttcactttcacttctaccgatatggaagctgccaaaaccgaagcctcggaagcaaccctgatggctactttcactcccggcagcgatgcagcgcgcaaggctgcctccaaactggaagtaccccgtatcggtgtacgtttccgtctgcctgcagaaatgaaccaagtggaatatttcggacgcggaccggaagagaattatatagaccgcaatgcgggtacattgatcgacctgtataaaacgactgccgaccaaatgtacttcccatacgtacgtccgcaggaaaacggacaccataccgatacccgttggttgaccctgaataaaaaaggcggtaaaggactgactatttatgcagacaagactatcggtttcaatgcactgcgcaattcggtagaggactttgacggagaagaaaccgtatcccgcccctatcaatggctgaaccgtgatgccggcgaattggttcacgacgaaaacaaagccaaagatcaactgccgagaaagacacatatcaatgatatcacaccaaggaacttcgtagaagtatgtgtggacatgaagcaacagggcgtagccggttacaacagttggggtgcacgtccggaaccgggttacaatattccggcaaaccaggaatataaatggggattcacaatcgtaccaaaataaactaacttaaaaataaaaaccatgaaagatttacttagtatcgtatctaaattcaaagtacaaggcacagtaggcgaaatcaaaccacttggcgccggcctgattaacgacacttacaaagttaacactaccgaagcagacgctcccgattatgtgttgcaacgcatcaaccatgcaattttccagaatgtggaaatgcttcaggataacattgctgccgtgacgggacacatccgcaagaaactgacggaagccggagagacagacgttgatcgcaaagtcttgactttcctcccgacggaagaaggcaaaacatattggtttgacggtgacagctattggcgtgtaatggtattcatcccacgtgccaaaacttatgagactgtgaatcccgagtattcatattatgccggagcagctttcggtaacttccaggcaatgttggctgacattccggcaacattgggcgaaactattcctgacttccacaatatggagttccgcctgaaacaacttcgtgaggccgtagctgccaatgcagccggacgagtagccgaagtacagtattatctggatgaaatagaaaaacgtgcagatgaaatgtgtaaggccgaacgtctgtatcgcgaaggcaaactgcctaaacgcgtatgccactgtgatacgaaagtgaacaacatgatgttcgacgaagatggtaaagtgctctgcgtaatcgatctcgatacagtaatgccaagctttatcttctccgactatggagacttcctgcgcacaggagccaataccggagatgaagacgataagaatctggacaatgtcaatttcaatatggagatattcaaagcatttactaagggatatctggaaggagccggttcattccttactccgatcgaaatagagaacctgccttatgcagccgctctcttcccttacatgcaatgtgtacgcttcctggcagactatatcaacggcgatacttactataagatcaagtatcccgaacacaacctggtacgtaccaaagcacagttcaaactattgcaaagcgtagaagaacatacccccgaaatggaggcatacatcaaagagtgtctgggataaacttcccatccttccaggtgtaaactattgaacggcggagaaacggtttcagtttttccgccgtttctttttccatatattccggagttgtcaaaataaaagtcaatgtcccattctctttggacagttctgcttgcatcaaagtcatatccgcttgcaggcgggcatcgataaagtcatagtcggtagaatcggaagaggtgaagaaatcattcatctgaggaaccgacggcaaaaagtcggtggcgggaagctctttccagtccgtggtatagaaccggatatgactgtcgcatgccggagcgcaaactgtagaaacggcgcaaaccactttcgttgtatcattcaacggcaataacttcatctgccaattgcttgcgtcagacatttgcagagacacataatcgggacttaactccgtcatctccgacttgcccccgaaacggttggtcacctgagctttcattttactttcaataaaatcgatacaatctgcccggttcactgatgacagcaacggacaaagcgagtcaggtatattcacaaacaccgttttagcttcctgtgctccgacagaaaaggaagaagaaatacccagaataaataacaggagggtaagagtagactttttcatatctgataatcttgtttctttacgttcttatttagttcccaaatataggaatatcattcctattaacaccagaataaggtcaatcgctttgctttttaaattcttttcacggaacaccatagcaccgaaaaggaaagatacaatcacacttccccgtctaaccatcgagacaatcgaaatcatggaatcttcatagctcaatgcatagaagtaaacaaaatcggcagcacagagaaagatggaaataaaaatgatagcccaatcccaacggaacggagtagatgacttacgtttcggccaccaaagaagcgcaagaatgggacacataataaacatttggtacacattataccacgactgtacgaccatgggaggcagctgcttcatcaggtatttatcatacaagccacttaccgcacccgctacggctgccagaataatgaaaagtatccacttgttatgtttaaagtcaataccctccttcttccccgaacgactcagcataaaaaaagaaataatggccaacatcacgccgatccactgatagagattcaagcgctcgccaaataccagcatggctcccacaagcaccattacgggacgggtggcattaatcggtcctacaatagtaataggcagatgtttcatcccgaaatatccgagtatccacgaggaaagaacaataaatgatttaataataataaatttatgtacttcccatcccaccaccggtacatcgagcatagtgccccccagcactccgggcgcaaatgccgacaacaaaataaaaggaagaaatataagactggaaaaaagtgtattgaaaaacaacactggtaaaaccgcattgtctttcaacgctttctttttaaacacgtcataaaagcccagcaatgtcgctgagagaaaagcaagaagtaaccacataatagaattctttaaattagaagctataggcttattcgaatatctcctgaggatattctacattaaccaggaagagagcatttccgggagctgaagtaccggctttacagcgattctgctgctctattattttacggaagtcatcgactgacagtttgccacgccccacttccagaagcgtaccgacaatggcacgtaccatattacgcaaaaagcggtctgcctggatggtaaacacccaggtatattcatcctcctgagtccattcggcatgcataatcttacaaatattggtttttacatctgtatgcaacttactaaaactcgtaaagtccgaataatgaaataatgtcagggctgcctcattcatcttttgaaagtcgagcggattatgtatccgataacgatattgacgattgaacgggaattttacagtagtgatgtaatacttgtaagtacgtgctgttgcatcgaaccttgcatgagcatccggctttacccgacagaccttatagaccgaaatatcctgcggcaaaagacgattcagcttctcagctactttatccacatccaaaggttcaccttcgtagtcgaagtgggcaaccatcagagacgcatgtaccccggcatcggtccgtcccgccccaatcacttccgtatctttcctcaggaaggtggcaagtgccttcatcagacattcttgtatactgattccgttaggctgaatctgccatccatgataatgggtgccatcataggctaaataaataaaatatctttgcacgctcattccgttcacttggtttttgcgtgcaaagatactgctttaattgataattcagaatggatacttatcaataattaattgctttatttgacccacacattcattatctcaccgatatacatcgtatgcaaagatttatccttccatgcttctttcaactccggagtatcaaaggctccgggagtgatcggctgggataacatcttcttacattctatgatcatccatgcttcagagaaagctttactgcccgaaggagtagtaagaggagtcaatccggcgcctttcactttatcaacatcttcgccactatgactaccgcaatatttcaaagcatcccgataagtctctgtataaaagctgatagtatatgtatcattcttttccatcaattgataagtatagcgtgtaggataaataaaacagaatgaaaccggcttattatagagataccccagtccgccccagctggctgtcatcatgttgtatttatcttccgtaccggctgtaatcaacatccaatcttcagagagcattttaatgatattacccggaatcttatcagcaggaatatgtttataccctgccatagctccctgctccacagcctttggaagttcccgatcgaacacttccggagtaactttaggttcttttgccaatagaggaacctctgattttgctcctcccagcgttttcgtaacctgctccgtcaagtcatcaaacagatcgattgttttgatacggagttttccatatttggcaaccactttcgttttggctttattcaatccggtctcatccgtgatccaatcttccgcctccatctctgtatcatcaccatgaaaataagaaatgttgtacatctccatcttacaggaaccgtccaggcagttaaccaccagccggtatttaatagtagcacgatccaagaagaagctattcgttgccgaaagttgcaaatactcttcacccaaacatgcaatctgcccttttttctcatcaaaataggcgactctccccttctgtccttttgaaggcgtaaaacgcttctctgcccattttaacaaagcatcatagatctgccgtttcgacatatcggaagcttgaattacttctgtaaaaatgacttttccgttgactacgggcactgcaccggccagatacttactgttatcttcctgtgcacaaagaagcataggacaacaggccaaaaggaacaataaaattctcttcatacatttataagtgtttttacagaggcggatttcactctgaaatcttcacgtttgtcactcgttccaacaagaatcgatctttattccagtggaagggcttaaactctgtattggttttgatcacattgttacggaatatcaacccatctacagattttgcataaagaatcggtgcatcaaacgtatcgaattcattatcctcaatcacgatacctccatctttaccaccatggaagtacttttgctgatctttcagattaggtatttccggatagatagagattactgcattggtaaactggaacatattagtaagcgcattgataaaacgattgcgacgaatggtgacatcacggcaagcacctgtctcgaaccagccattgcaatcaccacacagcaatatagccgtaccggaagtatggtcaaacaaattgtcctccaccaccgtctttttaggagtactaaatagtgtaccgcgagcgcggttattacgaatcgtattaccggcaaatgacacttcaggagtccatgtcaggttttcaataccaaagccacttttttcgttaatagcaggatcgattgcctctttaaaagtaatgctgaactcacgggcaccttgtatctcacccttatcatacggacgaatggcagtaatctgattctgcttgccaatcaactccattgtttccgaacgtacaaactgaacatcgtcacccggacgtccccattcaaagccccaggattgatcgtgcatataacgtcctatcagcgtatgatcatccacacgcttgatgactttcaaatacgtaccatgtacattaatggcatcatccatcattccttcatacaaaccattctttgagacaatctttcccttacatccggaaaagtgtgtagcatctgcctgcgttgtaaaatagcgcggatcattattgcctttcaggcagactccaaaaccatcaagcgtaatatcttcgcaaagctgtgccagcaatcccataccttcggcataatgtactttgacatcaagcaaggaagtattcacatcatgtgacatgaaaatgcccggagtcggacgtccccatccacgcatagccaccactgtgccgagcaccagacgtgcatctttccactttggagagcaaatccggcggggagccacttcaaaagctcccttggtaggacaaccgatatcactggtattatataccacatgtttcgttttgccatcgaaagcaatgccccatgaatatctcatcacccagccttcacccagtccttcgaatacggaatccttactgatgcggtaatcgacccatggtgcaggttcgaacgtgattcctttttccggatcattctctaccacttgtacttgagcaatatggggttgttcaaaatcaatgctaaagtttttcaatacacaattctccgaacgaagcaaagaaaccggaatcattcttccataaaacacaaattcggaaccctgcccgtcaatagtcaggtttttcatatcctccaaagcaatccccacttttttaggattgtcctggtcgtgattggaaatataatattcacgcacggtagaacccgcttcatgaaaattgtaacgtccggcaggaaaacgaagtatcactttttccccatcacggcattcagctttaatcttcgctatggccttacgaaccacaggagacgcatttttcttactattagctttcaagccaaactgggaaatgtcataaacacgctcttgtgcacaaacatccgacacggataaagagagcaacagactcagagcaaagagtaggattgtcttcatagttttttctatttctgtttaataatttagggtacaaatatacattcattttccgattcttccatttttttattagtttacctttgcatataaaaaccaaaggtgtatatttggggactatatctataaaataaatcattaaacacctattgccatgagtagtaatattttcctcaccattgctattgtcacaacaggcatcttcgcagtacaatttatcttatctatattttttggtgatatcgatgcagatgctgacatcgacacagatatcagcagtgtggtttcttttaagggattaactcactttgggataggattcggttggtatatgtatctgcagcataacaccgagatacagacctacctgacgggtgtcgccatcggactcatatttgtatttgccgtttggttcttatataaaaaggcttaccaactacagcagaccacgcattcggaaagaacagaacaattggtaggaagagaatgcactatttatttcaaacagaacgaaaagaagtacactgtgctgatcagtcgtgacggagccatgagagaaatcgatgttgtcacggaatcgggtaaatcataccagacgggagataaagcaacaattactgcttataaagatggaactttatatattcaataattaataaactcaaaaaagagaactatgacccaggaaatgatgatcatggctgccatacttgtggcggtaatcttaattacatttatcggtattctttcacgctaccgcaaatgtaaaagtgacgaagtattagtagtatatggtaagacaggtggagataagaaatcggcaaagttatatcatggtggtgccgcctttgtatggcctattgtacaaggatatgaattcttgtcaatgaaacccatgcagatagactgcaagctgacaggagcactttcggctcaaaacatccgtgtagatgtacccactactatcacagtagctatcagcacagatcccgaagtaatgcaaaatgcggctgagcgtatgttgggattgaccatggacgataaacaaaacctgattacagatgtggtttacggacagatgcgtctggttattgccgacatgacaattgaagagttgaactccgaccgtgataaatttctttccaaagtgaaagacaacatcgatacagaactccgcaaattcggtttatacctgatgaatatcaacatcagcgatattcgtgatgctgccaactatattgtcaacttaggaaaagaggccgaaagtaaagcgcagaacgaagctcaggccaatattgaagaacaggaaaaactgggtgctatcaagattgccaaccagataaaagaacgcgaaaccaaagtggccgaaacccgtaaagaccaagacattgccattgcggaaaccaagaagttgcaagaaatctctgtagccaacgctgataaagaccgtatctctcaggttgctattgccaatgcggagaaggaatcacaggtagccaaagcggaagctgaaaaaaacatccggatagaacaggccaataccgaaaaagaaagccgcattgcggaactgaattccgacatggaaatcaaacaggcagaagcacaaaagaaagctgccatcggacgaaacgaagcacaaaaagagattgcgttgtctaactccgaactagctgtaacccaagctaatgccgataaacaagccggtgaggcatccgctaaatcggaagctgccgtgcaaaccgctaaggaaatagcacaaaaagaagtggaagaggcgaaagcacgtaaagtggaatcatctctgaaagcagaaaagatagttccggcagaggttgcccgccaagaggccatcttacaggcagaagccgtagctgagaaaatcactcgcgaagcggaagcacgtgccaaagcgacactggcacaagctgaagcagaagcaaaagccattcaattaaaacttgaagcggaggctgaaggtaagaaacgttcattgctggccgaggcagaaggttttgaagccatggttaaagcagccgaatcgaatccggcgattgctatccaatacaagatggtagatcagtggaaagaaatagcaggcgaacaggtaaaagccttcgaacatataaacttaggcaatatcactgtcttcgacggaggaaatgggggcacgagcaacttcctgaacacattggtgaaaactgttgcgccgagtttgggcgtgttagacaaattacctatcggagaaacagtgaaaaatatgattcatccggaagaaaagaaagaagaaacagagaaaaaatgaaccataaataagtagtaaacgatgaataggctgagcgcagcccgttcatcgttgattcgttcatcgttcaccgtttctcacacttagcgtgttgttatgtgaaaacatccctgtttcaattcgtactttacataacatttatccgccttacgaacatcccgcaagacttcggccaataccagctttaaagtatcagcactcacatcctgaagaggacgtccatcctcatcttccactttcttaaaccgtttccaactcacatcgaatgtagttccgtaaaaatggcaagaattcttcgatgcattcccatttcgacgacgcaagcgttttacgtcattctccgtccgaagtacggaagttacaataattttattcggattgagccccttagcagtcaatgaatccaagaaatttgcccctatcgtatcgagtaacgcactggcgcgcggcactaaataaggaatagaatgagtgagtgaatctaccacataaaagtcattatcgacaatatgaaccaactttccatccatctcttccgcttcttcgcgcgaagccaatggtgcaatgccccacgcatgtgctgcttttaactgtacatcattcagatctccaaacgaacgtttatagctcaccactcctttaatattgcgcggttcgttaagcttaagagacatgtctttctttttgcaacccgccagacaaggcaatataaagcataaaaagatagaaattacaaagtggctcctgcacttagattgattcataattagtcttttttataagttcccagagtgcaaatatactggaattgtctttttcaggaaagagcatcgcaaattaattcggcaagaatctgcaaagtatgagaacgattcattaaatttgcagtccatttcacagcatatgcgtgaacctttaaattgattcaatgatagaaaaactgatagttcttgaggatattgatccggtcatcttttacggcgtaaacaacgccaacatacaattaataaaagctttgtatccaaagctacgcattgttgcccgaggcaatgtcatcaaagtgctgggcgatgaggaagaaatgtgcgcttttgaggaaaatatcaccaagcttgaaaaatattgtgccgaatacaattcgctgaaagaagaagtcattatcgacatcattaaaggtaatgcaccacaagctgaaaaagcgggaaatgttattgtattcagcgtcacagggaaacccatcattccacgtagcgaaaaccaactgaaattagtggaggggtttgccaagaacgatatggtatttgctatcggaccggccggttcgggcaagacttatacagcgatcgctctggccgttcgtgcactgaagaacaaagaaatcaagaaaataattctcagtcgccccgcggtagaagccggtgaaaagttaggctttcttcccggagatatgaaagataaaatcgatccgtatctacaaccactctatgatgctttacaagacatgattccggcagccaagctgaaggaatatatggaactgaacatcattcagatcgctccgctcgcttttatgcgcggacgtacactcaatgacgcagtagtcatcctggacgaagcccaaaacaccactacccaacaaattaaaatgttcctcacccgtatgggaatgaatactaagatgatcattaccggtgacatgacccagatcgatcttccggcctcacaaacatcgggattggtacaggcattgcgtattctaaaaggagtgaaaggaatcagctttgtcgaactgaataaaaaagacattgtgcgacacaagcttgtagaacgtatcgtggacgcttacgaaaagttcgataaggaaaagaaagccgaacgggaaaaattaaacggtgaacggcttacaataagtaaagaacggcaaaacgttggtaatttgtaattcataattatataaaagtatgaaagcattaacaaaaacagatttcaactttccgggacaaaaaagtgtgtaccacggaaaagtgcgtgatgtgtacaacatcaatggcgaacaactcgtaatggtagctaccgaccgtatttcggcctttgatgtagtgttgcccgaaggtatcccttataaaggacaaatgctgaatcagattgcagcaaaattcttggatgcaaccacagacatctgtccgaactggaaactcgccactcccgacccaatggttacagtgggagtactctgcgaaggtttcccggtagaaatgatcgtacgtggctatctttgcggaagcgcatggcgtgcttacaaaaacggtgtacgcgaaatctgtggcgtaaaacttcctgaaggtatgaaagagaaccaaaagttccctgaaccgatcgtcactccgactacaaaagcagaaatgggattgcacgatgaagatatctccaaagaagaaatcctggctcagggactggctactccggaagaatatgccatcctcgaaaaatatacattagctttgttcaaacgtggtaccgaaatagcagcggaacgcggtttaatcttggtagacaccaaatatgaatttggaaagcacaacggtaccatctatctgatggacgaaatccatactccggactcaagccgttatttctacgccgaaggttatcaggaacgttttgaaaaaggcgaagcacagaaacaactttccaaagaatttgtacgtgaatggttgatggaaaacggtttccaaggcaaagaaggacagaaagttcctgaaatgactcctgctattgtggaaagcatcagcgagcgttatatcgagctgtttgaaaacatcaccggcgaaaaattcgtgaaagaggataccagcaacattgctgaacgtatcgaaaagaacgtaatggcattccttgcaaaataggaaacctgaatcagaaacgaattaagattcactacagagtatacggagtgtgcggaacgtgcagactgttacgatccataaaactctgtaaactccgtagtgaataaaatcgaataaaagaatgaactacccacaagaaaagatcaaaccttatagcaacgatgggaaaaagagcgaacaggtagaacaaatgttcgacaacattgcccctgcatacgaccagttgaatcatactctatcgttagggatcgaccggagctggcggcgaaaggcaatcaattggctcaaacctttccgtccgcaacaaataatggatgtagcaaccggcaccggtgattttgctatcttggcatgccatgaattgcaacccgaacaactgatcggaacagacatttctgaaggaatgatgaatgtgggacgtgaaaaggtaaaaaaggaaggtctttccgaaaaaatatcttttgcaagggaagactgtacctctctctcgtttgccgacaaccgtttcgacgctatcaccgtcgcttttggtatccgtaattttgaagatttggataaaggactttctgaaatgtaccgtgtcctcaaaacaggcggacatttagtcattctcgaactgacaactccggatcgttttccgatgaagcaaatgtttaccatttattctaagatagttatcccgactctcggcaaattattatcaaaagacaacagtgcttacagctatctaccccaaacgatcaaagcttttccccaaggagaagttatgaaaaatgttatttcacgggtgggtttcagccaagttcagttcaggcggctgacatttggtatctgtacactttatacggctacgaaataaatattaatttaacatcttccccctttatgcaaaagtacggtttaattggctatccactgaaacattcgttttctatcggctttttcaatgaaaaattcaaatctgaaggcatagatgccgaatatgtaaacttcgaaattcctgaaatcaatgattttatggaggtgatcgaagagaaccccaatctgtgcggactaaatgtgacaatcccttataaagagcaggtaatccccttccttgatgaattggataaagacactgcaaaaatcggtgcggtcaatgttattaaaataattcgtacccctaaaagaaaaataaagctggtgggatataattctgatattataggattcagccagtccattcagcccttgttgcaaccttatcataaaaaagccttaatcctgggtaccggcggttcgtcaaaagcgatttatcatggcctgaagaatctgggtatcgacagtgttttcgtatcacgcaccaagaaagaaggtatgctgacttacgaagaattgacaccggaagttatggcagagcatacggtgattgtaaactgtaccccggtaggtatgtatccgaaagtagacttctgtcctgccataccttatgagttgctaaccccaaaccatttactctacgatttgttatataatcctaacattactcttttcatgaagaaaggagaagagcatggggcagtaaccaaaaatgggcttgaaatgctactattacaagcgtttgccgcatgggaaatatggaataagtaaatgaaaaagggaattaagataggcgtcataacattattattgctgcttaccggatgtacgataggcggaagttttttcatgctcaattattcgcttcgtccggaagcgaagatacgtgccaaaaatgctgactcctatcctttcatgtacaagaattatccttttctgcgtccctgggtggatagtctcaatcaggctcatgcacttcgggacacttttgttttaaatccggaaggtatccggctacatgcttattacattgcggctccgcaaccaaccaaaaagacggcagtcattgtacatggttatacagacaatgccattcgcatgtttatgataggttacctgtataaccatgatttgcaatacaatgtactattgcccgaccttcaacatcagggggagagtggtggtcccgccatccagatgggctggaaagaccgcctggacgtaatgcaatggatgcacatcgccaaccagatttacggggacagtacccaaatggtagtacacggtatttcaatgggaggagctaccaccatgatggtttcgggaaaggcacaaccttatttcgtaaaatgtttcgttgaggactgtggttacaccagtgtatgggatgaattttcacatgaactgaaatcgagttttcacctcccgtcattcccactgatgaatacaaccagctggctatgccagaaaaaatacggatggaattttgaagaagcctcctctttgaatcaagtaaaaaaaagtcatctaccgatgtttttcattcacggtgacaaagacacatacgtgcctacatggatggtctatcctctttatgaagccaaatcggctccaaagcaactctggattgtaccgggagctgcacatgccgtatcttataaagagaacaaggaagaatacacccggaaagtcaaagaatttacagaccgctacattcactgatatgaaacagatactcacatacctgctctttatatggatactcctcccattaaaagcagaagaaaaaatatataccgtagacaacatccctaaagtgcacttgcagaacaagatgcagtatgtttgtaatcctgccggcatcttgtcacagcaagcttgtgacgaaatagatgcaatgctatatgcactggaacagcagacggggattgaaacagttgttgccatagtgccatcgatcggagataaagattgctttgaattctcccatcagctactcaatcaatggggagtaggcaaaaaaggtaaagataacggactggttatcttattggttaccgatcagcgctgtatccagttttataccggatacggattggaaggcattctgcctgatgccatatgcaaacgtatacaaatgcaagagatgatcccctatctcaagaaaggagagtggaaccaaggaatgctggcaggagtaaaagctgtatgccagcgcttggacggctcgatggtaaacgatgatgaaggtcgtggagaagaagggatatctgtctccatgcttctcgttgtcatcttaggttttattacgatagcgggagtggtcggcatactggcagtacgtgcaagtacccgttgccctaaatgtggtaaacatcaactccagcgcagtagtacgaaattgatatcgaaccgtaatggagtaaagaccgaggacattatatatacctgccgcaattgcggacatactgtagtccgacgccaacaatcgtatgacgacaattaccggggacgcggaggaggaggtcctttcatcggaggattcggaggaggaagttttggatccggtggtggaggcggtttcagcggtggaagcttcggaggcggttccggtggcggtggaggtgccggctcacgtttctaaaaaatcaatccataaaatatgcgaatccggaattaaagtttttgctccctctgatttgcatgagtcattaatcagtaatacaaaaagaaacaatatgaaaaagtcagttattatccttattgccgtagtggcagttatcattatctgggctatcagtgcctataacggactggtatccatggacgagaatgtaagtagccagtgggctaacgtagagacacaatatcagcgccgtgcagatctgatccccaatctggtcaacacggttaaaggatatgcttcgcacgaaaaagagactctcgaaggagttgtagaggctcgtagtaaagctacccagatcaaagtagatgccaacgatctcactccggagaagttagccgaatatcagaaagcacagggagccgtcacatccgcattgggcaagctgcttgccattaccgaaaattatccggacctgaaagctaatcaaaacttccttgagttacaagcacaactggaaggtacagaaaaccggatcaacgttgcccgcaaaaactttaacgatgctgcacaagcatacaatacatctatccgccgtttccccaaaagcatctttgcttctgtattcggcttcgagaaacgtacctatttcgaagccgccgaaggaacggaaaaagcgccggaagtaaaattctgatcggtcacacacattttttctcacaggcaatgattgttaatgcacgatcttaccccaaaaaggagattgtcttcaaatagaaaaacgagacagcattacttattatttgcaagttccgatataaaaatccccctgctttggccttagtcgatcacgatacaaggcaagagtcaggggatttttacattcccacattctccatatttctcttaaaacccatttcaggcccagtcattttcgtgacatacaattttgatagaaaagtggcatccactcaggatattaattacaaaacaaaatatttttttgtctatattcctaaagcagcggtagaaaatctatttcaggcggcaactaaagtccatctttaaccgtcaaaacaaagaatcgtcgaaagagcttcctttccccacaaacaattcagaaacggtacacaaaattcttttaaacttttcatttcaaacttcaaattaaagaatgtaccctctcccccatcatattaccggatcgttatatcctccaatttgttggctataaggaaaaaaagctgtacttttgccgttgtatacaaaatccaaataactcatgagtaatcaacgatacatgatgcgaggcgtcagcgcatcaaaagaagatgtgcacaatgccatcaagaacatcgacaaaggaattttcccacaagcattctgtaaaataatccctgatattttgggtggggaccccgaatattgtaatatcatgcatgctgatggtgcaggaaccaaatcgagcctggcctatatgtattggaaagaaacaggagatctctccgtttggaagggtattgcacaagatgcactgatcatgaacatagacgacctgctttgtgtgggtgccgttgacaatattcttgtatcctctactatcggacgtaacaagttgcttatccccggagaagtaatttccgccatcattaacggaacagacgaattgctggccgaacttcgtgaaatgggagtaggcgtatatgccactggaggtgaaacagccgatgtaggtgatctcgtccgcactattatcgtagacagtacagtgacatgccgcatgaaacgtgcagatgttatcaacaatgccaatatccgtccgggagatgtcattgtgggacttgcctctcatggacaggccacttatgaaaaagaatataatggcggtatgggcagcaatggactgacttccgcccgtcatgatgtattcgccaagtatctggctgagaaatatcccgaaagctatgacgccgcagtaccagaggaactggtttattcgggcggactaaaactgacagatacagtagaaggatctccgatcgatgccggaaaactcgtactctctcctacccgcacctacgcaccggtagtgaaaaaattgcttgatgcactgcgtcccgagattcacggaatggtgcactgttcaggtggggcacaaacgaaagtattgcactttgtaggcgacgtacgtgtagtcaaagataaccttttccctgtacctccattgttcagaaccattcaggaacaaagcggtaccgattgggctgaaatgtataaggtattcaacatgggacaccgcctcgaagtatatctctctccggaacatgcagccgaagtgatcgccatcagtgagtccttcggtatcccggcacaaattgtgggacgtattgaagagagtgataaaaaagaactgattatcaaaagtgaattcggtgaattcagatattaatgtataggaaagaatcgatctgtaaaatcacaaatcccagagaaatagaagaaaaagaaatagatggcagacaacaatagtatattagaaaagctcgacggccttgtagcccgtttcgaagaggtgtctacccttattactgacccggcagtgattgccgaccagaaacgatacgtaaaactgaccaaagaatacaaggagctggacgacttgatgaaagcccgtaaagaatacatgcaactactggctaacatcgaagaagctaaagatattctctcaaacgaatcggatgctgatatgagagaaatggcaaaagaggaaatggacaacagccaggagcgtctccctgtattggaagaggaaatcaaattattactggtaccggccgaccctcaggatggtaagaatgccattcttgaaatacgtggcggtacaggtggtgatgaagctgcgatcttcgcaggcgaccttttccggatgtacgccaaattctgtgaaacgaaaggttggaaaatggaagtatccagtgccaatgaaggcgctgccggcggatataaggagatcatttgcagcgttacaggcgataatgtatacggtacactaaaatacgaatcgggagtacaccgtgttcaacgagtacctgcaacagagacccagggacgtgtacacacttcggcagcctcggtagccgtactacccgaagccgaagagttcgatgtagtgatcaacgaaggtgaaatcaaatgggatactttccgttccggaggtgcaggtggacagaacgtcaacaaggttgaatcaggtgtccgtttgcgctacatttggaagaatccgaatacaggagtagcagaagagatcttaattgaatgtaccgaaacccgcgaccaaccgaaaaacaaagagcgcgccctggcacgcctccgtacgtttatctatgacaaggaacatcagaagtatatcgacgatattgcttcaaagcgtaaaacaatggtttcgacaggtgaccgttcggctaaaatccgcacttataattatccgcagggacgcatcaccgaccaccgcatcaactataccatttataacctggctgcctttatggacggcgatattcaggaatgtatcgataaactgactgtggccgaaaatgcggagcgcttgaaagagagtgaattgtaacggacggttacttcaattgtaaatcgtaaatttgtaaattaagtaaagatgaacaagcaatcattatttgaaaacatcaaacgcaaaaaatcatttctttgcgtaggacttgacacagatatcaagaagatacccgatcacctgttggatgattcggatcccatcttcgctttcaataaagcaattgtcgatgcaacggctgactattgcatcgcttataaacccaatctggccttctacgaaagtatgggtgtaaaaggatggatcgcttttgaaaagaccgtgaactacatcaaggagaattatcccgatcagtttatcatcgccgatgccaaacgtggtgacataggcaatacctcagcaatgtatgcccgtactttcttcgaggaactggacatcgactctgtcactgtagctccttatatgggagaagacagcgttactccattcctgtcttatgaaggcaagtgggtaatcttactggcactgacttcaaataaaggttctcatgacttccagctgacagaagatgccaacggcgaacgtctgttcgaaaaagtgctaaaaaaatcacaggaatgggctaacgacgaacaaatgatgtatgtagtaggtgccactcagggacgtgctttcgaagatattcgtaaaattgtccccaatcacttcctcttggtcccgggtatcggtgctcagggaggttctctcgaagaagtatgcaaatatggtatgaacagcacctgtggacttattgtgaattcctctcgcggaattatttatgtagataaaacagagaattttgccgctgccgcccgtgctgctgccaaagaagtgcaagagcaaatggcagaacagctgaaagctattttataatgcctcacgaacggaagattatcaatgatccggtattcgggtttatcaacataccaaaggggttgctgtacgacatcgtacggcatccccttttgcagcgcttaaaccgcatcaagcaagtaggactttcgtctgttgtctatcccggtgcacagcatacccgctttcaacactctctgggtgccttctacctgatgagcgaggccatcacacaactggcttccaaaggtaactttatattcgacagtgaagccgaagccgtacaggcagccatcctgttgcacgacatcggtcacggtcctttctcgcatgtacttgaagataccattgtcaaaggagtatctcacgaagaaatctctttgatgctgatggagcggatgaacagggagatgaacggacagctgagtttggctatccagatattcaaagatgaatatcccaaacgtttcttacatcagttagtaagcggacaactggacatggaccgtttagattacctgcgtcgtgatagcttctacaccggagtctcggaaggaaacatcggttcggcccgtatcatcaaaatgcttgatgtggcagacgatcatctggtagtggaatccaaaggaatctattccatagaaaatttcctgactgcaaggcgattgatgtattggcaggtttatctgcacaaaacatcggtagcttatgaacgaatgttgatcagtgccctgttacgtgccaaagaactcgcttcgaaaggagtcgaattatttgcttcaccggcattgaaattttttctgtataatcacatcgatccggaagtgttttacaataacccggactgtctggagaactttattcaattggacgataatgacatctggacagctttaaaggtatggagtacccacacggataaggttttatctacattaagcctgggtatgattaatcgcaacatcttcaaggtggagatatgctccgaacctattagtgaagaacgaaaaaaagaattgactttactgatcagccgacaattaggcattactctttccgaagcggactattttgtctctacccccagtatcgaaaagaacatgtatgattcggctgatgacagcattgatattatttataaggacggaacaataaaaaatattgcagaagcatcggacatgctaaacatttcattgctctctaaaaaggtaaagaaatactatatctgctacttgcgttgggatagataagtataaaatattcatcaaagagtaaggatatataaaaaaaaagtccgttatttgcgtactaattaaattttaaagtaagattatggagttctcggctaagcaaattgcagcatttatccaaggggaaattataggtgacgaaaacgctactgtacatacattcgcaaagatagaagaaggaataccaggcgctatctctttcctttccaatccgaaatatacaccttatatatatgagactaaagctagcattgtgttggtgaacaaagattttactcccgaacaagaagtaaaagcaacgttaatcaaagtagacaatgcttacgagagccttgccaagttgctcaatctgtatgaaatgagcaaacccaaaagaaccggtattgacgaacgtgcctatgtagcggaaaccgctaaaataggaaaagacgtatatatagctcctttcgcttgcatcggtgatcatgcggaagtaggagacaacacagtgattcatccgcatgccactgtgggaggtggtgccaagataggcagcaattgtatcttgtacgccaactcgactgtataccatgattgccgggtaggtaataactgtattctgcatgcgggatgcgtgatcggagcagacggtttcggttttgcccctaccccacaaggatacgaaaaaattccccaaatcggtattgttatcctggaagacaatgtagaagtcggcgccaatacttgcatcgaccgtgcaaccatgggagcaaccgttattcatagcggagtaaagttggacaatctggtccagatagcccacaacgatgaaataggttcgcataccgtcatggctgcccaagtgggcatcgcaggttctaccaaggtaggcgaatggtgtatgttcggcggacaagtaggcattgccggacatctcaaaataggcaaccaagtgaatctgggagcccaatcgggtgttcccggaaatataaaatccggtagccaacttatcggaactccccctatggagctaaaacaatttttcaaagcatccattgtacaaaaaagccttccggagatgcagattgagttacgcaatctccgcaaagaaatagaagaattaaaacaacaattaaataagtaaccaatgctgaaacaaaaaactctgaaagagagcttttcactgagaggaaaaggtcttcacactggacttgacctgactgttacgtttaaccccgccccggataaccatggctacaaaatacagcgtacggatctggaagggcaacccattatcgatgccgtagccgacaatgtaggtgaaacgacaagagggaccgtgctgtcaaaaaatggagtaaaagtaagcacagttgaacatggaatggcagctctatatgccttgggcatcgataactgtctgatccaagtcaacggaccggaatttccgattctggacggaagtgcacaatattatgtacaagaaatagagaaagtaggaatcgaagaacaaaatgccgttaaagatttctatatcatcaaatcaaaaatagaattccgtgacgaggagacaggatcgtctatcatcgtacttcctgatgagaacttcagcctgaacgtattggtatcttacgattcaaccatcatccccaaccagtttgccacactggaggatatgaagaagttcaaagatgaaattgcccccagccgtacctttgtatttgtccgtgaaatcgagccactgttgtcggccggactcatcaagggtggcgatctggacaatgccatcgttatctacgaacgtgaaatgtcccaggaaaactatgacaagctggccgatgtcatgagagtccctcacatggatgccaagctgttgggatacattaaccacaaacctctggtatggcccaacgaatgtgcccgccataaattgttggatgtcatcggcgatcttgctctgatcggtaaacccattaaaggaagaatcattgctacgcgtcccggacacaccatcaataataaattcgcacgtcagatgcgcaaagaaattcgcctgcacgagatacaggcgcctacctatgattgcaaccgtgctccgattatggatgtgaaccgcatccgtgaactactcccccaccgttatccattccaattggtagataaggtgatcgaaattggtgccaactacattgttggtgtaaaaaacgtaacctccaacgaacccttctttcagggacacttccctcaggaacctgtgatgccaggtgtactgcaaattgaagcaatggctcaaatcggcggattactcgttctgaattcagtagatgagccggagcgttattctacttatttcatgaaaatcgatggtgtgaagttccgtcagaaggtagttccgggcgataccctgatattccgtgttgagttattggctcctatccgccggggcatttcaaccatgaaaggctatgctttcgttggtgaaaaagtagtctgtgaatgcgaattcatggctcaaatagtaaaaaacaaataatttattaagcatgataagtcccttagcgtatattcatcccgaagcaaaaatcggtgaaaacgtagagatagctccttttgtgtacattgatagaaatgtagtcatcggagataacaataaaattatggctaatgccaacatcctgtacggttcacgtatcggtaacggaaatacaatctttccgggagccgttatcggagcaatcccacaagatttgaaattcaaaggtgaagaaagtacagccgaaataggtgacaataacctgattcgtgaaaacgtgaccatcaaccgaggtacagcagctaaaggcagaaccattgtaggtaacaacaacctattgatggaaggcgtccatgtggcccacgatgcattgatcggcaacggttgtatcgttggtaactccaccaaaatggccggagaaatcatcatcgatgacaatgccatcatcagtgccaatgtgttaatgcaccaattttgccgggtaggcggatacgtcatgattcagggaggatgccgtttcagtaaagatattcctccgtatatcatagccggacgcgaacctatcgcttacagtggaatcaacatcatcggactccgtcgtcgtggtttttcgaacgagattatagagaatatccacaatgcctaccgcatcatttatcaaagcggactcaacacttcggatgctctcacaaaggttgaagcagaagtgccggccagccctgaaatagaatacatcgttgattttattcgcaactcggaacggggaattatcaggtaaataaatagaaatcaataagaagaggaggatgttttccaagcatcctccttttttgtggaataaacccagccatcttatttgcaatctttcggttttttattacttttacgccatcaataaaacagtaacaactatgatatacagatttaccattatatctgatgaggttgacgatttcgtcagagagatacagattgacccagaagctactttcttcgatcttcatgaagctattctgaaagcagcaaactatacaaacgaccagatgacttctttctttatctgtgatgatgactgggaaaaagaaaaagaaattacactggaagagatggacaataatccggaaatggacagctggattatgaaagagacccgcctcaacgagttgattgaagatgaaaagcaaaaattgctttacgtattcgattacatgactgaacgttgtttcttcatcgaattgtccgaaatcatcaccggaaaagaaataaaaggtgctaaatgtactaagaaatcgggtgaagcccccaagcaaacagtcgatttcgaagagatggcagccggaggaggctcactcgatctggatgaaaacttctacggtgaccaggacttcgatatggaagactttgatgccgaaggatttgatgtaaatgacggtgcagccggaggtggaagttcatacgacgaagataaattttgaataatatgcccatgtgaccacatccggtgggttatgacatcttactacccgccccctatgctgtcacatgggtacattatcacatgaccaatcgttatgactgccaaaactttaattgtacttataggtcctacaggtgtaggaaaaacggagttaagcctccgcatagcagaatatttcaagacgagtatcatttcgtctgactcccgacagttatacgccgaacttaagataggaacggctgctccgaccccggagcaattaaaacgggttccacactactttgtaggtaccctgcaacttaccgattattacagtgccgcccaatacgagacggaagtaatgagtgttctcgaacagttatttcaacaacatcatgtcgtcctgctcaccggaggctctatgatgtatgtggatgccatctgcaaaggcattgatgacataccgacagtagatgccgagactcgtgagctcttgctacataaatatgacacagaaggactcgataatctctgtgccgaactgaagctactagatccggagtactataaaattgtagatttaaaaaatcccaaacgggtcattcacgccttggagatctgttacatgacagggaaaacttatacctctttccgtacacaacaaaaaaaggaacgcccgttccacatcctaaaaataggactgacgcgagatcgcgccgaattatatgatcgcatcaaccgtcgtgtagaccagatgatggacgaaggattgctggaagaagcccgctccgtatatgcccaccgagagttgaactccctgaacactgtaggctataaggaaatatttaaatatctggatggagagtgggatcttgacttcgctatcgaaaaaataaaacagaactcacgtatctactcacgcaaacaaatgacctggttcaaacgggatgaagagatcagatggttccatcctgaacaagagaaagaaatattatcgtatcttcaggcctcaattaaataaacaggtttatatagaagatgaattcttaacaaagaagagaaaaaagccggataaaataaaaagagttgcaaaggaagcgttattacataatatttttagtatctttatcgataataagaatatcccttaaaagttaacactatgcgaaaacgagtacttttcttacccggtattgcagcacccattgtcttgcgcataatcactacaattaaattcaatcttcaattttttatccaatatcggggcattgacaccaatcggatacgaatataataatggatataatcgcatgcgaatatgattttagtgcagatattagtcaaagacctctttaatatgataaaaaaaatatttttctccagcttcctattgatgataatgttctgcggatgtatgacccagaatgaaataacaggttcggtcgcaaagttagaaacagtagaaaaagtagtggatgacactcttttcctaaaaaatcctcaagtcttctgcttggaaaccaaagacaatgcattgataaagcgtataaatcgggtaatagaatggaaaaacacctattatattttagataaatccatgaagcaagtgttggctttcaatgacaaaggcagacacctatttaccatacaccgtgtagggataggtaaaggagaatatggaagcatactggatatagccatagacaggcaaaatgaaaatttagtattcctggctgacccgacctcactgatatattatgacttacaaggaaacttcattaaaactaccaaactacaaggatactatcattcaatagcaattgacaacggagtgacatatttagaaaatgccacacatattaataatcagttatccacatcgtccatcacagtaatagccccggacaaccaaaagactgaactattaaaaccactccaagaaatagctccttattgttttatcggaggaagccggctgaatggaaccactcctattgtatttaccagaaaattcgataacaccatctaccaactggaagacggaaagataaccccttactactctttcgattttatgaacgagaattttccggaagctgctaaagacaaagaatacacctgtcgtgagcttaataagttcacctgggatcgatatgtatatttaatggctaatgtggcaaatgctccccagtatttaatgttctgtacgaatctgttcggtgtatatgtatttgataaaatgcaaaacaaattattgaaatacaataagatacgaaatacgggataccaaacagacttacaccaatacataccggtagaaggagccaacaaccgtgtattcttcacggtttatcctacgaccctgttcagcctcaaagctatcgtagacaatcatccatctttcaaggataaaatgtccgataaactatataaattgacagaatcattggacagcgactctaatcctgtcattttcagctatcagataaaataaatatttgacaataggatatatctccaacgccaccgattacccaaacggttatcccggtttacgtaatcggtggtaaacaaactgttatctctcttttatttttccagattctccagatcgatttccacgatcagctctgttccttttcctggagcagagttcaaagtcagagttcccctcaggttttccacacgctcttttatgatagtaagaccaattcccgtcttcccggtctgttgctcaaatcctcttccattatccgaaactgtcaatttcaccttgttatcttcccgcaccaggataatcttcaccaacgtggcttgtgcatgcttcaacgagttaccaacagcttcctgtacaattcgatagatctccagcgacaccttctgcgataaattgtcaaagttatcctccggttcgagcaacagctccagttcggtctgccccggctgattatgctgatatacataatcctgaagaatctccgataacgaagcgtatttgaaaataggtggcatcaggtcatgcgaaatgccccgtacttccgcttgcaaagtttgtaacgtgtccatgatctcctcacaactacttgttccatcggtgattttcatcttgatggccaataattcattggaaacattatcatgaagttccttcgccaatcgctttctttccacctcaagaccttccagataatattgaactttacgctgttgcgcttcatgcactaaagactggaactcccgttccctttcctcaagttttgtcttctgcaacttaaccagaagttcagcttcctgctgctttagtttggcaatctgcaacattccttcatgaatacgctggcgcgaacgatagcgtttcaaaagtaaaaagatagtgaccagtgccagaacaataagaatggccgaaagaatattaatccgtcggttcttttcgttaatagcggacaattgctccacaacccgttccttttcattcagattatattgtgtccgtaatttctggatcgtcttattgctatttttgtcaaacaagcgagtttcatatttcagtgaattacgggctgcctccaaagccttattataaagttcctgcttctcgtataccttagccaacagtgtatagaattcaatcaaagcatgatagtaatccacctcctgctcttcatccatccgcttcaactcacgcagtccgtcctgtaaatgttgttcagccaattcataatctgcctgataataggcaattactcccgaaacataactgaccgaaacattggcgtcaatctttttaggattcatcagtttcttacccgtttcaaagcactgttcggcttccttgatttttcccgcctcactgtaaactattgcctggtgcaaataattgtcggatatgacatatcccacgtcataaggattttcggtggatgtgtagaccttaaaagcctcctggttatacttcgttacagaatccagtaaatccacccggtgttcattctgatataaggcataaaagtatttcgcctttatggtccacttcaatatctgctgaaaagggaaatctaccggtaagtctttcatcgcttccgacaattcatgtaatccctcatcatcttgccacatcgagtaaatgatagacagatcataataaatctccgttaagatggccggcttcatttcattgcgattaaaatactcagcagcctgataataattctcatgtgcctgttccatcaagttcttatccgaataatagattccggcaatgtagtgcatcataccggaaatattgttgttttcaaactttcccttattcataaaagcactgtccagatagtttttagcctcagtcatatgtccaagttgattttcgaacatggctacaatggaataaagacgggtaatgaccgccttatcctccacctctttcgcttccggaatcaattgcttcagcacggcaatctgatgctcccgtgaaagatattcgatatccccggtcatataataacgttccatcaaaggaatctttttatttttcatcagattcattatcgaatcatactgtgcggcatcgtcttgtgcatcggccgctataacgcagcaaaatagaaataaaaaaacggataataatctcttcataaatacataatggttaaagtgtaatcctccgactcggaataaacatggcttcagagtccaaacagttcgttatatcgttggctaatatacgaatctatttcattatataattgataaagttctttcaaatcgatattttcccgtttttttccatccttccgaccggggatagaagacttgtcctccatggtgagttttgacacattggtctgtgggagtagcaccccacaataaatcttttttagtctgccggattcaatgtcacgtttacctccggagccacagccttttcaactgttgtcatgcccgtatatgaaatacggagcatagcgttcttgggagccaaaagaacaaaacgtccataagcatcagacattgttcccgagacggttcccgaaataaatacagatgcccccgccaatggcttatccagatgatctttgaccactcctacaaccttcaccccgtcttccggatccgaagcagaaagagacagcacattttgcacatcctttcctttcagtgtaatcagaattacgccatgtttggccttatctccatatatggctgtcgacgcttcgtctttcagaacactgatagactcaatcatatccggattgatatcccgttgcatctgctcgccggttatctcttttccatccacaaggatcaagggctgaggttgagaaccggcatttctaaccgaaaacaaatccatcccgcttcttttcatcccatccgttatggttactttcgagtgcgtaggtaccgtttccaaccgggatacttcaaaagcctcttctttcggagcatcttttttcacagtatctttcaacacctcaacctttttttcaggcactttagtccctactatttgcacgaaatcattcactttcacggccgagatttcatccatcttacccgaaatctcaggacgggcaaatgcagtcacagcaatggcggccaaaggaagtacatacaagtacttcaatcgtgcccatggatttgacttttcttttaacatcatagtgatacgttttttaagtttactgtgattaaagctgttggccatagagtagagccttgtgccaacagctttttttatcagtagcaactgatattgcctggcattaactccctctctgataacagactcatccgcttcatactcatgaatattctgaagttcctgctttaatagccaggaagccggattgaaccattgaaagaaaatacagatatcggcaatcagcaaatcgacagagtgacgattacgaacatgtgctgcctcatgaatgagtatctctctgccatcctcctccaaatccactttagagataacaatatacttcatccagctgaaaggtgaaatcttttgttgatgaatcactaaggtcattccgttttccatcttctctttctcccctgacctcagcagcatcaacagacgccccaaagaataaatatgccggcaggcgaaaaagagaactcctgataaataaaccatcaaaagaatctgtatgccggataaagtcaccgcttcggcaggtgtcacctccgataccggcatatctgccatcatcaataattgttcgatagtaagcatcgtctgatgtacttctgtctgttcgatagtagtcagttgaacaagaggcaacaacagagacagcaacaacagagtcaacagagcgatcctgttaaatcggtgaaatgtctccttgctcaataacaagcggtaaaacagataaaaacctgccaggcaaacagaagactttactatataaacgaaaaagagtcccatcatatccgcatcatttaattattcttcgttcttttgctccacctcctgaatcaacttcttgaggtcgtcaagcgaaatatcttcttccttcaccaatgacgacacagcactgagatacgaattattgaaatacttgctaattacacttttcagcgtacgtttactaaagtccgattcgctgactaccgcataatactgataggtattgccataagtatgatgtgctaaaaagcccttctcttccaatccgcgcacaattgtagacaaagtattgaaatgtggttttggctcatcataaaatgccagtatctctttcacaaacaaaggacccttctcccagaaaaatcccataatctcttcttcttttgctgttaatcttttcataaccttttcttcatttgaacacaaataacgaaaagatttagttcaaaaactaatttcagcagttaattaaaactaaagcggatagtttcatgataaagcatatacagcaaaacattaccagccgataaagtgttatttcatacattttttaaccgtttgctatgctaaatcaaaaataattctcacctttgtgatgcgttatataattttttaagcagagatagagaaataaatatttctttgtcttactttagctacgggcatatgatcgtatatgtccgcagcttttggataaaacggctctgtccccgtgtccaactccgtaatgggttggcatatatttatttcttgctctgcatgaaattatataacgcaaacgggtcagcagggccgttcatttttccctgcctattacgtttaagccatgggcaaacctattatcagaattttatatttccaacgccggggaatcgacgccaatggttattacagattgaattacatcattcagcgaggcagaaagattctatactatgccacagaaaccaaggactttgaatattcagactgtttcacttcttcctgtttagccgaacggaaagaaacgattctcgatacagcccaatacatcttcaaagttcacaaggtgagatattcccgcctgatactaagtccaagctactcatatatcactaagtataaatcccgtatccggcagatctgcaccgccactcgattttgtaaatcagacatcatttggacgatgtgtccccggagtttcatacctatttcaaagattccattttcattttagttttttctttcagtttgaacctttatatacattcttaaatccagatctctacaacaaactcaaccagttgatgcgaaccgctgtttctttattgccccccgtaaagagcagcggttctttttatcctgccaattaagtaaataaacatcttaattttgctatacttataaagcatcgtatatcaatatcttacttcttatctcagcacctttatcccggtccgcgtaccggggcttatgggctcaggtacacgggacgagataaggactgcaccatttcctatttaaacaacgaagaaaaacaaaatactttaaaaggtatatttgcttaagaagtgtgcaatctatatctgtagttcagatacttacgtgaaatatcaccttaaaacagagggtggaagatggaagatcgattttttggggggtcttcttcaaatttggtggtaagttttcttttactcatggaatctaattcagttttcggaagggtaagccctcgtttatagttgacaaaaagcaggtatcccggttttcgcccgaagagtccatccgtgaggtgaagaagctaatcttagactaaaacttctgaaaatcaacgtctttaaaaagtaagatttctatcctcaaaagctttgttttaacacagagttaaagcttgttctttggatgtgaataagaagttctttaaatgcaaaagacttgttatttgcgcacaagaacctgacaacctgcaaaagacgttaacaatgttaattgaagaaaggtataaggaggaagataccggttcagacggcgtaaactcacttccgaaacttaagttatcttattcagccggtgtctgttttttcttattaaagcaagcaaattggaaataaagaaataaagaatttaccaccaaatttgaagaagaaccatcttttgcaggagatggtatttcaaatcaggagcgtgaatgcgtagggttacgcaagagggcaagcgtttcaggtatccgcaacaacgatacggcatattttcagctgcttgcatacgtttcccgaaattatcatgtacctttgtactcccgtttatagaattacttgattatgaacctgaatactccggtagagattccatctggattcacccccatcagccatgcccagcaactgctgattatgggttcctgctttgcagagaacatcggtaccctgcttgctgaaaataaattccggatcgatatcaatccattcggtatcttatataatccacgatccatctcaatggctttgcgcgaaatcatcagccaaaagcaatacaaagcatccgatctgtttctgcatcgtgaatgttggcacagcccgatgcatcacggctctttctccgccgccacccttgcagacaccttacggaatatccaatcccgtgtggaacaggcacataaagagctgaaacaacttgaccggcttatgctgaccttcggcaccgcatacgtatacgaacaaaaagagacaggaaaggtagtggccaactgtcacaaattgcctgaaaagaattttatacgccgccgccttgagatagacgagatagtagaagactataccctgctattggacgaattgatctctttgaatcctcaactaaagatcttgttcacagtcagccccattcgccacatacgagacggaatgcatgccaaccaactcagtaaaagcgtgctgctgcttgccatcgaccgactgatgcaacgttatccacaggtcacttgctactttccttcttatgaaatagtattggatgaacttcgggactatcgcttctatgcagatgacatggtacacccatccacgttgaccgtcaattatctatgggagcgtttttcggagactttcttcacccccgaaacccaaagcctaatcaaagagtgtgaaacgatacgaaaagcgattgcgcacaaacctttccatcccgagtcggaagagcataaaagatttttaggacaaattgtgttaaaaatagaacgacttaacggaaaatacccgtacttagatttcgaaaaagaaacaaacatgtgccgattggcgcttcaataaatgtgcaaatatgccaatgctttaatattatgtcatatacaattgaatcaatcgttgaaaaaataggtgcacggcgtctgggaaacaagcctgctgccatcgactggctactgactgacagccgttcgttatgttttccggaagagaccctcttttttgccattcccaccaaaaggaacaacggcgcacgctacatccctgacctttatgaacggggagtgcgcaattttgtagtcacaagcgaagatttcaaagggctcaccatggacagtgagcaactaaaagtgacaatggctcaggaatgcaatttccttattgtccccaatactttaaaagcacttcagaaattggccgaacaacaccgtggttccttccagattccggtagtcggcattacgggcagcaatggaaagaccattgtaaaagaatggcttcaccaattgctcagccccgaccgggttatcgtgcgttcaccgcgcagctacaattcgcaaatcggtgtcccgctgtcagtctggcaaatgaacgaggaatccgaactgggcattttcgaagccggcatttcggaaatgggcgaaatgcgtccgttacagaatatgattaagccgacaataggcatcctgaccaacattggcggagcacatcaggaaaacttcttttcactgcaagagaagtgcatggaaaaactaagcctgtttaaagattgcgacgtagtcatttacaatggcgacaacgaaatgataagcaactgcgtaggaaagtcaatgctgactgcccgtgaaatcgcatggagcatgagggatatcgaacgtccgctctatatcagcagggttgagaagaaagaagatcataccgtcatctcctaccgctatctggagatggacaatacattctgtattccctttatcgatgatgcttccatagagaactcactgaactgcctcgctgcctgcctgtacctgatggtaccggccgaccagatcaccgaacgaatggccaggctcgaacctgtagcgatgcgccttgaagtaaaagacggaaagaacaactgtatcttgatcaatgacagttataattcggaccttgcttcgctggatatcgctctcgactttctttaccggcgttcgcagtcaaaaggcctaaagcgcactttgatcctttcggatatcctggaaaccggacaaagcacgacaacactctaccgcaaagtggcacaactggttcacagccgcggcattgaaaagattatcggtgtaggtgccgaaatatcctcatgcgcatcaaagtttgatatagaaaaatatttcttccccgataccaaggcacttctggcatcagatgtaattaagaaactcagaaatgaaatcatcctgataaaaggctcccgcaacttcggtttcgacctcgtttcggaagaactggaactgaaagtacacgaaaccatcctggaagtaaacctgggagctatggtagccaacctgaatcagtaccgctcgatgctcaaaccggaaactaaaatggtgtgcatggtgaaagcgtctgcttatggagcaggttcgtacgaaatagccaaaacccttcaggagcatcacgctgactatctggcagtggccgtagccgatgaaggttccgaccttcgcaaagcagggatcacagcctccattatcatcatggatcccgaactgaccgctttcaaaaccatgttcgactataaactggaaccggaagtatacaatttccatttactcgacgcattgataaaagccgccgaaaaagaaggtatcaccaacttccccattcacgtaaaactggatacgggtatgcaccgattgggattcgaagagaaagacatcccgcaactgattcgccggttaaagaaccagaatgcactgattccccgctctgtcttttcccatttcgtaggcagtgattctgcccagttcgacgcttttacccggcagcaaatagaacgatatgaaaagatgtcaaaggaactgcaagatgcattcccgcacaaaatactgcgccatatctgcaacacagccggtatcgaacgcttccccggtgcacagttcgacatggttcgtcttggcatcggattgtatggaatcagtccgatcgataactcaatcatcaacaacgtgagtaccttgaaaacaacgattctccaaatacgggacgtggcggaagaagatactgtaggttatagccgcaaagggcatctgatacgtccctcacgtatcgctgctatacccatcggatatgccgacggtctgaaccgccatttgggatgcggacatggctattgccttgtcaatggcaaaaaagccccatacgtaggaaatatctgcatggatgtgtgcatgatcgacgtaacggatattgattgtagagaaggtgatcaagctatcatcttcggtgacgaattaccgattaccgtcttatcggatgcgctcgaaaccatcccttatgaagtattgacaggcatttcaacccgggtcaagagagtatattatcaagattaactccaaaagattcagtcggaaaagtgaaaagtaacggacattaacctccttcagcttttcacttttcgtttttatgagcccggttttcgcttttatgattctgcctttcttttttcattcaaaatagtctatctttgcacacaaactaatacaataccgttatgacaaacctttttttattaggattcatgcccagtggttccgaatggattatcatcctgttggttatactcttgctttttggtggtaaaaagattcccgaactgatgcgcgggctcggcaaaggagtgaaaagttttaaagaaggggtgaatgaagccaaagaggaaataaacaaagcaaaagaagaaatcgacgaaccggaaaacaaagaaaagaaagataactgatatcctgttttgtttccgtctcttacatgagatgaaaatagaacgaaagtaaatttcaaccgcctttctcttaataatggcagaaattaaagaactgactttttgggatcacctggatgaactgcgccgggtgctgtttcgaattataggtgtatggtttgttttggctgtaggctatttcattgctatgccctatctgttcgaccatgtcattctggctccctgccacaacgatttcatcttttaccatcttctgcgggacatcggacaggcattcgaccttaccgatgacttctttacccgtgagtttaaagtcaagctggtaaatatcaatctggcagcacctttttttatccacatgtccaccgctttctggatgtctgtagtcactgccacaccttatttgtttttcgagatatggcgtttcatccgtcctgccctttaccctaatgaacggaaaggagtccgcaaagccctgaccatcggcacggtcatgttttttatcggagtccttttaggttattttatggtctatccgctcacccttcgttttctctctacctatcaactcagcgcagaaatagagaatcagatctccctgaactcttacatcgacaattttatgatgctggtgctctgcatggggctggctttcgaactacctttggtaacctggttgctttccttgcttggattggtaaacaaatcattcttacgaaaataccggagacatgccattgtcctgattgtcatcgctgctgctgtcattactccaacaggagaccctttcacactcagcatcgtagctattcccctctatctgctttatgaaatgagcatattgatgattaaagacaaaaaccgctcgtagatcctgattacctactcttctttgcatatatcagtttctctcgatacggcttgaatatcaagccacaattcatttattccattatcatacaagaaaaaagcatacttcttgattcatactaactatactttccatatatttgcagtattcaacacacatcacatctttaatgatgaaaataaaaaaacgataagacaatacgaaattatgattaatactttaacatcgttgagattcatatttgcaataatggtttttggagcacattgctatgttatagacaatgttttcaatacccattttttcaaagagggatttgtaggcgtcagcttcttttttgtgctaagcggctttattatagcatataattatcaagagaaactgaaagacaacaaaatagacaaacgctctttctgggtagcacgcattgcacgtatttatcctttacattggctgacattgtttattgctgctattttagggagttacgttatagcctcgggaactttagattggcttaagcatttcttagcttcgctcactttgacaaatgcttatattcccagagccgactactttttctctttcaacagcccttcatggagtttatgctgtgaacagcttttttacatctgcttcccattccttatacctttagcaaaaaattacaagtatttgctttctgtttttggaattgtagcgatactaatggtcgtcggcatgtactttactccggaagatgaaataaaaggcttctggtatgtcaatccaattacccgatttccggatttcattgtcggcatgttactgttccaattgtatgaacgcttgaaaaacaagaatatcactgtcttgcaaggaagtatcattgaaatctcatctattatcttatttttaattttctacctctatgccgccgatatacctaaagtataccgatattcatgttattattggctccctgttgcggtgattctgattagtttttcacttcagaaaggtatcttttcccgcattttatccaaccgttttctagtgatagggggagaaatcagttacagtttttatttgatccatctatttgtcttattgacatattcagaatggcaaaaagaaaataatctccatacggaatggtacatttccgtcccgattctattcagtatcatcattctattaagcctgctttcttactactattttgagaagcctatgaataaacgagtaaaaacattactaaacagatagttcacaaaacaaattgcctacagaaactccgatattgaagtaatgatactttcgtacacattttcatccgtccgcatgaaaatccgggaattatcatgtatttttgctgtatggaaaatgaggtaaacgaatcttttgaaatcctgcttgcagcctgtcggacagcagacagcaatctggcggtggcttacaaacagttgcgtgatttgctcgaacgattgtgccgggcacaaatgcaggatgaaagtcttcagatgactgacctttcagcacggatcagttttgtatcggcacgggcagggctgacaattgttgaacaaaaccgattacacacttttcgcctgacctcaaacgctattctcaatcgaaaagaggaacctgtacgcgaaaagttactgcgggatgccaagacacttgccttttttatacgtaaactttacgaagtcgagattcccggcgaactctaccacttactgccgcgtgccgacgcaacttacctcgtagcacctccggctaaaaagcgaatagagcgaatgcgtgtatgctatcaatatgccgacgagcagtatctatatgtaactccggtcgataccattgctgacgaatatctgaagatacgttataatgtgccgcagattaacgaggagtttgctcaaacctgcgaaattttatggtgtcatgcacaactcaacctacttgatgtggccattgacgaaaccggtgtcctgactccttcgttcatcgtactcgaaccggattacttaatcgacatcagttcgttggcagaatgttttcgtgattacggacatcatcccgccaactatgtactggcccgcctccaacccatcgacaatgcccggccattattactgggaaacattgccaaccttttcctggacgaatggattcatgcagaaaacgaaccggactacagagagtgtatgcaaaaagcctttcgccgttacccgattgaactggctgcctgcaccgacctacgtgacagagagaaggaacgacagttctttgacgattgcaaactacacttcgaacatatccgcgaagtggtgacagacaccttccgtgcgccgggctatgaattggataagactgatgcagtgctcgagccctcgtacatttgcgaagcattgggactgcaaggacgattggactacatgcagcgtgacatgtcatcgtttattgagatgaaatcggggaaagcagacgaattctccatccgcaacaaagtagagcccaaagaaaacaataaagtacaaatgctgctctaccaggcagtgctgcaatactcgatgggaatggaccatcaccgggtaaaagcctatctgctctacacacgctaccctttactttatccggcacgtccgtcgtgggccatggtgcgccggatcatcaatctgcgcaaccggatcgtatctgatgaatatggaatccagttacgaaacagtgtggagtataccgcctccaaactccaagccatacgttccgacatactcaacgaacgaggattatccggccggttctgggaacaatatctccgcccgtccatcgataatctatcgcagaaactggcttcacttaccccgctggaacagtcgtacttctacgcactctataatttcataaccaaagagttgtatacttccaagtccggagacgtcgattacgaaggacgtaccggcgcagccgccctgtggctatctaccctgacagagaaatgcgaagccggtgagattctttacgatctgcgcatcaaagagaatcatgctgccgatgaacataaagcatatatcctccttgagcaaagaaaagagggatacggagaaaataaactatccccggaacctaacgaaatatcctctgaggtagaaaaaggagcacaggtcttgcctaatttccgtcagggggatgccattgtactttatgaacgcaaccgaaacgaagataacgtcaccaataagatggtattcaaaggcaatatcgagttcatcacagaagaagagataggtatacgcctgcgtgccactcagcagaatagttccgtgcttccgccggacagcctctatgcaatagagcacgacacaatggatactaccttccggagcatgtaccaggcattatcggctttcgcttcggcaaccaaagaacggcgtgatcttttattggcacaacgaatgcccgaattcgagtacgggcttgacaaacagattctaaccgccccggacgattttacacgggtcacactaaaagcactggctgccaaagactttttcctattggtaggaccgccgggaacgggcaagacctcatgcgccttgaaaaaaatggtggaaactttccattgcgaagcgcagacccaaatcctcctgctctcgtatacaaaccgggctgtggacgaaatctgcaaagccatctcatccattcggccggaggtcgactttattcgtgtcggcagtgaactgtcttgtgacgaagcttaccggcatcatctgattgaaaacgaactttctctttgtacccgccgctcggaagtagcagaacgcatcgcccgttgccgtatctttgtaggcacagttgcttccatctccggaaaacccgaactgttccgcctgaagagattcgatgtagccattatcgatgaagcgacccaaatcctggaacctcaactattaggtatcctatgtgcccggagcgaaaatggagagaatgccgtcggcaagttcatactgatcggtgatcataaacaattgcctgccgtcgtattgcaaaataccgaacaatcggaaatctacgatgaaggcttacgtagcgccggactgaaaaatctcaaggattctcttttcgaacgcctctaccgcaccctgcaaacctcttccgaggatctctttcccgactcagcatcggtatcggctccgaaccatcgctccttcgacatgctttgcaaacaaggacgtatgcatccggaagtagctcattttgccaatcaggcattttatgaaggacgcctgttaccggtgggattgcctcatcaaatggaagacaaccaagatgtgcaacgaatggtttttctaccttccgaacccgaacctcaaggtacatcggccaaagtcaaccattccgaagcacggatcgtcgcccgaatcgcagccgacgtttaccagcaatatggtggaacattcgacggaatgcgtactctgggtatcattactccctatcggagtcagatcgcattaataagaaaagagattgtcaaaatgggtattccggaactaaactccattttagtcgatacggtagaaaggtttcaaggcagcgaacgggatgtgataatctattctttctgtgtgaactatccttatcaactccgtttcctttccaacctgacagaggaaaacggagtattcatagatcgaaaactaaatgtcgcattgacaagagcacgcaagcaaatgttcatcaccggggttccccgattattggaacaaaacccgatttatgacagtttgataaaattaataaaacaatagaaaccattatcttaattttgcagtccttagcttttattctttctttctgaacttcgttaacacctcagtatattgcaaaccgctatatttgcactacgtttttttcatagagatttagatttaaggttagaagaattgtggaagtcgtgagacttccctttttttcatcttaaagtttgctttctttttgagcaaaagcataaaaagaaagtaaacctaaaaagccccttcgtgagaagaggcttttttttatgcttccattcggcagatacagggttcgatcatctccttatggctttgaacgggtcaccgcagtgaatcttaattcactataattattcctcccacaccagataggccgaaaccaaccagtggttcaatttattgccatccacagcctgagcttcgggaatactgactgtaaaagtatgcttgccgggagcaagtgtaccgataacagcctcttcgggtacaacatccgaaccgggacaccagttggaacgggataggtctgaagaagccagaggttcttccacttctttctccgtatatcctttctcaccaatataagaagccaagcgcttaatcaaccaaacaccggtagccggattgaaacgacggaaagaagcacaatcatcacgccaagggatgaagttgagcacctcttttccatctacagaaatgatattgcgtttttgcacgaattcatccccgccgctatgcccgccatgtccggtcactatatattttaaccggatatttttggcacctttcggaactgtaaaatcagtagatacatctctccgggcaaagatatcgggataactttgtcccatgtagtaaaccgtattcatcaacggctccacatgacgttttggaagtacgtcacaagccagacgactctcttttacatcaatatccgcattgaccaaatatccttcagaagtccaggtatcgatataaataccgacataggcttcgccttcaagcaacggataaagatcggttatatcttgttgccaggtgacattactttcccatttggggatatagaccggacgacgtttactgctcagcgaatcattattattgctatagtgccctacaccgaacggagtcatgaaacgcatcagctccactgtgggtaaataatcctttccgggaacaatacctaccattttctccagcttcaaactatctaccgaaggaaacttcatgccgtcacgggcaattgtcagtaggttaatagccgatgatttaggcaatacaaagcaagagcccgatttgtcccaacgatccccattggaggcgagggttactttcaggcttaccgacacatttcgtttgtattcgggaagagtaatctttttcagaatgatacgtccgttgaccaaatggtatacgcccgtaccatctgcttcattataattatcaggatacgtatcgggagagaaacgcacattcacattttcaaaaaccggaatatgaagatcgcctttagcgggcagatttttatgcccgcccgcccataccggaacagaaaggaataaagaaacgaataaagaagttaatctgatattcataagaatttatttttttatttagttactttcaatcacttgtcccactccgcgataaagcttgatagggccgtccagcaatacggcaatcacagtgatctgctcatcctgtacacgttcgggtatatcaatatagaggtttccgggcacctcgctccagtagttcttattataaaccttatatggcagcatagctccattccccactacccatacacgatttaccttattgacaagacctttcacttcgatcgggccattaggcttatagggtaaatagaggtaaaggatgtcacccgctttattcagtgtggtatatccctgaaaatgttcgcacgggatgccggcacgtgtttcgtagatagcttctttatgcttcttagtccaacggccgaattctttcaaaacagcaatctgttcggcaggaatagttccatcttccttcggaccaatatccaatagcagattccctcccatactgagacaatcgacaaaagtacgcaacagcataaacggagtcttataattagtgtcggcatgctgatacccccatgaatcgttcatggtcatacaaagctcccaatacttgtcggcaggacgtactacaggaactccctgctcgggtgtagcataatcgccatacccctgaatacgggagtttactataacattcgggttagtagaacgcaacaggttgatgatgcccttcgaatcccaagcctcagcagtttgttcccagtctccgtcaaaccagtaaagatcaggtttccaagttttgtttaactcggaaagctgtccaaaattaaacttaacaaactttgcccaacgatccggatcgtttttgtaacgtacttccgtacgggttttgttgggatagtccggatgcgaccagtcaagcagcgaatagtagaacccgagcttcagcccttgtttacgtacttccttcacaaaaggagcaatcaggtcacgcccggcaggagtacttttcacagtactgaggtcacccgccttcgtattccaaagagctacgccatcatgatgcttggtggtaatgaccgtataacgtgcaccactttctttaatcagtttcacccactcctgaggattataggccgatgccgtaaagcctttttcctgagccatatactcttcataaggaagatagttattgaagaatgaccagctctctgatactccgttcacggcatagattccccaatggataaagattcctaacttggcctgggcaaaccattccattcttttctctttctgagcagcagtttcttcagtagaagcagtttgggctttcagcccgaatcctaggagaaacaaggcaataagggtaatgatcaatcggttgtttttcattttatctcaattatattttgtctcaattaaggcaaagataaaatatctatcttaaaatacaaaataaaaggaagaacataaaagcaagccgattcttccggcctcacccaccaaccgagacacatacggagtcagcactccaaacaaatcactaataatttacaattacaatcttacaaagaatatatcccctgcacatatattcagattcatccgaagaaaaagagctataacagccacctcctcccaattatagaacaaacatagccgtgtgcgaaaacggtaattattgtgttcgataacgaaattattattccttttagtgtaattatcataaaaagatcccttgaagcatcaaattaaatagcagttattattggataaaatcaaataatgtgtatttttggtccgaaattaaacctgaaaattttaaatcaaatagtatgagtacactccaaaatgcaatggggaaaatgacaaactacagatggacgatttgcgccatgttatttttcgcaacaaccataaactaccttgatcgccaagtactatcgctgacctgggacgaatttatcaaacccgaatttcattggaacgagtcacattatggcatcattactgctgtcttttctattgtatatgccatttgtatgctgtttgccggccggtttatcgactggatgggaacaaagaaaggttacctttggtccatcggtatatggtcggccggtgcctgccttcatgctttctgtggaattataaccgaagaatatgtaggaatgcatagcgcagccgaactaattgctgctaccggtgatgtagtagtggtacttgccaccataagcatgtattgttttttagtcgcacgctgtattttagcactcggtgaagccggaaattttccggctgccattaaagttaccgccgaatatttcccgaaaaaagaccgggcttacgcaacttccatttttaatgccggagcttctatcggtgccctgattgcccctctcagcattccattactggctaaagcctggggatgggaaatggcattcgtcatcatcggtgctcttggcttcgtgtggatgggattttgggtattcatgtacacagctccctctaaaaacaaatttgtaaactcagccgaactcgaatatatcgagcaagacaaacatgaaacctacacagcaactgtaaaagagaacgaggaaaagaaaagtatgactttccggcaatgtttcacctacagacaaacctgggcatttgcattcggtaagtttatgacggatggagtgtggtggttcttccttttttgggcaccttcttacctgaatacccagttcgacatcaaaacctccgaaggattgggaagagcattgatctttacactttacgctataacaatgttatcgatctatggagggaaactccctacgatcatcattcataaaaccgggctaaacccgtatgccgcacgtatgagagctatgctgatctttgcattctttcctctgttggtattacttgcccagccattaggaaccatctctccctggtttccggttattatgatcggtatcgggggagctgcccaccaatcatggtcggctaatattttttctaccgtaggcgatatgtttcctaaaagcgccattgccagcatcaccggtattggcggtatggcaggaggagtaggttctatgattctccagtattcagccggcgagctgtttgtacatgccgacaaaactcaaatggtatttatgggctttgtcgggaaaccagctggttatttcgttatcttttgtatctgctcggtagcctacctgattggatggatcgttatgaaggcattagttcctaaatataaacccattatcctgaattaaaggccaacttaaaagaaggattaacttttaggaatgaagtcgaaagtctttctcaacacagatcaacagattacagtaacctacaatgtgcagattatcaatccggccgatcttctcatagtgtagtctgttaatctgtgatgagttttctttccttcaaatttattcatttattctccatatattttgaagggggcacaccaaattgttccgtaaagtgcttccttaatgtccgggcatcactgaatcctactttttcggaaatctcctgaatggagtaacgattctccataatcaacgaagcagccttactcacccgcacactccggatcatatcgaccacagataactcactgcgttgctttaccttccggtataaagtaggctggctcatgtgaagttgttcggccaacatcttaacgttgaagttctcattagacagattcttctcaaccacgtgaatgagtttttgtataaattcgtcatccgcctcttcatcttcaaccgattctcgtttcaacatcaatgctttggtataaatgcgtttcagacgttcgcgctgaagaatcaggttctctacctttgctttcaatacttccggattgaaaggcttcatcatatagtcatccgccccactataagatccttgcaatacatctgcatcttctgccttagccgtcaacatcaggataggaatatgagcggtctcttgccgttcacgtatctcccggcaacaggcaaacccatctttaaccggcatcattacatccgagataatcagatcgggtatctcattggtagcaatccggaccccttcctcaccatcagccgcttcaagtaccgtgtattttgtcacaaacaaagagcgaatatactgacggacatctacattatcttcaacaatcagcaatgttttctttgtgaccggaactccttctttcaatttttcctgtacagatagaggttgaaactgcggttccgtttcatgcccgcgataatctactatttcatataaatcaccggtaaagtgagatttaccttccggtatcaataatacgaatgtagaaccttttcccggctcactatcaagaatgacctgtccatgatgcagatccatcgtatttttcacaatccgcagtccaatgcctactttagtagagaaagccggtgaattatcacccgtaatgaaagagtcaaaaatgcgcttctgaaactcatccggtattccctcacccgtatccgatactgttatctggcaaaaaggctttccatcctgctccatacgggtaagagtgagcaatacctctccattgggagaagtgtatttaaaagcattagatagtagatttccgaccgacgaagttattttctccgtatctatccacaggaaaacaggatcttccggaagtcttacctgaaatgtacatccttttatccctgccatttggcgaaaagaatctgctacttctctcactagttccacaatatccgcttctgacaaacgcagtttcaccatcccggcctctattttttgtacatagagcaactgatcgaccagtgtatgtagcgaggagctgtttttatacatggtatatagcttgctatacagcggatcggatgcctttatgtgttccaataattcctgtaatggggcaagaatcaaggttagcggcgtacgtagttcatgtgccgcacttgtaaaaaagttctcacgctccatccggatttgtcgctctttctcacgctctaagtttactgacagaagttcatgttccatgcgcatttcacgttccatacgcatctgacgatgtttgacaagacgaatcaaataggccacaccaccggccaataacagtaaaataaataatcggaaaggcaatgtacgactccaatgcggtagaatatgtatttggagtgatgtaacctttccatctttcccgtcaggataaatattcttcacttcaaatgtataatccccttcgggtaagttcatataagtagccttctctccatcattagaaaccaaccaatgcgtctgatatggtaataagcggtaattgtacttctgttgttcctcagcataagaaagattattaaaagataaaacaaagtcacgattttcattattcaaagtaatcgaactagtatatgaaatgccttctgccaatacagtctgcccatttattttatccccaatccctacaggacgaccatctacctcaagtccagtaataagaacctgatcttcatccaaatgaccatccacgtcatccggatcaaaataagtgagcgatttattattgccaaaaaatagtgtatgatcagcaagtaatgccgaacgattgcttccacttatataataattataaaaaaggtgctgatgcctactgtaacgagagactcccgaattacttcccaaccaaatatgtcctcggttatcttcgaccagacatcctataaaattactacataatccatttctagttgtataatactcacgtattgcatcctttttaggtgaaagaatagcgaaaccatccatataacctacatatacattaccatcagaagatactaacaaagaacgaaccgaattatttttgatattcgctttcttctcatagcctgtctctaaagacatctctcctctagaatcaattttcaatttgcaaactcctgcattacttgtacctaaccatatagttccgtccttcgtgccggcaatagctcgtatacaaataggagtagggtccttaaacaaaatctcaatagggatttttatgcaaaatccagaatctatattcaatttccaaactccatcattagtacctacccataaatttcgattagtatcccaatataatgcccaaattgacacagtattcactttacctctatcttgtaaaaaatgtaatcgaaattgttttgttgcctcattatatgaagttaatgttccatccctatttccaaaccaaagtgaacctctattatcattaatggcacaaagaactgtatttttactttgaatatccggagtaccaaccctagtaaaattcattcgtcttcctggttcaaaaggttgctcacttttcataatcccttgatgaaacgtagccatccaaacatattttctattatccatgactataccacaaatttcattatgcctctcttgatgaaattggttataaaattgtgaccgtagatcagaataaatcactcctcccccattagtacctatccaaacaatcccactggggtcgtaatacgctgaaatcattcttgtttctaagttgcggtgaagttgtgaagctgtattatagtatatttctgtcatcattcttttcggatcattcttatcctgaaataataaagtatacccactccaagtcactgcaagataacgattattattaattggaataacttgaaaaacatctgtatgggatagactgttttctttattattttccttataagtaattctgtctatatacccagaagaaacgtaataacgcagaataccgtgtccaatagtagaaatccataccactcccttatcatataataccgaagttgcatcccaagttttatttttccacaaagatatctttttagatttctccgaagattcaggctgaaacaatagcaaatttccttgctgtgtaaccaaacataacatttcatgattatcagtataacacattgcacagaaattatcaccagaatcaatcaaatctttatactgtttctcacatttcaatttaatctgaacaacctctcctttctcatttttaacttcttcctgtgtatatagatataatttattccctgacagtccccaaaaagagttattatctataggtaataagtgagagacatgtacagaactataatccgttgcatggacgatcggtataaatttctccagcgaccgagcaaaacaatataaagtatttccagcgataactcccaaatatcgatctgacatctctacaatttcggaaacatacatatacgctggtgaagaagagaagttttttattaatttaccatcataacggctcaagccattattagtaccaaaccacataaagccatcccgatctttgtagatagatgtaatagtattatccgccagcccatcctgcatggttaacagacgaatatctctatcaaaaaaagcataaccagaaacgaccggacaattacatataaacaaaaccaataaaaagagatttagcttcttcatattaataatcaatttattgcaaaagaacgaaataaagcctaaacatacaaaagagattcaaaaaaaacatggtattgaattaaacgtgtatgctgaatgatatagacatgcccctacgtaatctctcaatccctgtacatttgccatgtaattaaaccttatgtataactttaaataagaaacgaatgaaaaaaatttcaatcttattcatgttgttgcttggcattactacattatatgcacagcaattgaacattacgggtactgtgattgacaaaaagctcaatgagccaatcatcggtgccacagtccaagtaaaagggacgaacaatggatccatcacggacatggaaggtaagttttctctaaaaaacgttagcaaaggaggtatactgactgtttcctacataggttacaccactcagtcaattcctctcaatggtacacaaacatccttcaggattgagttaagtgaagattcaaaaactcttgatgaagtagtggtagtaggcttcggtactcagaaaaaagtaaatctgaccggagcggttacaagtgtagataccaaagcactagcatcacgtccggtatcacaagtcggtcaagccctgcaaggtgtagttccaggcttaaatctatcgactcctgatttagggggacagttgggacaaacaatgaacgtaaacatccgtggaacaggaaccattggtaaaggatcaagtgcctcaccacttatactgattgatggaatggaaggcaatatgaataatctgaatccagaagatattgaaaatatttctgtcttgaaagatgctgcttcttcttccatctatggttcacgtgctgcattcggtgttatcttaatcactacaaagaaaggaaaagcgggcaaaatgcaagtgaactataacaatagtttccgctattccggaccaaccagccttcctaatcaacttgattcctatcgttttgccaattatttcaatgatgcagccattaatcaaggaggaagtgtgatctttgatgaagagaccattgaccgtatccaaaagtatatggcaggcgagattacaaccaccaccatagctaacggtaccaactggcatttccacgaaaaagcaaatgataacgtaaactggtggaaaaaacattttcaatgggcctggtcaaacgaacataatatcagtttaaatggaggaacagagaagttacaatactatgtttcagggagctacttaaaccaagatggtaatcttcgttatggaaatgataattataaacgttacaacgcaacagcaaaagtcaatacccaaatcaacaaatatgtagatttcaacattaataccaaatttgttcgttttgatcttgacaatccagtatatcttgaggaaggtggacttctttatcatgacattgcacgtatgtggcctatgatgccttttaaagatccgaacggttattatatgagaaatggaaaactcaatcaattgactgacggtggacgtgccaaaacacataatgacaatatttatcttcagggacaattagttattcatccgctaaaaggatggaatatctatgcagaagcaggtatgagagtcatcaaccaaaataagcaaaccaaccttaatccaatctatgagcacgacgtaaacggtaatccattagcattggctttcagcggaagttactcaccaggatcttcatttgcacgttcagcataccacaatagtaacttttatacgacaagtgtgtacaccgattacacattacaaataaaagatcattatttcaaagctttagtcggaatgaataccgaagaatatgtatatcgcgaacttgccgcacaacgtcctgacgtgattagtagtctcattccagaaattagtgcagcaacgggagaagataaaatcaatagttcaaaatacaatgattggtctacagccgggttcttcggacgtctcaactacagttacaaagaccgctacatggctgaagtaaatgttcgttacgacggatcatcccgctttttaaaagatcagcgttggaacgtatttccttctttctctttgggatggaacttagcgcgtgaatcattctttgaaccaattaacaacattattaatacactaaaaccccgcgtatcatggggtatgctcggtaaccagaacacagactcttactatccgttctatttaacacaaagtgtaacagccaatggtggcaattggctaatggacggcagtagaccaacaacagccggagttcctggaatggtcagcagtacacttacatgggaaaaaatctataataccaatttaggcatcgaccttggtatgttcaacaatcgtctgaacatgacttttgaatacttcatacgtagaacgaaagacatggtaggccctgcagccgaagtcggtgcaatattaggaactgctctgccaaataccaataatgctgagttgaaaaataaaggatgggaactacaggccaattggagagataatattggaaaagttaactataatataggatttaacctttctgacaaccgtgccaaagtaatttcatatccaaacgcttctaaagccctatgggattctaatggaaatactctttattacaacggaatgactatcggagaaatttgggggtatgaaactgaaggtattgcccaaacagacgcacagatgaccgaatggctggctagcaatgatcagagtaaaataggttcagtttggggtgcaggtgatatcatgtatcgagaccttaatggtgatggtatagtagacaaaggaaacagtactgccacagaccatggtgatttaaagaaaatcggaaatagcactccacgccttcgtttcggtttaagcttaggagctgactggaagggtttcgatattcaaatgtttttccaaggagtcatgaaacgtgatttatggttgagcggaccaatgttctggggagcagatggaggagaatggcaatcagtaggttttgacgaacatcttgattatttccgtcctgaaaatacaacttctatattcggagcaaatttgaactcctactatcccaaagcctacttaggagacaaaggaaacaaaaacaagcaaactcaaacgcgttatctgcaaaatggtgcttacatgcgtatgaaaaatctgcaaataggatatacattccccaaagcttggatgaataaagcaaaaattgaaaagctccgcatttatgtcagtggagagaatttattcacaatcagtggtattgccgatatgttcgatccagaagcaacagccggtaacggatttagcaacggaaagacttatccgctgtcaaagactatttcatttggattaaatattactctttaaaaagcaagaacaatgaaaaagaatctattatatatttttagtttagcaagtgttttatgctcttgcaatgactttctcgacaaagagccactagatgccgtacctaccgacaaatatcttttggcagaaagcgatttagcagcctattcggctaatctatatgatcaacttccatcccacactccaggccaatacagtatgggagtatttgcaacagacaataatagtgacaaccaagcagcaagtaatccaaacggttcatttgtaaagggagaaacacgtgtggctcaaagtggaggtgcttgggattttgggaaaatccggaatgtcaattatttcatcaataaggtacgtccccgactggaagccggcgaacttagtggagtagaagctaacaatatgcactatctgggagagatgtatttctttcgcgcttatatttactttactaaattagttgcactcggtgatttccctatcttaaaacattggatttcggaagattatgaaacagttagagaggcaagtaaacggcgcccacgcaatgaagtagcacgtttcatcatacaagatttagattctgcttactattatatgaaagcaaccccaccaatgagcaatcgcctaaccaaagactgtgctgccctcatgaaaagtcgtgtggcattatttgaaggtacttgggaaaaataccacaaagggaccgcacgtgtaccaggaggtccgggatggccaggagcaaacaaagattatttaaaggacttcactatcaatattgattctgaaattaaatacttcctgacagaagctaaaactgccgctcaaatagtagctgataaatacactttatttaacgattatccgtcgttattcaacagccaatcattagctaacgcttcggaagtgttattgtggagagcctacgacgccagtttaactccggcagtcaaccattttgttgtcggttacatccaacgcaatggaggtggaaataccggatggactcgtagtatgatgcaaagttatttgatggaaaatggcttgccgatatacgcaaacaattctggttatcaaggagataaaacttatgaagcagttgcaaccaatcgtgatccacgactaacttataatactttattacctggagatctcttatctgaagggggaagtaacattgaatatctagtcaaaggatatggttattattatcgtgcaccaattgtacttggacaggacgaaaacaaatgtcccaccggctattcagtaaaaaagggattagcaacagatgccgcacaaggacctacactcccatcaactacagcctgtgtcatattccgtgcagcagaggcatacttgaattatatggaagctgattatgaactgaataactcgcttgatgccaacagttccaaatactggaaagctttacgaaatcgagcaggaatggataccgattttcaaaaaacaatagacgctacagatctgagtaaagagatcgattttgcccgctattcaggttctgaatttgtttcaaccactttgtataatattcgtcgggaacgtcgcatcgaatttgcggccgaaggattacgcctaaatgatctgaaacgctggcgtgcactagacatgatgcaaggttatcacgtagaaggattcgatttatggagtgaaaattatcaacgttacaaaactcctagcccaataccagttgcagacgtcactctctctgtcattaatctgattgaatcaggtaacaataatgctaatgtatcagctaaatcagaaagtcagtacttacgtccttaccggatcaatacaaacaacattgcatacaatggctataattggaaccaaaataaatatttaaatccaattgcttttgaccacttccgtctgacgacagcagaagaaggatcaaccgactatacaacctctacgatttatcaaaatccaggatggaagatagaaacgagcagtctccctgaaggagattagttttcagtagattaaatatcttactcaagacaagatctcctcccccaaaaaaggaggagatcttattattttcaataaaaattgtattctacccaaaaaagagtaactttacagcattatgaaaaatatcatccctcaagcactgcttaccatgcctattttgagcactggactacaagcacaagaaaagcaaccgactcccaatctagtcttcatcatggccgaccaatatcgtggagatgccatcggttgcatcggtaaagaacctgtaaagactccccacctggataagcttgcctccgaaggaattaacttcaccaatgctatcagtagttatccggtatcatcgccggcaagaggaatgctaatgaccggtatgtatcccattggcagtaaagtaaccgggaactgtaactccgaaaccgctccttacggagtggaactttcccaaaacgcccgctgttggagcgatgtgcttaaagatcagggatacaatatgggatacatcggaaagtggcatctggatgcaccctacaagccctatgtagacacttacaataatcgcgggaaagtggcatggaacgaatggtgtccacccgaacgtcgccacggtttcgaccattggatagcttatggaacatatgattaccatttgaaaccgatgtactggaataccactgctccacgagacagcttctattatgtcaaccaatggggtccggaatacgaggcaagcaaagctatcgaatacatcaacggacagaaagaccaaaaacaaccgtttgcattggtggtatcgatgaatcctccacacacgggatatgaattggtgccggaccgatataaagagatatacaaagatctggatgtagaggcgctttgcaaaggacgtcccgatatcccggccaaaggtacggaaatgggagactacttccgaaataacatccggaactattatgcctgcatcaccggtgtagacgaaaatgtagggcgaatcatcgaggcccttaaacaaaataatttatttgataatacgatcgtggtctttacctctgaccatggaatctgtatgggtgctcacgaaaatgccggaaaagatatcttctatgaagagtctatgcgtatccccatgattctatcttggccggatcaaataaaaccacgtaaaagcgacccgttgatgattgcttttgccgacctataccccacactcctgtcaatgatgggattcagtaaagaaatcccggaaacagtacagacattcgacctgtccaatgaagtactgaccggaaaaaacaaaaaagatcttgtacaaccatactatttcgtaaaattcgataaccatgcaacaggttatcgcggactccgtaccgaccgatatacatatgccgtacacgcaacagacggaaagatcgataatgtcattcttttcgaccgtaccaatgatcctcatgaaatgaataacattgccagccaacaattgaaacttacccatacatttaaccggcaactgaaaacatggcttgaaaagaccaatgacccatttgcccaatatataaaacttaaataatcatgaacagaatcaacaccaccctactcttacttttttgctcagtctattgcttggcgcaacaggctactatccccgttcccaagccctttcagttgaaatggcatcaagcggaaatgggagccgtattccattatgatctgcatgtgttcgacggagtacgctacggacaaggcaacaaccgcatcaatccgatagaagattacaacatattcaaccctacggaactaaacacagaccagtgggtgctggcagccaaagcagccggatgtaagtttgccgtactgactgccactcatgaaaccggtttcggtctctggcagagtgacgtaaatccttattgcctcaaagccgtaaaatggagagacggcaaaggggatatcgtccgtgactttgtcaactcttgccgcaaatacggcttacaaccgggtatctacatcggtatccggtggaattctcttttgggcatacataactttaaggcagaaggagaaggagaatttgctcacaaccggcaagcatggtacaaacgactgtgtgaaaagatggtgaccgaactttgtacccgttatggagatctatacatgatttggtttgacggcggcgccgatgatcctcgtggagacggaccggacgtagagcctattgtgaataaatatcagcctaattgcctgttctatcataatatagatcgtgcagatttccgttggggtggttccgagaccggtaccgtaggttatccctgctggtccaccttccccgctccctgttcacatcacaaacggatagaaagcaatgtcgatcaaatcgaactgttgaagcatggcgacaaagatggaaaatactgggtaccggccatggcagatactcctttacgtggagccaacggacgtcacgaatggttctgggaaccggatgacgaaaacaacatctatccattgaacgaactaatggataaatatgaaaaatcagtaggacggaacgctaccctgattttaggcctgacacccgacccgaacggattaatacctacaggagacgaacaacgcctgaaagaattcggtacagaaatcaatcgtcgcttctcttctccattagcccagatatcgggacagaaaaaaagtttgaccttgaaactggacaaaaagcaaccggtaaactactgcatcattcaagaaaacatacagaacggagaacgtatccgccaatataaagtagaagccaaggtaaatggaaagtggcaaacagtttgttccggagaatctgtcggacacaaacgcatcgaaaaattcgatccggtagaagctccggcattacggctaaccgtactgcaatccactgcattacccgatattatcaatttcagtgctttttctgtcaactaattcatacgcatgaaaagatatttcatcataagtttgcttactttggcaagtacggtcgctcctttgacggctgtatttgcccaaagttcttttatctacgaaaaaggtaaatcgtttaaagatgtaaacgcctctccaatgcctcagaccatccgcctggacagaacggcagaaccggtcatttatgagaatgcagttcctgagaatgcaaccactatatgctaccgcatccaactgccgtcttatgtacgggggacattcttcagtcgggattcccgccccggagattacgaatggcccaacaataccaatcgtctcttaccttggatgttcaatcatctgacagaccttacccgggacgactatccgggtattccttccaacgcacgtccttctacactgggagacgctttattgttgcaactgaccgatggaagctatctattcaccaaagcaatagcgggtgataacagcctcagctggtttcaggtaaataccgacggctcgctcaatttatatgtatcgacattgggaaccgaccggctcgaacacaaagtaccggtagcactggttcaaagtgccggcaacatttatcaggtattccggcaggcttacgaaaccctgatatccgaccggaacgtatcggccctgcaaaagcgcacggaaaagaactattttgaggctctgaactatctgggatggtgtacctgggaacattaccatttcgatattgatgaaacaaaaatcctgaatgacctggatgccatcgaaacctccggagttcctgtacgttacgtactgatcgacgatggtcacctggccaacaagaatcgtcaactgacaagttttacccccgatcctcaacgtttcccgaacggatgggctccgatcatggcacacaaaaacaaagataaaatacgttggataggattgtggtatgccctctccggatattggatgggaatctcccccgataatgattttccaacccatgtaaaaaacagcctctattctttcaatggaagtcttttgcccggtaaaagcaccccgaatatcgacacgttctaccagtattacgttcactctctgaaaacccatggattcgattttcttaaagtagacaatcaggcattcaccttaccgctttacatgggctctactgaagtcgtacgtcaggcgaaagagtgtaatctggcattggaaaagcaaactcacgcacagcaggtgggactgatgaactgcatggctcaaaacgtacttaacacggaccacaccctgcatagcggagttgcccgtgtcagcattgactataagaaatacaatgagaacatggcaaagtcgcatctcttccagtcatacaccaacacattactgcaagggcaaaccgtatggccggatcacgatatgtttcattccagcgatacgatctgtggcagtttgatggctcgttccaaggctatttcaggcggcccggtctacctgtccgattctccgaaagaatttgtaaaagagaatattttcccactgatcgataaagagggcaaaatattccgcccggaagcccctgccattccgaccccggaatcggtactgaccaatccactgcaagacggaaaggcatacagggtattcgctcctaccggtgacgaggctgtatccgtcatttgttataacctcaacacctcacccaaacaccggaaagtaaccgccgaaatagacccgaaggattatctgttacgcgaaacactgaccggcaaaccaacacctcaacaaaaacgagtgattctattcgactggaataatcagacagccactgaactgaccggtaaacagactgtagaactggatggctttaccgaccgtctattccatctctgtccgatccatgacggatgggcggttatcgggatacaggaaaaatatctgtcacctgcggccgtccggattctatcttcgacaccggacaaattagttctcaatgtattgtctccgggaactctgaaaatatggacagagaactccggaaaacaagaactgagaaacattcaggtaaaggaaaccggaaaaatgaccatcagaaaataatcctctaatatataattacgatgaataagaaaataattatccccctcgcactggctccattggctgccccggctctgcaagcccagcaccagcagccgaacggacgtacggacacacgccccaacatcattctcttcatggtagacgacatgggctggcaagatacatccctgcctttctggacccaaaagacacactacaacgaggtatacgaaactcctaatatggagcgccttgccaaacaaggtatgatgttcacccaagcctatgccagcagcatcagttcgcccacccgttgtagcctgattacaggaactaacgccgcgcgtcaccgggtaaccaactggacatatcccaaaggccagcaaacagaccgcccgagcgatgtattcaatgtagcggactggaatgtaaacggggtttgccaggttcccaatatcgaccacacgtttcaggcaacctcactggcagaaatcctgaaagacaatggctaccacacgattcattgtgggaaagcacatttcggcgccgtcaacactccgggagaaagtccttatcacatgggctttgaagtcaacatagccggacatgcaggaggcggattggcaagctacctgggtgaaaataattacggaaaccggacggacggtaaaccgaatccctggtttgccgttccgggattagagaaatactggggaaccgatactttcgtcagtgaagctctgacgctcgaagctatcaaagcactcgatcatgccaaagaatacaatcagcctttcttcctctacatggctcactacgctatccatgttccgatcgataaagacaaacgcttctatcaaaaatatatcaataaaggattgactcccaaagaagctgcttatgcggccctgatcgaaggtatggacaaaagtctgggtgacctgatggactggctggataaaaacggagaagcagacaataccatcgtcatctttatgagcgacaacggcggtctgtccagcgaaccggaatggcgtgacggaaaactgcacacgcagaactctcctctcaacagtgggaaaggatcggcttacgaaggcggtgtacgcgaaccgatgatcgtccgctggccgggagttgtaaaaccggataccaaatgtgataaatatttaattatcgaggacttctatccgaccatactcgagatggcacaaatcaaacattataagacggtacagccgatcgatggaattagttttatgcctctgctgacacataccggtgatccgtccaaaggacgcagcctgcactggaacttccctaatcattggggaaacgacggtcccggcatcggcccgacttgtaccgtacgcaaaggtgactggaagttgatttactactatgacagcggtaaaaaagagttgttcaatattccggaagatataggagaaaagaatgacctggcagccctacatccggacattgtgaaaagtttatctaaagagctgggtgactatttgcgcaaagtaggcggccaacgcccttcattcaaagcaaccggaaagccatgcccatggccggacgaaatcaaataaccgagcgaatataattactttttatagagaggagaacctaagacattacgcatctttcggttctcctttctgttttctatcaaacaatagacaaaatagtttccgccttgtctactatataatccggacagaatgattcaagctccgtacgggggcggaatccccacgtgactccacaggaagtaactccgctattgatagccgtctgcatatccactcctgaatcgccgacatacagcacttcgtctttcgaaacaccggcaatctgtaaaatatcatgcaccacagcaggatccggcttcaccttcactccctcacgctgcccaaatacagcaacaaaccggattcctgggaaataatgtgctatcagcttctcggtggctgcctgatatttattggaagccacggccaatttataacctttatgctgcaatgtttccaacaattccggaattcccggataagggcgactctcgtcggcattatgccggtcataatgcaaaagaaattctttacgaacgcggagcacattctcctcggttttctctccttcgggcaatgcacgctcaaacaatttgttgatgccgttacccaccataaagttataggaagcgacttcatgagtcggatatcccaaagtttgcagagcatgattcgtactatgtgccaaatcggcaatggtattcaataaagtaccatccaaatcgaatattatcagtttcttcatatctttatacctctatgtttacgacaaagatacggataattcagcggtaactttactgccatcccacctacaagctttataataattgttaacggaaaaacagaatcagtccgaaaagctcctttttcaaagaaaatattttaagtttgtgaaatagcaacaaaaagggaagaatttgaacttaaaaactgaaaaggagacgcttatgggatcaaagaaaacagacttaatgcgtatttcatattttgtagccatcgtgatattggtatgtctgataggtaatctcaaagacctttggctacaatcgtggaccgacctgatcatctatctgatagtcctgtttgccgccgccgaatgtctgttcagtacgtttgcacgtatccgtgcggtcggagagcaaaaacagccccgttggctgacttctatctccctgctgatttacggaatccttttcctcggaactctattttttatcggagatttcttaataaacaagttatgacaaagaaaaatctactcaaaggaatctgcctgctatggctattgctggcagtaactcctgtattgcaagcccaggatcgtgcgcaacaggcatccgaacttctcgaccggctgattgcaggccaaggagacagtgtgtatgtacatctggacgataacatccggaaaatgctttccgtagagatgttgaacggactgttcaagcaattggaacaacaagcaggtaagtatcagtcgcacggagagtggaaaaccgaaccaataaacggtatgactatttattattgcgacgttaagttcgaacgcttaccactgcgttttctcacagcgttcaatccggacggaaaggtgaataccattcgtttcgtacctgttccgcctgaaaagaccactcccccgacgacatcggtacaagataaaataaaagagacagacatacaggtttgtacggggaatttcaagcttcccggcacactgactcttcctaaaaacggcaaagatctgccggtagtcattttggtacatggctcgggggccagcgaccgggacgaaacggtaggggccaataaaccttttcgggacctcgcgtatggactggccgagcgtggaatagccgtgatccgttatgacaagcgcaccaaagtatatggagccgacagcgcacctgcaggcaaagaaattactttcgatgaagaatcagtggatgatgccctttcggcaattaaacttgcccgttccataccgacaataaatcccgaacggatctacattctcggacatagcctgggaggcaccttggctccccgcatcgcccaacgtagcgataaagttccggcagggattattctgcttgccggtgcagcccgtccactcgaagatctgtttataagtcaggtgaagtttctcgcctctgcactcccatcgactaaagatattgaaaaggaaatagccgaactacagaaacaagtggacaacgtgaaaaggctgggtacagacacattcgacattacaactcctttgcccatgaatctctctcaagcttactggatgcttgccaatcaatataaacctttggaagtggtccgaaaactgactctccccatacttgtccttcaaggcgaacgtgattatcaggtcaccatgcaagatttcgaattatggaaatccgccctggcaaagcatccgaatgcgatatttaaatcttatccccgactcaatcatctgtttcaggaaggagaagggaagtcaacccctcttgaatacagccgtccctcctctattccttcttacgtgacggatgacatcgcagctttcatcaaccgacccaagcccggtaactgatgacgacggaaacaacagttccaacaaacaaacgttatttatccgtacaagatcacccatcccccatccttctcaatcgccccttcctttcttgaaaatcggcatcggtatcattgtggttttgataaataccatctatcatcacacccggacaagcaggatagcagaaaaactaaaaacaacaacgatccgctctgtatcaacaacttaaacgacttcactttcagtatataaaatgcttgatttaacagagtgttaaaacaagcgttttgtttgcaaagaacaagtcttttaaacacaaaacacttcttctttgccaacaaaaagaaaacacccggagaaccgcattaacaatgttaacgaaagaggagaccacatttataagtccataaggttgtcagtccgcctccctttccactcttacttattaaatttccaatcaaaaagatgctccttccgctttcttttactaaatttgcatttaaatttgcccgaatcatgaagaatgaaccaacatatagcttgctaaacgccatcaattatcccaaagacctgcgccaactgagcgtagatcaattgccggaggtatgcgaggaattaaggcaggacatcattaaggaactatcgtgcaacccgggacacttcgctgccagcctcggtgtggtagaactgactgtagcactgcactatgtgtacaacactccttatgatcgtattgtctgggatgtgggacatcaggcctacggacacaagatactgaccggacggcgtgaagctttctctaccaaccgtaaactgggcggtatccgtccttttccctcaccggaagagagtgaatatgacacattcacttgcggtcatgcctccaactccatctcggcagcgttgggtatggcagtggcagccgagagaaaaggagaaaaagaccgccatgtagtagccgttatcggtgacggatccatgagcggaggacttgctttcgaaggattgaacaatgcttcatcgactgcgaacaacctgctgatcatactcaatgataatgacatggccatcgaccgcagcgtaggcggcatgaaacaatatctgttcaatctcactacttcgaaccgatacaaccaactgcgtttcaagacatcccgcctgttattcaaaatgggattgctcaatgaagaacgtcggaaggccttgataagattgggaaacagcctgaaatctctggcagcccaacagcagaatatcttcgaaggaatgaatatccgatacttcggtcccatcgacggacacgatgtaaaaaacatagcccgtatcctgcatgatattaaagatatgcagggaccaaagattctacacctccacaccatcaaaggaaagggatttggtccggcagaaaaacaggccactatatggcatgccccgggtaagttcgatccggtaacaggaaaacgtattgtagccaatacggacgggatgcctcccctgtttcaggatgtattcgggcatacgctggtagaactggcggaaaagaacaaacggatcatgggagtcacccccgccatgccgagcggctgctccatgaacatgctgatggatcgtatgccggatcgcgcctttgacgtaggcattgccgaaggacatgccgtgaccttctccggaggtatggcaaaagacggattactgcccttctgcaacatctattcctcgtttatgcagcgggcttacgataacattatccatgacgtagcgatacaaaaactaaatgtagtattctgtcttgaccgcgccggactggtaggtgaagacggtcctacgcaccacggtgtgttcgacatggcttatctgcgcccgatccccaacctgactatctcgtcaccgatggacgaacatgagttgcggcgcttgatgtatactgcccaattgcccgacaaaggaccttttgccatccgttatccgcgcgggcggggttcgttggtggactgggaatgtccgttggaagagattccggtgggaaaaggacggaaactaaaggacggaaacgatctggcagtaattacaatcggccctatcggcaagttggctgctcgtgccatcgaacgtgctgaagcagataccggcatttccgtagcgcattatgaccttcgtttcctcaagccgctcgatgaagagctactgcacgaagtcggcaaaaagttccaccatatcgtaacgatagaagatggaatcattaaaggaggtatgggatgcgccatactcgaatttatggccgataacggatattatcccgaaatcaggcgcatcggtgtaccggatcagtttattgaacacggatcggtgcagcaactctaccacttgtgcgggatggatgaagaaggaatttacaaggtaattactaaaaacgaattacgaatggatgctcctgtggaaagctgcatggctacccattcttaatcccccaatacgcaatagaaccgcaatttgcaatcacaatgaagataattattgctggtgccggagctgtaggcacccatttggctaaattactctcacgcgagaaacaggacatcatcctgatggacgatgacgaagagaaactaagtacgcttagttctaacttcgacctgatgactgttacggcctctccttcgtccatatcaggactgaaagaggtaggcatcaaagaggcagacctctttatcgccgtcactcccgatgaaagccggaatatgaccgcatgcatgcttgccaccaatctgggagccgaaaagacagtagcccgcatcgacaattacgaatatctgctgccaaaaaacaaagagttcttccagaaactgggtgtcgactcccttatttacccggaaatgctggctgccaaggagatcgtatcgtccatgcgtatgagttgggtgcgccaatggtgggaattttgcggaggatcacttatcctgatcggtacaaagatgcgtgaaaaagccgaaatactgaatgtcacgctggccgaactgggtgcgccggatattccctatcacgtagtagccatcaaacggggcaccgaaaccattatcccccgtggagacgataccatcaaactgcacgatatcgtatacttcaccactacccggaaatacatcccttacatccgaaaaattgccggaaaggaagaatatgccgacgtacgcaatgtgatgattatgggcggcagccgcatcgcagtccgtacagcacaatatgtaccggattacatgcaggtaaaaattgtggataacgacataaaccgctgtaaccgcctgacagagttgctcgatgataagaccatgattatcaacggagacggacgggatatggacctgttgattgaagagggactgaagaacacggaagctttcgtagccttgaccggtaactctgagaccaatatcctggcctgccttgccgccaaacgcatgggagtgagcaaaacagtggcggaagtggaaaatatcgattacatcggtatggcggaaagcctggacatcggcacggtaatcaataaaaaaatgattgccgccagccacatctaccagatgatgctcgatgcagacgtttcgaatgtgaagtgcctgacctttgccaatgcggacgtagcagaattcacagtacccgaaaacgccaaaattaccaaaaacaaagtgaaagacctgggactgcccaaagggaccactatcggtggcctgatccgcaacggagaaggtatactggttacgggtgatacccttattcaggcaggtgaccacgtcgtcgtattctgcctcagcatgatgatcaagaagatagaaaagtactttaattgatggtatgataaactctaaaatgatatatcgcatcacaggtttcctcttactgatagagacaggcctgttactttgctgtgcaggtgtttcgctgatataccgcgaggatgacctgagcagtttcctgttgtcggcaggattgactactttagtcgccatccttctgctggctcttggcaaaggagccgaaaaacaacttaaccgccgagacggatatgtcattgtcagtgtagcatgggtcgtgttttccttatttggaatgctcccgttctacctcagccattatataccaagcataaccaatgccttcttcgaaacgatgtccggattcagcagtaccggagccaccattctcgacgatatcgaggcactgccccacggacttctcttctggcgaagcatgacacagtggataggcggattgggcattgtcttttttaccattgccgtactgcccattttcggtgtgagcggcgtacaactctttgccgccgaagccagcgggcctacctacgataaagtacatccccgtatcggtgtgacggccaaatggatatggactatctatgccgggctgacagccattgaagtgattcttttgttattcggaggcatgggactgttcgacagtatctgccactcgtttgccacgaccggtacaggaggttattctaccaagcaagacagcatagcctattacaattcaccttatatagaatatgtgataggtgtttttatgtttctctccggaatcaactttacgctacttctcctgctatttaccggtaaactgaagaaagtatctcaaaatgccgagttaaagtggtacgtgatgtcagtgattctctttaccgcattcattgcggcagtgctctaccgcaccaccccgatgggagccgaggaatctttccgcaaagccttttttcaagtagcttcgctgcatacttccaccggatttgtaacagccgactacatgcaatgggtaccggtactttggggtaccctgactgtcatcatgctgataggtgcctgtgccggaagcaccacaggaggtatgaaatgcatccgaatggtgattctggccaaagtgtcacgaaatgaatttaaacacatcgtacatccgaacgctgtacttccggtgcgggtgaacaaacaggtcatttctcctgccatcctgtcgacggtactggcattctcattcatctatgccgtcatcatcattgtcagtgtactgttgatgctggcaatgggcgtaggtttcacagaatctatcgggacggtgatttcaagtatcggaaatatgggaccgggattggggagctgcggtccggcctattcatgggacggactccctgatctggccaaatggttattgtcgttcctgatgttactgggacgtctggaactattcaccgtcttacttttattcagttctgacttttggaaaaggaattagaaacaagtagagaagcttcattgttgtatcatacaagataatatatagtagaggcgagtcagagatcggttgataatccctccaacttctgactcccttgatttattaaaaaaccttttttgtcacgtggagtttgcaaaagagataaaattaaattctatatttgcaaccgtttaagaaataggaatgaaacaaaacttaaaatattatataataatagtgcttgccgtgctgcttcattcggtaacgatgaaagcggcaaacacctcttatataatagaagatccggaccaggaagaatgtttcatttcgcaagctactcctgcaagccggaatatcctggaacgctttcatttctattgtaccattatgccctgtgaaatggggcatgcagatatttctcatgtaccaacggacaaaagttttatccgtcctgaaatgatctttcataaatacagaatgagaaataatcctttttctgtccattcaaatcactcacatacatacaatccgtctgatccactgacctactatgtctacggattaaggaaaatcatcatttaaagagtcacaagccacgagtagccatgctatcatgtaaactgtttcactgatagctgtcaatactctttcaatcagttgtcactcagaggtgtgtcaacttattgcttacttcagattattcaatctaaacatactattggattatgaattttacattgttagttgtcgttctgctgaccgcaattgcctttgtcggtgtggtgatagccctttcaaacgctatctcgccgcggtcgtataatgcacaaaagttcgaagcgtatgaatgtggtatccctacgcgcggtaaatcatggatgcagttccgtgtagggtactacctgtttgccattctgtttctgatgttcgatgtcgaaacagtatttctgtttccctgggccgtcatagcccgtgacctgggacctcagggattgattagtattctcttctttttagttgtgttggttctgggccttgcctatgcctggaagaaaggagcactggaatggaaataatgaaaaagcctaaaataaagtctatcccgtatgaagacttcatcgacaacgaatcgttggaaaagatggtcaaagaactcaatgaaggcggtgcaaacgtctttgtgggagtacttgacgatcttatcaactggggacgcagcaactcgctgtggccacttactttcgcaaccagctgttgcggtatcgaattcatggcactgggtgccgcgcgttacgacatggcccgcttcgggtttgaagtagcccgtgccagtccgcgccaagccgacatgatcatggtatgcggcaccattaccaacaaaatggctccggtactgaaacgtctgtatgatcagatggcagatcccaaatatgtaattgctgtaggaggatgtgcagtaagcggaggcccgtttcgcaaatcctatcatgtggtgaacggagtagacaagattctcccggtcgatgtatatattcccggatgccctccccgcccggaagcattttattacggtatgatgcaactgcaacggaaagtgaagatagagaaattcttcggaggagtaaaccggaaagagaaaaaacctgaagggaaatgaatctgctttaattagtaaaatatggaagaaataaaatacatagaacccgcagcactacacgacgaaatgctgcgtctgcgtaacgaaaaacagatggacttcctcgaaagcctaacgggtatggactggggagtggcagacgaaggtgacgcaccgaacgtaacccggggacttggagtagtctatcatctggaatcgaccgtaaccggcgaacgcatcgcgataaaaacatccacaaataaccgcgaaactccggaaataccttccgtcagtgacatttggaaagcggccgacttcaacgagcgtgaagttttcgactattacggcattgtattcatcggacatcccgacatgcgacgtctttatctgcgtaatgactgggtaggccatccgatgcgtaaagataacaacccggagaaagacaatccgctacgtatggacaatgaagagacgtatgatacgacccgggaaatagagctgaatccggacggaacgtatcaaactcaggagaatgtgatcttcgatgaccgtgaatacgtagtcaacatcgggccacagcacccggcaacccacggagtgatgcgcttccgcgtctcacttgaaggcgaaaccatcaaaaagctcgacgccaactgcggatatatacaccgtgggatcgagaagatgaacgaaagcctcacctatccgcagactttggcactgaccgaccggctcgattatctgggagcacaccagaaccgccatgcactttgcatgtgcatcgagaaagcaatgggtatcgaggtcagcgaacgcgtgaaatacatccgtaccatcatggacgaacttcagcgtatcgactctcacctcctattctactcctgtcttgccatggacctgggcgcattgacagccttcttttacggattccgtgaccgtgaaatgattctggatatgttcgaagaaacttgcggcggacgtttgataatgaactacaataccattggaggcgtacaggcagacctgcacccgaacttcatcccgagagtaaagaagttcatcccttacctgcgtggaatcatccacgaatatcacgacgtattcaccggcaatgtcattgcccggcaacgtctgaaaggtgtaggggtgctgagtcgcgaagatgccatttctttcggatgtaccggtggaacaggccgtgccagcggctgggcatgtgatgtacgcaaacgtatgccttacggcgtatacgataaggtggattttaaagaaatcgtttataccgaaggcgactcttttgcccgttacatggtgcgtatggacgaaatcatggagagcctgaacattatcgagcaattgattgacaatattccggaaggaccgatacaggagaaaatgaaacccatcatccgggtaccggaaggaagttactataccgccgttgaaggcagccgcggtgaattcggagtgttcctcgagagtcatggcgacaagacaccttaccgtttgcactaccgttcgacggggttgccactggtttcggctgtcgataccatctgccggggagctaagattgccgacctgatcgctatcggcggaacgctggattatgtggtaccggacatcgacagataaggaagccctgacggctcttatcctaaatccggatcactccaatcgtaaatagtaaatcgtctaatcgtaaatatagtatatgtttgactttagtataataacaagttggatacaccagacattaacctccgtcatgccggagggattggctgtattcatagaatgtgtcgttatcggggtgtgcattgtggctttgtacgccatacttgccattctccttatttatatggaacgcaaggtgtgcggtttcttccagtgccgactgggtccgaaccgcgtaggaaagtggggaagcatccaggtgctctgcgatgtgctcaagatgctgaccaaagagatcatcgaactgaagcattcggacaaattcctttataacctggctccgttcatggtgattatcgcctcatttctcaccttttcgtgcctgcctatcagtaaagggctggaagtgctggacttcaacgtaggtgtcttcttcctgttggcagcttcgagcataggcgtagtgggtatcctgctggccggctggggttcgaacaataagttctcactgatcggtgctatgcgaagcggtgcacaaatcatcagttatgaattgtctgtcggacttagtattctcacaatggtggtcctgatgggtaccatgcagttttctgagattgtggaaagtcaggctaacggatggtttatcttcaaaggacacatcccggccctgatcgctttcgttatctatctgatagccggcaacgcagaatgtaaccgtggtccgttcgaccttcccgaagcggaaagtgaactgacggcaggataccataccgagtattcgggtatgcacttcggcttcttttatctggccgaatatctgaatatgttcatcgtagctgccgtagccgccaccatcttcctgggaggctggatgccgctgcacattgtcgggctggacggattcaatgcagtgatggattatattccgggattcatctggtttttcggaaaggcattcttcgtagtgttcctgctgatgtggatcaaatggactttcccgcgtctgcgtattgaccagatactaaacctggaatggaaatatttggtacctatttcaatggtcaatctggtaatcatggtattaatcgtagtcttcggactgcacttctaacccggagggctgaaagatgaaaaatgaagaatatacatatctaggcggcctgatgcaaggcatcggctccctgctgacgggtatgaaaaccaccatcaaggtatattttcgaaagaaagtgaccgaacaatacccggagaaccgcgccgaactcaaaatgttcgaccgctttcgcggtacattgaacatgcctcacaacgaaaacaatgagcaccgttgtgtagcctgtgggttgtgtcagatggcatgtcccaatgataccattaaagtgaccagcgaaaccattgaaaccgaagagggcaaaaagaagaaaatactggcaaagtatgaatacgaccttggttcgtgtatcttctgccagctctgtgtcaacgcttgcccacacgacgcaatcaccttcgaccaggtatttgagcatgccgtattcgaccggaccaaacttgtcctgcaactcaaccgcgaaggaagtaaagtaatcgaaaagaaaaaagaataaaagaatatgggacttacacttgaaacagtagtattctactttctggcagtgttcatcattgccatgtccatactgacagtgaccacgcagcgtatcgtgcgttcggccacttacctgctgttcgtgcttttcggcacagcaggtatctactttctgttaggatacactttcctcggatcggtacagatcatggtctatgccggaggtatcgtggtgctctatgtattctccatcctgctgacgagtggagaaggcgaccgggccgctcacctgaaacggagtaaattcctggcagggcttgtcactacgattataggtgcaatcctggtgctcttcattacactgacacacaaatttgtgccgacaagcgatccggaacctgtagaaatcagtatcaagaccatcggacatgctttgttaagcagtggtaaatatggatatgtattgccttttgaagcagtcagcattctgttgctggcctgtatcgtgggcggattattaattgcacgtaaaagataggacgatatgatgatacacatggaatattacctggtggtttctaccatcatgatgtttgcgggaatatacgggttcttcacccgccgcaacacacttgctatcctcatctctgtagaactgatgctgaatgctacagatatcaactttgccgtatttaaccgtttcctttttcccggagagctcgaagggtatttctttgccctgttctccattgccatctcggcagcggaaacggctatcgctatcgccatcatgattaatatttaccggaatatacgtagtattcaggtaaagaatctggatgaattaaagtggtaaatacgtcattatgatcatagaaataataactaaattatggaatatacaattctgatccttcttctccccttcctctccttcctggcattagggataggaggcaagtggatgagccaccgaacagcgggcaccataggcacgctggtattggcagcagtgacagtactctcgtacgtcacggccgtacattacttctcggcaccccgtctggcagacggaacgtttgccacactcattccttataactttgaatggcttccgttcacggaaacactaacgttcaacctgggcattttgctcgaccccatctcggtgatgatgctgattgtaatttctacagtcagcctgatggtacatatctactctttcggctatatgaaaggcgaacggggattccagcgctactacgcattcttatccttattcaccatgtctatgctcggactggtagtggcaaccaacattttccagatgtacttattctgggagttggtaggtgtatcttcttacctcctgatcggtttctactatacccgtccggctgctattgccgccagtaaaaaagcattcatcgtgactcgctttgccgacctgggcttcctgatcggtatcctgatatacggatactacggaggtactttcggatttactcccgacacagtttcaatgttgagcggtggcgccggtatgttacctctggcactcgggctgatgtttgtcggcggtgccggcaagagtgccatgttcccgttgcatatctggttaccggacgccatggaaggtccgactcccgtcagtgcactgattcatgccgccaccatggtagtagccggcgtttacctggtggcacgcatgttcccgcttttcatcgaatatgctccggacgtactccacctgattggttgggtaggtgctttcaccgctttttatgctgccagcgtggcttgcgtacagagtgacatcaagcgtgtacttgctttctcgaccatctcacaaatcggatttatgatcgtggcactgggtgtttgtacctcttccgatccgcatcacggagggttgggatacatggccggcatgttccaccttttcacacacgccatgttcaaggccttgctcttcctgggtgcaggcagcattatccatgccgttcactccaacgagatgtcggctatgggaggattacgcaaatacatgccgatcacgcatatcaccttcctgatagcttgtctcgccattgcaggtattcctccgttctcgggtttcttctccaaagatgaaattctggcagcttgcttccagtatagcccgacgatgggttgggtgatgaccgtcatcgcagctatgaccgccttttatatgttccgtctctactacggcatcttctggggtggcacagcaccggggcaaaagtcgacaagcgatggtacaagccacgtacatactccccacgaatctcccctgaccatgactgttccgttaatcttcctggccgccgtcacttgcgtggccggtttcattcctttcggacatttcatcagctccaacggtgaatcgtataccatccatcttgagacatcagtagccgtcacaagtgtagtgattgctgtggcgtccatcgtcctggccacttgcatgtacctgcgtcagcagcaacctctggcagataaacttgccaaacgttttgccggactgcaccgtgcagcctatcatcgtttctacatcgacgaggtgtatcagttcatcacacaccggattatcttccgttgcatctctacaccgatcgcctggttcgaccgccacgtggtagacggattcttcaacttcatagcctggggtacccatgctacaagcgatgagatacggggattgcaaagcggacgtgtacagcaatacgcttatgtattcctgctcggagcgctgatacttatcttaatattaatcttataaagcacaaaagatatgaactttttatccttattcgtactcattcctctgctgatgcttggcgggttataccttgccaaaagcattaaggccatccgcggagtgatggtagcgggaagtacggcgttgctgatcctgagtgttgtgctgacgttcctttatttgggcgagcgccaggcaggagctacagccgagatgttgttccgtgccgatacggtatggtatgcaccgcttcacatagcctactcggtgggagtagacggaatatcggtagcgatgctgctgcttagcgctgtcatcgtgttcaccggcacctttgcctcctggaagttgcagccgctgacaaaagaatatttcctgtggttcaccctcctgtcgatgggagtattcggtttctttatctccatcgacttattcaccatgttcatgttctacgaaatcgcattgataccgatgtacttactcatcggtgtatggggttcgggacgcaaagaatatgcagccatgaagctgaccctgatgctaatgggtggttcggcattcttgctgatcggtattctgggtatcttcttcggtgccggcggaacaaccatgaacattcttgaaatagctcaactgcataacattccgtttgcgcagcaatgcatctggtttccgctcactttcctgggattcggtgtgctgggagcactctttcccttccatacctggagtcctgacggtcatgcctcggcaccgactgctgtctctatgctgcatgccggcgtattgatgaagctcggaggctacggttgtttccgcatcgccatgtacctgatgccggaagctgcaaacgaactgggctggatcttcctgatcctgacaggtatctccgttgtatacggtgctttcagtgcttgcgtacagacagacctgaagtacatcaacgcatactcttccgtaagccactgcggccttgtgctcttcgctatcctgatgatgaaccagacagcagctaccggagcggtgcttcagatgctcagccacggattaatgacagctctgttcttcgccctcatcggtatgatatacggacgtacccatacccgtgacgtacgcgagctgaacggactgatgaaagtgatgccgtttctcagtgtctgctatgtgattgccggacttgccaacctgggtcttccgggacttagcggcttcgtagccgagatgactatcttcgtcggttcattccagaacttcgatgtattccatcgtacactgaccatcatcgcttgctcgtccatcgtgatcacggcagtctatatcctccgactggtaggtaagattctatatggaacgtgtaccaacaaacatcatctggcactgacggatgcaacctgggacgagcgctttgccgtcatctgtctcatcatttgtgtcgccggactgggtatggctcctttctgggtcagccacatgattggcgagagtgtattgcccgttgtttcacacttaataccctaaaagaagatggattattcacaatttctatatatgaaagaggagctgtcactgatagcagttatcctcatcctgtttgttgtcgacctgttgacctgtccggaccaaaaaggtgccactcctaaggtgaacgtcaggtcgctcaccttgccggctgtgatcctgatgaccctccacaccgtaatcaacctctttcccggaactccggcagaggctttcggcggaatgtatcagtacacaccgatgcaaaccatcatcaaggcagtgctcaacgtaggtaccatcatcgtgctactgatggcccatgaatggttgaaacgcgaagacacccgcatcaagcagggagagttctatgtactgacactctctaccctgctgggtatgtactttatgatttctgcgggacatttcctgatgttcttcatcggattggaaatggcaagtatcccgatggccgcactggtggcattcgataaatatcgtcatcactccgcagaagcaggtgccaagtacatcctgaccgcactgttctcaagtgcattgctgctattcggtctttcaatgatatacggtacgtccggtacgctctatttcaatgacctccccggacacatcacaggcaatatgcttcagattatggcattcgtgttcttttttgccggcatgggattcaaaatctcattggttcctttccacctctggacagccgacgtatacgaaggagcgcctacagccgtaacctcttatttaagtgtgatttccaaaggatcggcagctttcgtgctgatgaccatcctgatgaaagtgttcgcaccgatggtggcacaatggcaggaagtgttgttctgggtaaccattgcttccatcaccattgccaacctctttgctatccgccaacagaacctgaaacgtttcatggcattctccgctatctcccaagcgggatacatcatgctgggtgtcatcggaggcagtgaaatgggaatgactgccctggtttattatgtactggtttatctggcagcaaacttaggcgtatttgcagtcatctcaattgtggaacaacgtagcaacaaagtggagatagacgactataacggactgtacaagaccaatcccaaactggcttttatcatgacccttgccctgttctcactggccggtatccctccgtttgcgggtttcttctcaaagttcttcattttcatggctgcattcaacagcggattccatctattggtattcattgccctgatcaatacagtcgtatcgctttactactacttgctgattgtaaaggccatgtatatcaatcccaatgaagaaccgatccccactttccgcagtgataactacaccaaagtgagtctcgtactttgtactttgggtatcatagctctgggtattgcaagttgcatctatcagggaattgacaagttctcattcggaatgggaatgtaaaaacggtaaacgatcagctataaacaacaaacggtgaacaggcatacaatatagtatgtgttgttcaccgtttgttgtttatagccggaccgtctatcaatcgttaacgattgactgttcgctgttaatatagggaatggtgaaccagaaacgggaccctttcccttcttccgagtccactcctatgacgccgcccagctgctccacaatacttttacagatggagagtccgagcccggttccgtgaataaagctgttcagcttcacaaagcgttcaaagatatgcgtcagttgctctttagagattccgattcccgtgtcgcttacataaaactccacaccctcttccttcttttcatatcccacattgatgctgcccgaggaggtaaacttcagggcattgttcacgaaattggagatgacctgatgcaaccggttccgatcacttatcacagtgcaatccgaaggatgcggatcgaatactaattcaactccctggggaacctttatctgagagctgcgaacgatatcttcacaaagcatattcacatccgtctccccgtaggtgaactcaaacgtaccggcctcaatcttcgataagtccagaatgtccgagatcagctgcagcagcaagtcattattctcttgtacgatcttgatgtattcgcagcgttcctccatgtcttccgtatcgaccaagaggcccgagaaaccgacaatcgcattgagtggtgtacgtatctcgtgactcatattcgccaggaaagcgctcttcagccgatccatggtttccgctttctctttcgcctcgataagcatggcttccgtctccttcagttccgtaatatcataattaatgccgataatctccacctccccatgctccggttcaaacttggtcaccaccacattcatccgtacccagttccactcgttggtagcgccgggtttcaggatacgcatttcgctacggaagtccttctcttcacccgccaataccttctcgtaaaagtcaaagaccttctgccggtcttcaggatgcatcttatcataaacgcccacaacggatgaaagcggaatatcctccgtctcacccatattcttaaaccactgtttgatggcatagccacgtttactcagcaggttcagtttggcataacctacttttgcatagtccgatatcaaaaggaagaagttctcaaaatcacggatacggttaatggcatcgatacgctccgtattatcgatgttgatcagcacatagccgttgaagttcccttggctgtcaaagagtttactgacctttgtatacagcttgattatattacttttatcggaatggtagtaatcggaagccttattaaaagagtagttcagtctgaaatcgaccaggtcttcgttccgtacccgttctctgatttcaagaggcacattcggattctcaaagaagttgactcccattacatcggctttatcttttacaccaaaggtttccatatcccagttgttcaagtcgagcaaattgccatccttatcgtaaatctccactcccgcgggaatattggcaaagatattcttgaaaagcttctcactgcgatctaaagccctatgggcacgaatcgtctcggtagagtccagaaacagagcgaccacctcgtccttttccggagaatacacgatgcaatgggaactgcgctgggtgcgatggaagtagacatcagtctctttgtgcacactgccctccatcacatcgagaagataatccaccttggccttaaagtccgcatgcaactcgctggcaaggcatcccacgtaatcggaaagagacattcctatgagttccgaactcaaatcattagcatcggctatccggtaatcacaaggtagtccggcagcatcccggaccatagtcatacgtatataccccatcggcatgaagcggaacagattacgcaaaaaagaacgttcgcgcacagcttcgtctttcgctttacgcagctcgatacagatgctgataatattggcaagagacgataaccattggaagtcttcattattccagttgcgataattcttcaccagatcgatccccatatacccccatacatgttcgccggctatcagcggagtgatcatcagtgacttgatgttctggcggctcaggatcgcatattccgcttttgcatgtttcggaagctggtccaatgaatccagtatcaccggtttacccgacagggtctgctgcctccaccaaggtaaactgtcagtcgggatacgttgcaggctatcgatctccggcaacactccttcggccaccacctcgtaggtacagtcctgatagcggtaatattcatcatattcaaagatatacacgcgtcccccatgaaaaagatcgaggatatccttcaatatctccatgatacagaggtccacactatcatctttgagaaagcgtaagagtgaatgggaaatggagttctgcctgtacagcaagtcgttgacacgctccagaacccgctcggaagtatcattgggagcttctacccgctacatgataccgaatgaaacgactcccctgcccggtatttcttcacgctcccccaaacgggtgtgcaaccacacgattccctctttggagtgaatggggaaagtctgttcataaaactccctatggatggaagcattgaactcccggactatctgttcctgataatcctcacgcacccgtttcctgaagtccgtaaaagatatggtatttccttcaagtcccaataaatcgcagaggtattctgagcatacataatgcccggctgtgaaatcagcttcccaccatccgagttgcgccatggacgccatttgccgaaatcgttcaatatcgttatccataaaagtagtttacaggagtatatgtttgtttgctgttagtacgcaaatttaggaaattatccattcacaccaagagaatggattaaatatttgtggcaagcagacgctgagagcagcactgcaaaaagggtacacaggaatgtaacacagatgttaacgaatcgtatagggcatgtatcacccccgtaacctgaatcgtgcaactttgcaccgacagaaaaacgtagataaaaagacatgaaacaacaaatcgggagacttctctccactcttcttctcgcaacattttccttaggaatcacagcaggggtcatccagggaaccatcattgataaacagaccaaagaacccctgaccggagctaccgtacagattgccggaaccacgaccggaaccgtagccgatgtagaaggtaactacacactgacgctaagcaacggcacctataccattgaagtgaaatatataggatataaaacactccggatgaatgaagtgaaagtgaaagccaatgcgacactgaactttgaactggaagtagacgcacaaacgctggacgccgtcaccgtagtggcccggaaaaacctggaaggcgaaaaggctttactgcaagagagacagaaagcaacgcttgccatcgaaaacatgggagccaaagagatgaccctgaaaggtatatcgaacgtacaggacggagtcaagaaaataaccggtatctccattgcaagcgccggacagctgatagtacgcggactgggtgaccggtacagcacgaccactctgaacggtttgcccatcgcctcgcccaacccggacaacaagctgattccgctcgacctcttcccggcctctaccgtaaagaacatcaccgtcagtaaagtatatgccgccggagcctttgccgactattcgggcgcacatatcgacatcagcaccaaggagaacacgggaagtgactttttctccatcggcttcaacgtaggcggacgcttcaacactgtcggaaaagatttctattatagcgaccggaaaggcggactcttcagtacgggaaacctcaggaataaagaccggattctggctatgggtaaaagcgagttccgcgattacgcccgcaacaatgacccgttcggcacaaacttcgctatcagcaagcaccgttcactacccgaattcggtggtaacctgggaggaggcaagagctggacactccccaacggaaaccgtctgagcgtgcttgcctcggtaggtgtcagcaacgaaaaccaaatcttgaaagacgcctacgtgaccactatgaccgctcagggcacacacctcgacaagttcaattatgacagttattccagcgcactgaaaatagccggattgggcaacatcggctactcgttccggcaggcggaccacatcaacttcaccgtgttctatgcacgcaatgccatcaacgattatatgtcccgcgaggggatcgatgccgaaaagaacaacatcacatcgagcaacagcgttttccatgcctactcactactgaacaaccagttgctgggacaccacgaactgacttctcagtgggatgtaaactggagcgcttcgtacggactgaccaacagtgacgaaccggatcgccggcaggtggtcttcttccgtaacgaaggcagcgataagctgaacctctttaaactcaaccagactaccaaccgctacttcggagaactgcaagagagagagattgtaggagatctgcgcacctcgtacaaatggggagatgcgaacctgattcgtgtgggaggtacttacaaaagcaaaaaacgcgactttgaaagcgtgaacttctactacgatatcaatgccttgaacgctgacgtcaccaacatttatgataccaacggatatctgaatcaggaaaacatagccaacgggacgataaaagccaacatcgatgcacagccccgttacaactactacgccggaatggatgtgtgggcagggtttgcagaaatagagtactacccgatggaatctctgctggtcaacgtgggactgcgctacgagcaggccaaacaatgggtacgctattggacggacggcggacaagagaagaaaacgaacctggacaaaggcgacttcttcccggcactgaacctgaagtacagcctgaacgaaaccaacagcctgcgcctctccgtatcacgcactgtcacccgcccttcatttatcgaaatggctccgttcctctaccaggaatcttacggaagtgcctatatccgcggtaacaacgaactgaagaacgcttataattataacatcgacctgcgctatgatttctttccgaaacgcaacaacggggacatgttctctgtcacgggttatttcaaaaaactgaaatcgccgattgaacagactcaggagtcttcgggcggcacagtgatccgctctttccgcaacgccgaagacggaatagccacaggagtggaaatagaattccgcaaagaactgttcaagaacttccgtatcggagccaatggttcatacatgtacacaaacgtcgtattgcccgaaggcggggtatataccgactcggaacgcgctctgcaaggagcctctccgttcctgatcaatgcagatctcagctacactcctcaactgagaggagaaagcgacctgacactggcactggtttacaatgtgcaaggcccgcgcatcgagacagtaggtatctacggaacaggtaacatcaagcaacagactctgcacacgatggacttcatagcaagctatgccatcaacaaacacctgagcctgcgcctgcagatgaaagacttgttgaacagtaccatccgcttcaagcaggagctgccggcaacgggacaaaaggtggaagtagaatcattccgtccgggaacccatgcagaaataggagtctcgtacagattctaaggctcgccacagggtcacacagaatatttatatgaataatcaaacagatagtataaacctaaaacagtatgaatatgaaaacgaattatctaaaactcaactcttgggccgtagcagccctgatgggaatgtgttcacttgcagcttgtagtgacgacaacagcggcgaaggcggcggaaacggcgacagcgaagaggtgatcgccaacaacggaacactgaaaggaagcgtagacgggtcgaaaaccgtcatcctgaccaaaggctacaacttctccctcgacggagaatatatcgtcaaagccggttctaccctgaagatcggtgaaggtgtgacaatcagcgccaaaagcgatgatgccaccatcgactacatcctcgtggaacagggagccaagatcgaagcggtaggtactgcctccgcaccgattgtcatgactgccgataccaaagaaccgggagcatggggcggcatccacatttgcggcaaagccccgatcaacatcggatcgaccggtaaatcggaagtcggagatgccgcttacggtggttccgatccggcggacaactcgggtatcctgaagtacattcgcctggaatacgccggatacaagttcactacggaaaaggagtgtaacggcttcaccttctatggtgtaggaaacggtacgaccctcgaatacctcgaagcatacaaaggtaccgacgacggcttcgaatggttcggaggtacggtcaatgccaaatatctggtatcggtgagcaacagcgacgattcattcgactggacagagggatggagcggaaaagggcaattctttgtcgcctaccaggaagatcccgccactttgggatatacatgcgattgcctgatcgaggccgacaactatgacaagaatatggatgccgctccgatctcatgcccgacactggccaacctgacactgataggcgccaacaacgacgaaggcaaaagaggcatccgcctgcgtgccggaactcaggccaagatctacaatgcactcgttacaggcaaggccaataacctgactaccgaaacagaacagaccgagaaattcctgatcgacggtccttcggtactgaactacatcgctatcgcgggagatatcaaggcaagcggtgacggcggttactcttctgccctgttcacagccgaaggcaatcacaatgccatcaaccagactttgagcttcagcaatatctttatcggaacacaggacggaggagccgacctgtcagcagacagcttctttgaaaaagcggcttataaaggtgcagtgaaagcagacaatgaatggaccaaaggttggaccaagttataaatcacgtatacactcacagaatgaagcaccggacagtcctgctggcccggtgctttacctgtttttcaaactatggacagatacagactaaagattatcgcattgacagcactggtgtgcctgaccggcagcagctgtacggacgacgagaacaacggacagggcaataacattatttatggtgagaatatcatcggaaacggagaacagaccttcgagataaaagatcatcaatacctgaaacggggcacttacctgatgaagggatggtgttacgtcacttacggttcgacgctgaccattgaagcgggcaccgttatcaaaggagacaaggaaacccgcgccgccctgattgtagaaccgggcgggaaactgattgccaggggaacggtagatgctcccatcgtattcacctccgaaatgcccgccgggaaacggaaaccgggtgactggggaggattgattttatgtggttatgcccggaacaatgaagacatcatgcagatagagggaggcccgcgtaccatgcacggaggtccgaacaacgcggataattcgggcgtcctgagctacgtccgtgtagagtttgcgggatatccgttcaagaaaaaccaggagatcaatggcatcaccttcggttcggtaggaaacggcacgcaaatagaccacctgcaagtatcgtatgccaacgacgatgccttcgaatggttcggcggaacggttcatgcggaatatctggtggcctatcactgctgggacgacgatttcgacatagacaacggctatagcggcacatgccggcatctgctgggcatccgccatccgcgaatagcggacatcacaggttctcatgccttcgaatgcagcaataatggcacgaacactcctgcgacacctaccacagccgccacctttgaagatgtcacgatctatggccctgcctcaggggatgcctcgttcgtaaatcatcccgactttatcaatggcggcggcctccggcctgagaatgaaagcatgctcgggctattcggcgcggcactgtatatgggcaacaacacatcggtgactttccggaactgccggatcagcggatatccgtcggacatggagggcacaccggcctcagcggataacgtagtattcagcgaaagggaagaaaccggttatccggagtggacccaaggatggtgcaacttcaacccgcaagagacagagtattgaattcaccacagagtcttattcattgccgcttaacagagcggttttgacattctgtccaaatgatatttcaatcctctcagattgctttctttcggcccgagggaaaggcactctgcgaaaaacgcctcctatggcaatcgggtatgattgctttcgtaggccaaacaagccaaagacaaacaaaaccgcattactttccagaggacaggcaaccgatagacagtgatacccctctaaacacaactttttatcacttccgctttgttcatctcagagtagtaaccggaaagattccgtccacttttgagcctccgatcggaaacaatagaagtaatccggaaaaacattaggagatatttcgaaaagaagtaagcattttcgggaaacgcttacttctttcggagcaaatgcttgcttcttttctccgaaactccggcctattctcatcaaatcccggctttcggagccccggaccttggctttcctgagcagaaagtccttttgtcgggcttttcttctcccagacggacctgaaaaaagaaatgcgctatttgtcaaacagcgcatttcatatctttttgaaagaagaatcgaatataatctatcagaatgattcataagaggagttactgttagcgacgatcgctatacactccatctcgatcagccaggcaggccggcatacagcagcaacaacaaactgtatcggtgtatcaggaaagcgtttggcaaacaaagcgcgcacaaccggataatccgaagcgtcccgcagataaacaatcatctgcgccacatcctcaaaaccggctttgccctcttcgagcaacttctctacattttcccacatccgccgggtctgttcccggacatcacctacatgaaccacttcaccgcgatgatcgatactcgccgtaccgctgataaagagatgacgacggtcgccatactccacggaagttccccgttcgaaagtcactccatacaaggctgtcgggctgagatgagacagcgcatgcaggtaagtcacctgtcccggctgcaatccttttaccgcataggcatcaaacagcacatgtatcttcggatcggcatgccgtccctctatgccggtactggctatataatgggtcgattcggtcagtccctgccccagaaagttttcacggcgtgccttgacaatgccggcataattcacatccacgttctgcacaaagatccaggtacggatgcaatcggaagccagcgtacagccttttcctaccagatcggcttcataagatttcaacaaggttttcatctgccgctccgatttgccgcaagacacacccgcaccggctgtccagtaatgcttgtaagcggcattcggttcggaggtcagatagacccacaaagcaatcttacttccatccaacgggggctgttgcacgacagagacagcgcacgacggctctttctgcaagacagcctgcaaagcctcccactgattggcggcatcactcaggaagtaacggcaaaacacgggtaccattccccttattttcaccttcctgctcagtatcctatggtatgctttacgaatggccgtcagctgctcttcataactccccgcttccggatcgacatgaaacatcaaatgcgcctctctcgttcctccctcacccccaaaaagggaatattcaacagtagtccttaaatactctattctatgttttctgtattccatattcttactcatcttttatttcactttaactcgctccttcgacatcagccctttggccatctcccgcttgtcccattgcaccggagcagacacaaactcgggaacattatacgaatagatcaactgatcgtagaacgtatacggatcttgctgaggcagcaggaaaggtttccctatacgcccctgtccgtccaccgaggagatataaaggcgggtgtacaacccgtcacctctccggctgctgaacacaaaccaatgtgaattgctgctccagttgtgatagctttccgtgtcgtcactgttcacttcctccaagttgcgataggttccggtcttcaagtccagcagccagagatcggcctctttgtgccagatggagaagttcccataatcggaaagcgtgaacatcaggtattttccgtcgaacgaaggtttggggaaagagatacttttgtccagcgtgcgggctgagatcaacgtatcgatccggtcgccgaacgttccgtcttcgggatggaaagcaatgctgcacaagttgtatttcacgtctttgtatcggacaggcatctctttctgctcggccgaacagaaataaagcgtccgtccgtcgggcgagaatgccggaaaagtttcaaacgaagccgtactcagcaaaggagtagtcagtatccgatgggaccggggatgataaaccaccacatccgaagcctggtcgaatacctctatcggcttctttcctcccagatgaaaggcctgattggttttgttcaccgaataagcgatgtattcgcccgaaggatgccagtacggatagacacaggccgacaattgcccgtcggctttggtatcgagaaattccaaccgatctcctgtgtcgattacagtggctccatgcccgcctcttacatgtacgctcgacggtgtgggctccgtccggttgaaagcatggcaattgatgcaggcggccgtcacctgcgtattctcaaataaaggagtctggcggaatgttgaaagttcacgttcgtagatccccatcttgctgtacacttcatatccgggtgcgagcaaacggtataccaacccgtaatcgatcgggaaaggactgacatatatcggaaacggacgatactctttccacttcttcccctggcggacagagactttcacctcgatgctgtctcccttattactttcaagaagttcgtgccattgcttggcgggaatgtctaccgatcttccattcagccgtacaggctttcctttcgtaccggcaatcacgacatcaaccgcctctaccccatcgtccgtcacccggaagttaagcggggcaatggtagagggaatggtaaccccgacataatcgggaaatatcgatggcaatgtatccaccctggcaggggatgtcaccttctcttgacaagctgcaaacaagaagagcagccctatcatgctaaaacagtattttatcttttccatcttatctaaagtctgcataaaaccaatatgtatctccgaatcgggcagacaatgcatctgccgaacgggcagatgtgaaaatctgtgcgtattctctcaatctattctctgtctgcgggtctatcttccagggaattgtatctgttgcagtgtgtttgctcataagccaatagaacaacaacgcttcctgatagcccttgggaacggaagaatatcccagatcggctcccaaaggataataatgcacaaaacgtcccacatccttcttcaagagtgtacaagccatcaaatactcatacgccatccggttgcggggatttgcatgaagcaggaactccaatgtcatctccggcaggtcagggttaaagaagaaatcggttcgcggagtaagcctcctcaatctcccgtattccggatgtgcattgacccggtcttcatcattcaggcaagccagagtttcagtagcccaatctttataaaagagggtatgctgcaagatacgcagatacttccgggccacttcgtacctgccattaatcaaattggtctcagcaagccttttaaaacaacgcacactcttccggtaatccggaacggcctccatagcctcgaagacaaactgctgcgccacattgaccaatcccaggtaataataaggttcaccggctaccaaaggaatggtgaagtcgttgacaaatgacatcagtagtccttccttcccccgctggtaaaaactaaacatacgttccggcagctgccctttcattgctaaagccaaattgagacaagaaaccgacatcggtgtatcgggtgctttcttttccgccatcgcaatcacttcatcccattcttgcatgcgcacatgataatcataccccatcacttcctctttattcaacccgataccgtatttgccatacagattcaaaacaaacaacatcaggataaattgcagaacccatgctcccgagtagtatctccaagtcatcttctcgggcaaacgagctaccaataacggtaccagaatcacagccagccaggctatcacctgcatttgtggaaagactaatggaaaacgataacttccgatcgcccacaacaggcggtcggccggatatggaaatacagcccaggatatccaataggttactccggcaattcccaatgtacctcccaccagaatccaccaaggcagacgcctaccggcaaaccggcaaaactcagttatccatatcaatggaatgaaaagccatgcacatcctcccgccagcagataaagcagcggaatgccgactccccaataaatcaggcgtatccgcctattctcaataaatgtatatccgatgagtgctcccagcaccattcccacagagatggctccggaaagaagaaaattttcgtcgcagaacagaataaagaaacataaagaaggtagcagagtaagcggataccatgccgggtgtccgcccaggcggtttgcaatccaaaccatcaacctgtgaataccccctattgcaccggtcaagatagcggctcccgcccacgaataataatagaattgggtgagaaagcctcccagatagtccgccattcccccgggatgggatacttgttcgacaaaatagtcggatgtaaagagaaacatctggaactgttcctgataatgcagatggtaggagtagtatactccgaagaaaatgaagacacctgctcccaataagatggacaaaagcaggtttattcttttgacgtgcttgtttttcatattcggtaaattgtgcccaaaagtacaaaaagtttggaaaacaatctaacgaaacaggaaacaatacagttattcgcccaacagctcgatgcacatacgtccgttatgataaggacatttccagaagccggccttatcatcatcccggttcaggttaccgtcggcacgaaggctccagaaccattcgccatgcacatcgtcagtcaaatgccgtttaataaactcccagcagtcgatggaatgttgcaaagcccctcgatcaccgaaatatcggaacaggttatagtatccgactacggtttcggcttgtacccaccaatggtagtcgccgtcgatgtgtccggtagtgagattcttttcatatatcattcctccgtcggaagtaagtccttcggatgcagccgcagctatcttctttacaacaggttctatctccgcaatgagtccggcgtctcccaatacccgggcggcttcatgcaacaaccatgaggcttcgatatcatgtccataagagacgaccgggtatttgctttgccagtcgttatcgaaaaagagttgtaaatgggatgtgtccttatccagtatcttctctgtaaaaagtcctatcaggttgtagagctgacgttccagccgtgcatctttccagacccggtacaggttggtgtaaggttcgaggatatgcagatgggtattcatggtcttgcgttcattcgcatctttctcgctgaggcgcatatcggctatttcgttccattcacgggtaagcgcttcacaataaccgttcttcagcccatcaaagctgtgggactctatatcattgaataaacggacggcatacatcaatgcttccggatctccggtagcccgatggaactcgctcagtccgtaaatggcaaagccgatggcataaatctgtttcttggtatccagcggctcacctctatagttgagtgaccagtagacccctccgaactcggaatcataaaagtggtcgataaggtatcgtttggcacggtttgccatctctttgtactcctctctacccagcagacgataggcagcagaataggtccataaaatacgcgcattcagaatagcccctttatcggcccggggcattaattcctcctgtccggtgatgcgtccgtaaaatccaccgttctcctgatctaccatccgttccatccagtaaggaagaatacgggtagtaagctctttctgcatttcttgtttaagaatctcgtccatatgatgtctgaattatgattgaatagcctttcttctcttctccaactctgaagtcacctctctcatctttttctccgacagcggatacatactgatgaaaacgacggacagaactgttccgacagcgggcaaccagctgagaaacatcttaatcccatgaatagcctctacactctgcacttcgttggcacgaaagccgaagtaagccaacaaccaaccggtcagtgcacttccgatagcccaaccgaacttctggctcatggacgaagacgaaaagatcagacctgtagcccggttgccggtcttcagttccgaatagtcagcacagtcggcgtacatggaccagagcaaagggaaaatacttccggcacagatactgatcagcacctgaaaaacaaaaatcagggtgatgtctcctttcccaaaccaataaaagataacggaaaggagagtagccagactcatggctcccatgtatgtgttttttttgccaatacggttactgaccggagctgcaagaatcactcccacaatattggcagcctgtcccactgccagataaaggccgctcagcacaaaagaaacgccaaagaaggaaaccgtggagtaatcctcttccacaacaaagtacttgaagtaataaaccgtagctccgtcacgaatagaattgaataccaaagctgccactccggctccgagcagaatccaccacggacggttgtgaagcaaatctttcaaatcgtctttcagggagttttgtacttccctgatcggttttacccgttcacgtgtcaaggcgaaacaaagataaaacagagccgcacacatcacagcaatcaccaccacactcaacatccatccccgttgctcgtcttctgcaccaccaaacaggttgaccatcggcatgaagagcagcaaagcaataaaactgccgatataggcaaaagtcatacggtaagtggacagggtattccgttctttcgggtcaggactcatcactcccagcagtgaagcataaggcacattgatagccgaatataccatcatcatcaaagaataggtgatgtaggcatagaccagttttccggtatcattcaactccggagtggtgaaagtaaaaataccaatcagtgcaaaaggaacggcaagatacagcagataaggacgaaatttcccccagcgggtctgtgtgcgatcggcaatcactcccacgatcggatcgaaagccgaatcccatacccgggtaatcagaaacatggttcctaccacggcagcaggcaagccgaatacatcggtataaaaaatcatcagataggacccgaacagtttccagaacatggacgaagccatatcgcccagtccgtaaccgatcttctctttcagtgtaatcatggcagtcattctattcttggttttcttatttcatcaatctcagatttcgttcaatcaggtttttcagtatctctaccgaagctgaggaagaaaagccgtcctgaggagtgtgcaggcagtaatccaccaaccgttcgatagttgaggtagctacatgcatacgggtgtccgacgaagcatagtagataaatacttttccgtcatcgtcggctatccaaccattcgaaaaaagcacattcgacacatccccaatgcgctcttctcctaccggagccataaagtaccccgccggagaagctatcagccgggtgggatcatccaacgatgtcatatacatatacaatacatacctgagcccggcagcacaattgcgtactccgtgtgccagatgaagccatccctgaggagtcttgataggatgcggcccttcaccgttcttcacctccttgatggtatgataatatcgtttgtcgatgatcttctcttctccaacctcggcatgggttatatcgtcaatcaatgcccatccgataccacctccgctaccggtatcgataaatccgtcttgcggacgggtataaagtgcatactttccatccacaaactcggggtgcagcaccacattacgttgctgactctttgttttcagatccggcagacgttcccaatttttcaggtctttggtacgggcaatgccggcagtggctgtagctgacgataaatcacctatgggagcattgtcatcgtgccgttcggcacaaaagatgccatatatccacccatcttcatgggcagtgagacgcatatcgtatacattggttgcaggaaccacatcttcgggtaaggtcaccggatactcccagaagcggaaattatcaataccgttcgggctttcggcaacagcaaaaaaagatttgcggtctgctccctccactctcaccaacatcaggtacttcccatcccacttaatggctccggcattcaacgtcgcattcataccgatacgttccatcaaaaaaggattcgtctcctcgttcaggtcgtatcgccagaagacaggagtatgcgctgcagtcagtacagggtaacggtaacgcgtaatcactccgtttccctcttctaccggttcattcttacgcatcagcagtgcttcatgcccggcaagcaatttagcaactttatcattaaacagactcataatggacagtgtttttatcgttatttatttgattttctatttataaaggttcttcacgtccgacacaaacagagttttcggttcacggtagaacttcacaaagtcatcggcggacacctgtccgggataaggagcataatagtggtttaccctttcacgtgcattgcgccacaccaacacataactgataggatacttgctgattaccggatagagagtctgtgtccaccagacagaatcgggaatagcctcgaaaccggtttcggtaatggctataggcttatcgtgcgccttacctacttcagtcaggatagcaagcgacttatccaattgctccatatattgtgtccggtcgaactgataggtgtcaaagcccaccagatcgatgatatcatctcccggataacactccagataagcagtcgaatctttggattccgatcccggtgaataagcataaagcaggttctttactccccgggcatgcatacgatcatgcgtcatccgccaaagagccttatactggtcggccgtgcaaagattttgtccccaccagaaccaactgccggtatgctcgtgccagggacggaaaataaccggtatttttgtaccttcttccgtctccaaagtattcataaaggctgcaacagcatcgagccaacttataaatttcgcatgatgtacaccaccgggcagtatggaagctacaaccgtcgtatcactcacatcccacgcatctttaccggtcaaggggttatcgagatgccagctaaaagaaaccactcctccccttttatattgattaatcgtctcctgacgtattttgcgaaacggcacgttatccagacttttctctctttccagttcaatgtggcccagatcaaacgacatgacagccggataatcaccacacacacttttcacgtcactgcgatcttcgtcaccttcccagccgacaccgtaaagcggatcgtcatgatgaccaaacataatcccctgtgtgggaaccttccgtagattattcagtaaattcactgtttccgtcgttcgcagagtgtcgacagtcgaatccgctcctgttttctttccggaaggtgaacaggcacccaatcctgccaatagcagtgcacctgtagctaatatctttattctctttatcataattcgtttatttaacgatgaatactatgcaaaagtacgagggttcccccttgaaaacaagtacaatattatccaatactggtattatcattcacctacccttattgtacttctctacagccagataaaaggcctgaatattgtcaaaaggtacttcgggcggagtatcgcaaccggtggatataataaagttagcgtattctccggtacaggtcagaagttcttctgtccgtgcaaaaacatcttcaggcgtcagtaccctgaacactcctacagggtccagattacccatcacccatacatccgaagggcattcccggagagcagttatcatatccgctttatttccgaaatgataccctttagcaccggtagccagcatagcagcagtgcaatgtccggtgttaccgcaattatgcagaataactgcaaacgaatcatcctggacagcatcgataatacgtttcacatagaccgaagaatagcgttgacaatcttcattcgaaagaagtccggcagccggttccgccataataacaccggccactccggtctctttgatagccagacaataacggagaatgaattccgtgcatttctccagtaaaagcagaacagtatcgggctcggtatagatagccatcataatttccgtcatatcgtatagacgacctgccagagaatagggaccgatacaaccggccagcacgggcttgtctatttcttctgctgccaggcggtcggccagcaaatactgaggcatgcgtcccgattcgaccgaaggaatctgcaaagcctcaacatctgcatatccagtgagcaaacgtccgcaaacactgggtacttcattgggggacatactaagtcgagctccaaaagcttctgcttccacggtaagatccataatagtggtacaagccgccgattgcggaaaacattcgttcaaggcacggatagcgtgataatgaatttcaccgttcgttacggcatccaatacccgtttctctaacaattcaatacccggatgggtcataatggggatggctacccgttttcctgatactaatttatcttttatatataatgatagttccataacattctatctgtttagtttatttctgtttttatagcaatcggctttgccgcatagttcgcatccatatttccgtttgacaatacatggaccataagcaataataccactgaccgatttaataggcgacatcagcgaagaatcactcaatcggaccccgcaaggaaattcaggcaagcagctgaaaagcaactgctgttgcgtgacgtgccatccgcaataaccgggactgtaaggatgactgactccgtatcccaaaggaaacattcgggattccactttccggcatacttcacggacaactgcttcagcaattgccgaaccgtaagcatccagaagaaattcgcgtaagatgtctccctgactgcctatcctatgctgaaaagcctcaaactcgtaccccgcagtagcaacaaagagtacatagcccgcagcatctttaagataaggagttataacagatcctgttttcagagaaataccgtttactcccacctcacaagtaccggccggctcggcatcgaacagagcatacagaaagcggggtgtacaaattccggcaatctctgtttccaatgcatcagatattgcctgtatctccgcatcaggcacgtaaccggttcccattgaaagattaatatcctccggatcgagtctcaacgaagtgaaaggcagacactcttcaacaatatgggaattcaccagtggcatattcaacaggcgtttatcaacttcttggccattattacggctgcattggcattactggtataggcatcggcaccgatagatttggcaaaggcatcgctgacaggtgctcctcctaccattacttttacttttcccctcaacccggaggtttcaagggcatcgatcacttccttcatgtaattcatggtagtggtgagcagtgcggacatgcaaataatatctgccttattttccaatgccgcagaaatgaatttatcacttgatacatccactcccagattgatgacttcaaacccacatccttcaaacatcgaagcaaccaagtttttacctatatcatgcaaatccccttttaccgtaccaatcacaatccgaccgatatacgaattgacctgcccttgcatcagtggtttgagtatatcgagggcaccacgcatggcacgggcactcatcaagaggttcggaacaaacacttgtcccgattcaaaacgtgctccaatggcttccatggctttaatcatatattcattaatgatttcctggggtgctgctcctccggcaacagcttcccgggtaacactgactgcctgttccaatttaccggccaaaatggcttcatataattcattgaggttgttcatagcttttatcatttataagattaataatatatagatactctttcttaaagattacctaacataaatttattgtacagcgagatgattttacgatttgccaaccgatctatcaggggactttaagagaatttcaaagccatctgatgatcaatacaggccaaacatggtagaaatagtattttctgaaaattatcaagagatatcctttagagcatcgaacatcgcaactacattgtctaccggaacattggcctgaacattatggacagcattgaaaacaaaacctccgtcacggcccaatatctcacactgccccattacatggcgacgtatctcatcgggagtaccgaaaggcagtatcttttgcgtatctaccccaccgccccaaaaggtcaattgactgccgaattcctctttcaatcttctggaatccatgtctttggcattaatctgaaccggattgataatatcaaatccggcttcgatcaatccgggtagaatcgggataatagctccacaggaatgcttaaagattttccaggtagtatgttgatgtatccaatcattcatccgtcgatagtgtggtaaccaaagctcacggaaggtatctatagagcaaaactgtgattcctgggaaccgaaatcggtcccacatgtcaacaccacatctatcttatctcctaatgcagcccagagtttttcataattggcaatggcaatgtcgatctctttctcaaatacctgatgcaaatagtcctgccgcatagcagtagacatataccattctaccacactacgaatccccttgggctgcttcaatcccataccgggaacaaaagcaacatcccccagagccgttcccccgaaactggcaacaacagctctgccggtctgatatgccttgtctgcctcagcacagtaataagccagatcattctctgtcaatagcccgaactcttctacattgtcttccgggtccaaacgatcttcttcaatgggctgctgacgctcaatagcattaatgaaataacatcctttgggcatcacggcactggggggataattttgatccccaccggcatacacatatacatctccccgcatatcaggagttaaatccattgcttcaggcaccaacacccgttgcccccaaggggtcgtctgttcgtgcatacgagtcgtatccaaatcgaagatatctttgggtccacctatacctatacagtctactccgatcttttcggctagttccgcatctatctctcctaacatctgaaaagcatctacaatcttcaccggacggggtgccagtccataatagtttcttagcgcttccacaatacggcaatggatacccgtgactgctgtagacccgaaatcaaccggtatactacctgcattctgatgattgagtgcacaacgcactttatctcttgatctgttcatgacgtttacattttaaaagtatattttcggtttatctcaaatgcttgtcggcaggcaatatcctcggaagagcctcccaccattattgtaaagcgtcccggttcgaccacccattccccctcttgcatatacagagccaatgacttcttatcaagagtaaaagttacttctcgggattcaccagccttcaggtgaatacggctgaacgcccgtaactgcttggcaggagtcgtaaaactgcttacgtcatcccggaaatagagttgtgccacttcatcaccatctgcagtaccctgattttgtatggttactgttacatctacccggcaatcatcacttccttcagttacctgcactttcatatccgtataggaaaaagttgtataactaagaccataaccgaaaggataacgaggagtacccggttcttcaatatatcggctacgatttcctttccgtcttgtattgtagtataccggcaactgaccgaccgaacgtggcacagaaagagtgagacgtcctgcgggattgtaatcaccgaaaagcacatcggccacagcattccctccctgcatgcccggataccaggcatccacaattgcctctgcctcttgaatagctccctccatcaataacggacgccctttaatcaataccaataccaccggtttacccaacctggagatttcttccaacaactccagttgtcttcccataagatgaagtgtggctcgatcatagccttcgccactttccatatcactgatctggtttatagtgacttttgccgcaccggtttcttcatattccgaggaaaaatcccgggcactcgatcctcccatcaccattactacggcatcggcattacgggctgtttctatagcatctttaaatccggtacgggaagaatcacgcactgcacaccccttggcatacagcacacgagtttctttagagaccttttgtcgaattccatccaagactgtcactacagtcccatcggcttgaggagcagtatagtctccaagcatattatacacattatcggcattgggacctataacagcaagggtacgaatatccttcttcaacggcaacagcttgtccttattcttaagcagaacgattgactgacgggctacttcacgagccagtccggtatgttcggaagaggcaacaagttgtactgcctgcttttcatctacaaatggatcatcaaacaatcccatttggaatttgagagataaaatgcgacgtaccgccttatctatcgttgctacagcaacatcccctcttttgaccgcagcaaccaactgctcagcatagacattcgttcccaaatcactatccactccggcattcacggcctttatggccgcctcatagtcattgccggcaacaccatgttcccgtaatcctccgacagcatacaaatcggacacgacaaaacctttgaattgccaacgatctttcaggatatccgttaacaaataacgacttccggtacatggatttccgtctatttcattgtatgaactcatcacagacaatgccccggcacctaccgcctcacgaaaaggaggaaagatagcctcttccagttcgcgctcgcctatatgggcagtacctccgttatgtccgccttccgtccagccatacgaagcaaaatgtttgagggtcgctatcacgcttttaccgtcgtttaatgtctctccctgaaaaccacgtaccagagcagttcccatcaccccattcagataaggatcttctccataagtttcctctacacgcgaccaacgcggatcacgggccaagtcgagtaccggtccatagccgatgtgtgctccctgagcacttgcttcaatagcaatgacacgtcccatctgccggatcagttccggattccaggtacttgcctgaccgatggaagtcggaaatactgttgtaccaatcgccatgtggccatgcggacattcttccgccagaaacagcggaatacccaaacggctatgttctatgacgtaagattgaagacgattggacgctcgggcagccagcgaaggattgagtccggtatgcaacgtacgttgcgtccacggatcagcccgcataaaaccccagagcgatccgatatggtactctccgatttctttctccaactgaggggtcaggcggatgtcctctcccacccgttcgtacatgggccaccccaatgaagtaagcatctgtcctaccttttcctccaaagtcatctgtgacaaaagatgctccacacgatactccacaggagcagaagggttttcataagtgtccatccgcccattcttattcaggtcataaaaatgcaagcgcgtcactttgtcttttttcttcccgaatgtgtttttagcccgaaccggaaaaataaaaaacacactcaacatcaaaaagcatattaatttcattttcattgtttctgaattatctggttaatatcacttaccgcctcctttatcatatttatcgtcgaatcagttgcataaaccgaattcagcccttgttcctcctgcccgggatctcccatatagtcatctcccctttgccaaaagagatgttgaggttccgcaaatccaccccatgcccagaagttacatccttggaaaacacccttttcggcagcatgcttttcgacgatatcaaacacagctctgtaataccggtcccgctgaacagtggaagtattcgaagtaaacttcacactgtctctcggtaaaccaaactcttcaagtaccagcggcttgtttatcttaaaagcttcctgcacatgcatatcgatataagagcaggtgttttctattgcctgcccgatggtacccggaatatctttcttatcgatccatccccaattattcggccaaatatgaatcgtagtataatcaacattcgcatcggcatggatagaagtccaaagtgacaaatccccctcacaaccggccattccttccgatccaatagaaaccagatggttagaatccatagatttaataagagcagcgcaatcggcaatccaggctgcaaaactctttttattgtcctcaccgaacggacggggttcattacctatctgccaagacataattgcaggatcttcactatatttttttccagtataccgattgacacgatttacaacgtgagtaatatgatcccggaacaaatggtgtgctttttccgacttagcatattgtgccacataattcgaaaaagcatcccatccggctacattcggcataggcacttcaccatgtcccgcccaataaagatactgggaatatccgcccgaccactcccagctgttattcaggaaaagtacggcatacatatcccgtttatccaactccgacaggaagaaatcgagcccgtcaaaaatagtatcattatacacaccggcttccacctgaagtgcaggctcagctttcgtcggaatcccatcttttccgtctgctccaacaagaacacgcaaattgttaataccaagagccttcaaataatccagttcacgaagtaatctctcccggttacctccctgtccctgtgaccccaaaatagctccataccaaaaattagttcctatataataatagggttttccattcaccgtcagacgtccgtttgacacacggacaaagggatcaggagaaacctgaggagaagtgcacgccccaagcacaatcaacaaggttaataggatagtcgataggattttcataatcatcagatattttatttataagattctttccaccctgaaagtgatattgcaaagatagacgttggatggatgtatacctaatactatcttagcattccatgatattatttataagcaggttcagtgccaagtataaaaattaggaatttcatcagcgaagagcaccaaagtgtccctcttaaaccgacaaaaatcggctgctgccggatgtcctttataaggagaaaaccccgaccaagtgcatacataattcaaggctaccccttccgaacgcagaatagataacaattgtgtataccacaatgaatcacgtgtctgtgtacctgtctcagtaatggcagaaagttttccatgcttttgcgcatattgtgtaaggatacgggctttcagaactaccagggagatatctcccccatccggacgaaaatcccaataattatccatacctacaacatctacatatttgtctcccggataacgttccagatattcggcctcagtagtgaaaccacagtccggagaaaatgcatataaaaagttatgcacctctaaagaatctctgagataagtgactgtaaaccgatacaactttttaaattcttcaaccgaacaatgattttttccccaccaaaaccaattaccatcaaactcatgccaaggacggaatatgatcggaatcaactctccgtcatcgccctttgcattgtgtgcaaaatcagcaatgatcttcaaatcggctttgaaggtagcatgataagaacctcccggcaagatatgacgaaccacttgtgttgtatcataaaaatttcctccggtcaccggattataataatgccaacagaacgtaataacatttccccgattatatgcaacatggaatttttcctgtatgtaattcaattcttttgtttcccaactgcgaggattcgtaaaatgaaggaaatcaaaactagccaaagcaggataagcccccgtcacatcatacgcatcacatcggtttgcctcatccctccagcgtgtactatccgaatcgaacccatccatttcataattatgttgtccataaaccacccgttttccggtcagttgccgcaagttatagaacaatgccgccgtatgttcagttgctctcgtatcaaccaacatcaatctggtttctgtcaagaggttccttcgcgaagatatgcaagacaggatgcatactacaataacaatatatattccaattcttttcattaataatctatttgaatgatttctgatgcctcactttcatgatcccaaaaggatacggaagtcacgcaataataataagttcctttcagagaagtcccgtcgaaatcaaatccattatcggcaaaactttgtgtatttcccgctacaaacgtcacaaacgtatctgctccgattttaaaatcaggagttctgctacgatagatgcgatacatttccacatttggcacacgactccaaaacatacgtttaccacaaattggttttatcatcggaacttcgggtttatcatctcccggtacctcagttactaccaccgtatgattccgagccggagccgaacccggatagcaaaatacattgtcagaatctgaaaccgaaatgtagtattctattccctgacgcgtaatctcagaagcgggtaaggttaatgtgaagacacctctggtccggtgcttaaatggtatttttttccacactttctctcctgttctccgatagtgaaatatcccggatacaaattccggtaaccgattttcaacgactgaaaaccgaatgtgcaacggagttccctccattattgaagtcaacggggaattaatcacaataaccggagcttcccggtcagcactcccggccagacaatcggcaggtattcccaaagggcttttatgcccttcaatatccactgcatataccgtatacgaagctgctccatgaaacttatcctgataacaattcacatcagacgccaatgtatcaatctcttctccattacgacaaaccacgaaggaacttactgccggctcttcattacgccaactaatctgtgctccctcaagagtacctttagctataatatgcgaaggagcctgtacccgttgctgtttacgtagctggttgatcttctctacatagttctgtttcacaaaccgattctgagtactcataatgtttccataggaagaaatatcttcaatacgatacaaaaagctacgcgcccattcatccattttccccggtaaatcattccattgataattttcaaaatcagtattcaaaactatatggcatgctgctccctgaatacgtgctcgtaatcgggagagacgcaattgttgaagtacatccgaagtaacggccatacaactatcaattgttttcagctgtttatcagctaatttcccagctttggctattacattaaaaggttgaaaacgaacataaagcgtatgaacaccttttaaccctttcaccggaacggtcaatgatttccaggattgccaaccttccgtgttctttacttcaaaccgagcgataacaggtcctcccaatcgatccagataaacagtagcaacaccacccgaagatgcagaagcaatccgtatggacattcgttcgggactattactaaaatcaactgccggatactgcaaccagtcatcagccataatatatcccacgcactctcctacttcatcacaaggagcattttttgtaccttttttctctgcatatccggtggcctttatctccacatcctttccattctttcccccaaaagtcatcgaataaagattcatcaacggataagtatgtaccatctgattaaatccgggtgtttcctgacactcaccgaaatcggtagcaaaaggttcgttttgatcgataatgtcagtaatggcatccactgcattttctccataattggcaagtgcaaagtcccgatacactttctccgaagagtccagcacttcatgattataccaaggagccttactgatataccacatctttggagaaatagcatccgccaatctccatgtcagcgcataaaatccgttcatattggcagaagcatctccaaaggcccggattgtttccgaaagatctacattataaggatagtaatactcagaactgttaaaatcacgttccagccagggacatccccagtattcacgatttccataaacacttcccggctcaaaagcggccgaatagtaagatataggggcacaaatgacatcttcaggcagactattcaccgattccgcagttagcccccagcccgatacagctatacgggtaaaaggcgacttccgcttcatctcttcataaaatccatcaaagactcttcgccaacgggcataaaaagcctcatttttctgaccttcggattgaaaacaaagcagatagtccaattccggatactcacgagctatttctgcgacctgtacctttatcaagtctttgttatccggttcagactgatattccggcaaaacgacatcaatatctaaccctaaacctatttttacaccacgtaagtgtgcataggcaatcaccttacggaatatagttgctcctttctctttgatctgaccattcgtcaacgtttcattatgcaagccatagtctgccccaaaatcataatcatcataaacttcagatgccccgaaaagatattcgttgatattccatccgggacagccccatccgtgtcctgtctttatggtaggcatccatccacgcgataaatgccctttgtattcaaaattatgaaacagttcattatgtccgcaaaacccgttatagttatgaatcataatgaagttcatacgcatccgtgctgcctgatctatgatgtaacgccaatcatcccaagaataaatggtagccgattgcggaaaattagtccagggaaggaatccacggatagccactgtcggagttcgttcatcttgaatcaacggtattctcgtctgaacctctttcttatcaggatatacatctccattcatatagaaacgcattcctaagtgatcttccagcaacccatatacaccataaagcaatccattggcatcaacacctgcaatgacaaccaattccctgcctttttcttttactgtccgaatgacatatccctgctctcccggcatggacttcagaggtaatactcctttgtctctccaagacttcactaacggatgatccagtcttgtcagaacaaattccgttttcctgtccggtacttcttcatgatcgatggacaacaagcgtccggacagctgataataataccgctgaagttctaccgccgcatattcttcaatcggcgtagcagaagctgttaacaaaatctgtgctttgacagccgatgctgccatccccaaaattaagatagccagcaggtgatatgccattcgtttcatttttcttttattttattttccagataaattttaagatcattatattcgcgccacacacgttgattcaaagagctaagtactcccaattctccacgagaatgaacacgttccatataagtatcaaacatttctttaacaggggctgaaactaacagccgatatgcgtccatatactcctgcgaaccatttattttctcaccttacacttccttcttttttaagataaaagcaggcatcatagcccgatctacctcacccaacaacagttcaaaacggaacattgctatgaaacgtttcagattctcccgtttctctcctcttaactttttcaataacgattctcccgaagacaccaactcttgtcgtattcgcacattattttcatctaataatccccattccggagtatatgcataaaattccggtgacggtacattccattgaatctgttcacgatccattctggcaagtaaaggagtcatttcttttgcggcttcttccccaaattcctctgtcagatatcggtcatacaattgatctacactctcgtcagcacccttatccgaagcaaaacgggcaaacgttcgaaaattaaaacggggttcctctgtacgccagtgaatagcaattactccgtccagattttgttcggcagcaagctttacctgttcacgcatcatattgactctcggctgaaaatgccagagttgatgatccccctccaaccagggtacagcccaaacactacggtttcgggcaatctcttccaagaaatcaggttgcggactttttcctaaatccggattaaggcaactgaaaataatatcttgtggtaaggccctatccagtcctttcaataaagaaggcaactgatgtccccctccccaaccaccaaggattaactttgcacgagagccttttgatttcaaatgtttataagtcaatttcatgtattccaatgcccataccccgacaaaacgagccgatgaatcggcagcctctttaaagagtgcctgattctcttgataagcccgggcaaagggtttatctctaagtgctttctgaacatcgacacccataaatgaatgttcattcagccacatccagatataatcgatatccggataagtgtttaggatatcatcaattgccgcataatgtatctcggcagctatctgacttttcggattggggatcatattcgattcacctgcccaataaaaacaatctccggctacattcaaagaaaaatattcggaagggatcactccgaattcaaatcccatagccattcggattccccgttcatgtgccatcttcagaacatccctcatcaaggactgagctttttcataatgttcccgagaagaatgtgatgttatcgaaccattattgccaaaagcttctgcaccaacaggcaattgaaatatctttcccgtatcaaaagcaaagtctttcacagccatcggaagatatccccaacgggctgtcatcgaattatcaaaacaagcttgcggaagaatatttttatattctatttttatcataggttccacataggtggcatagcgttctccaccaccagtataattatgaaaaccaataaaattgataccattcttccggcattcatccagataaatccggtaatccgacagattccaggaagtaggtcccgatagaaaattatgccagggcaacactcccctgatattaaatttgtcttgtgcctggatttccaggcagataaacaaagcaataaacagatattgaatttttcgcattatcatttttgttagatttatattgcaagctgagttaaaaagagggatagttccataaaaacttccctcttttaccaactctaccctacatcaagcagattataatctgctttttgctaagcacaccttaatctttgggaacgatacggaaattatcaaaacagatatccgtatcttccgcccaactattacccataatctgcaggactccatcattaggaatatctcctttccacatctctcccagatcaatagaaacggttttccattctccatttgtattcagagcaagtcccgatgcaaaaggttcccaatcgtaattgatctgtgaaaaatagaaacgaatctgccttttagtcaatggtttgattgtatttacttcaaacttcagcaaatatttattttgatcggcaataacctccggagaatattcgacagcacactgtgcaatagtagtcacctcgttccagtcccaatcgttcgcatcccctttattgatcttgaaacgggagaagtatccactgtacggagcaggcacaggaccatctatcacatatttactacctccccaaccggtaaacggatcaaagtcacacagcatgttgcctttttccatatatttacctggaaccgttacctctccacaaaccggactgactaatttaatttttgatcccattacagcatcttccggcaatacaaaactcaagctgttgcccgttgattttgtaattttcacttctttaccaccaaagaacagttgtcccgattcggtcgttatctcataaagatcgaaataatcgccgactactttcattgtatcaccggccggtgtaaattcattgaacattccattcacttccaattcggggataaacactgatatcggagctgtcactgtagaatttccactccctaaagttatcagattatttatttctcccggaatcactcttggaatcggaaaagtaatttctccggaagtgatgtatgcgtctttcaaatcaacctgcacatcattcaccagaattgaattaacagcattcagtcccgtaccttgcactatgatgtactgtgcaagattagcctgatcaatgccctgctcacggtcaagtacggtagatacccttgtaaccgccaaaggagcatattccacttcatcgtcctcacatgatgcaaaaagcccacagcccagcatcacccacacgaataaaatatatctaaatgttttcattgcatcttcaattttaaatgttacgaatgtattcattaccatcccggattattagaatcaatcttatcattagagttcacttcactggtaggtatcggataaagaagatttcgttccaaacgacgtttagtcacattatgctcatccatatcgatggcattcatcacatccagatagataccccaacggaaaagatcataacggcggtcagcttcataggccaattcgcgggcacgctcttccagtacagccgaacggaattcatcctgattcattccggagaacggagtggcatgtgcacgcgtacgaatgcggttcacctgattataggcctcagcgtccggcccaccattcaattcattgacagcctcagcataaatcaacatgatatccggcaaacggagtaacggaaagtgaaaatcactgtttttttgtttccggtctgtaacaaaagtaaattttgtcaacttcgccaatgtccacccctgaccttcatgatagacttccgtaccatcaaaagcattgccctgactgtcatatgcctccttattctccactttatctgcataccaacggggataatagttatagataaccttaccattggatataccatccgacgcatatcgatgaataactccatcgacaatacgcttatcctgttcttcgaaaagcagataccagtgatcgcgcataccataccagttaccttccatcgtaccgtcttctttgaaaatgcccacataatcctgacagatcgtgtttccaaagtccttatcaccgctgatggcctgtgccatccagatgtgttctcccttattacggtttcctatggcccatacgtccatataattatcaaacagggtatattcgtttatcacctcccaagctttgtcacgtgccaacgcataatacttggccggatcaaaagactcataacctgcaacagtctttgcaatgtgcgtgataggttgtggttcaaatatattcggatttcctcccttaaccacgataggcacaccggacatcgccccggaagccatagtaacatataccttcgccaacaatgctttagcagctccatttgaagcatgccccaccacgaaacctgcatcatcttttgagtacataccttcagcctgttccaacaattcgataatatgtgcatatacatccgaaaccgatgcacgaggttgactcatagcttctccttccgaaatggatttccggaaaataggtacaggaccgtaatttctcaccaaattaaaataagcccatgctttaaggaaacagagttgagctaaagcatcctgtttactctcctggctcagattactcattgccgaaatcttggatatacccagatttgcccggtggattaacgtataactaccttgccacatgtggtctatcccccaaaaaccttgtgggtttcccgctcccacattaccgaatgcccatgaagctcctgatgcgtagtcacagtccatattggtcaggtaaagataagatcccggagcaataaagctggtgatcaccgtattataggctcctgtcacgagctgagaagctgcactttcactgtcgcccaactgctcaggcgacacaaaatcataggccttttcatccagtaaatcattgcatgaacatgccaataagaccgtccataacaataaaaacgatttgaatattatttttttcatgacttttcttgatttgagttaaacatcagaatgtacattgtaaaccaaatgagaaggtgcgactgcttggatatgagaataagtctacaccacgacgggaagcatcacttccgaaagaatttacatccggatcataccaactatatcccgaaatggtaaatacattactaacggaagcaaacagattgatagattcgattcctttgaatggagaaataaacttatagcccagattaatgttcttcattctcagataagatccatcttctacatagcggtcggacaacttcattgttctcccatagccggcataagctttcggccatttggcattctcccgattttcgggtgtccaacgggattcatatatattctgaggaatattaccaataccactcatagtcacttcaagcaagtttgcattaaaaatatcacctccgacacagccttgcaggaaaaaactcaaagagaaattcttataagtaaaattgtgagtcataccaaacgtaaagtccggattcgtgtcaccaattacctgacgatcggcattcgtaataccggctaccccatcaaaatccttatattttacctcacctaccattgctttacatacagcctccgactcttttgcatagaacggatcagctctcacctcagctatattatcataaaagccgtcttccacaaatccataaatggttccgatcggcattccgttacgctgtaagaacacattatcagccttactccatccttgagcaaactgatcgcccggaagaccactgattttattacgattaaaagaaatattagcatcaaagtcccaattgagattctttccggtgattgcataaaattttcccgtaatttcaagtcctttattggttacgttaccaaaatttgtcgtcatatttgaaaaacctgtactttggggtatctgtatattctgtaacaaatcagatgttttcttataatacagatcaatagtcagattaattctattctggaagaaacccatatccactcctacattatactggctggtagtttcccacttcaggtccggattggccggtcctctccaagtcagattagcaaatccactggcaagtgcaccattaattggataattggccacagtcagatagtcacgggtagcatatgccccaatcgcctgattacctgtttgtccataacttgcacggaatttcaggttactaaacacattcagatctttaataaactgttcttctgatgctctccaggcaatagcccctgaagcaaagttcgaccatttattaccaggcgcaaacttactggaaccatctcggcggaaagaggcagtaaacagatatttattcatcagattatagttggcacgtcccaaaaaggaaaccaaagaagtcattcctcgcccgctagtcggtttctgaggattcacagcagcactcatatcaaaatcttctgtcaagtcttgcggaaatccggtagctaccattgccttattaccataatcccctctttcataagagaaagccgcgactacatttagcgaatgattcctattaaaggtcttattataagttgccatcgtttcaagtaccaggtttttcgaccagttatctgccttggaagcatatccgtttgtcggatctttaccttctactgtttccctgttgtaatacacatcacgttcattgatattgtaggagaaaccaacattctgacgaaccttcaaatctttgtacggagtgatctctacaaatgaagaagaaaagaaactattcgttgtcagttcatctttagcagcacgtgtatacacataaggattagaagagaaccagttcaactgagcattattcgtttcatcatccagcggagcggtagccggataaaataaagcaccacgaataataccgtcactgacagaattcgttttagcaagtttattcagcgaattggtaaaactcatattcgtacctatttcaatccattcatgtactttacgagccaagttcgcacggaatgaataacgtttgtatccggagttatgaatgataccactctgatccaaaatattaccggagattgcataatatcctttatcattcgaaccgttcacgctcagattgtattcctgggaaaatgctgtttcaaatacttcatcctgccaatttacgctaggatatgtaccattccgatagtcctccggtccaggagaataaacagattcaccggtactaggatctactttggaagtacccggatatggaattgcttcattcgcattctcgtattcattaaacatctgcgctgcttcattcctatacatcgcatatgcatatccatccaacatatccaatttcttcactactttcgatattccgaaattagcactgaagctgatattatcttttccttttgcaccacgtttggtagtaatcaataccacaccatttgcaccacgcgatccatagatggctgtggcagaggcatctttcaagatctcaatagattcgatatccgacggattaattgtcgaaagcggattggctgtctgcatcataccgtctttgcctgttcccggcattccactactggtaaaaggaataccatccacgatataaagcggttcggtagaggtggagaatgaattagcaccacgaatctgaatacttaccccggctccgggagcaccatcattctggttaacctgcacacctgcaatacgcccttggagtccctgattaatactaatcgggtttgttttcattaaatcttcacttttgatactggtgaccgaaccagtcaagtcactcttcttcatggagccatagcctataactactacttcatccagtagttcagtatcctctttcatggtcacattaagcactttttgtccgggttttaaagtgatctcctgttctttataacctacacacgaaaagaccaatacattcttaccatttgggacgttaacactatacttaccgtccacattggcaatagaaccggttccggcacctttaaccagaacattggctccgatcaatggagatccatcgttagcatcggtaattacacctgtaacaatggtttgctgagccatcatatggccactcattaagagtgccatcagaaacaacatcatgttcttcatactattacactgattttaaatgattaattttgtgataatgcaaaaatagagtcaaccggcagaacaaacaaatatgattttatcattcacttatgcaattcaaacaaacactctttattcgctttttgcctttaatgtatccgttattccaccatagtttatctaaaagacgaaattgagacttatttcatcccaatatcggggaactttctcaaatgtaaaattagtgcagttattattaacaatccagtattattttatctgatactgatacaatcagcacaccctctacatcagagaacaagtacatacagaaatcaccttcaaacaatctttccttaaaaaaacaactactaccccagaacctgtaaaaactaactttaccttatcttaacctcaaaacctttcgtaatacctttcgccaaccccggttgtccggaaccgataaacaaagtatactttccggaaagcatcctccatttcccatcttcccaaactgataactcccggggagctatagtaaaatccactttctttttctcacctgaagcaagttttacttttttaaatgccactaattttttcaacggatatgtgtaaacaggagtattctccctcgaaacatagacctgaaccacttcttctcctgctaactgacctgaattggataactcgaccgaacattgtaaaatcgcatccggctgcaaagtatcattcccttgtatattatcgaactcaaaagatgtataactcaatccatggccgaaaccatataaaggttcccctttcatataacgataagtacgccctttccacatatcaaaatccagtatatccggtaactgttcttcggttttgtagatagtcataggcaacttacccgacggattttcatttccaaacagcaaattggccaaagccctacccgcttcctgtcccggataccaagcctgcataatagccggtatatgtgtatccgcccattcggaagtcaacggatttcccgtgtggaaaaccaatacaattctcggattcacctgataaatcttttttagaagcttctcttgttcctccggtaaataaatagaaggcatatcatggttttctcgtgccattttttcatcactacccaaagctacaagtactatatctgccccttttaccacttgcgctatagaatccgcagaggttcccattccgttcagataagtgactttcccttttttacctatcagctccttcactcctttcaaaaggctaaccgaataaggaggctgtccgctatatccccccaaataattgtaatcggcaaacggtcctactacggctacagatttaatcttttctttatttaaaggtaacaaagcatcgtttttcaatagcacgaccgacttaacagcagcctcataagcaagttctgcaaatttctttcctgccaatagtttcttatcataatgattatatgggacaagttccatcggatcaaactctcccaacttaaaccgtgccgttaatactcttgtcaaagcccggtcaatagcagcttctgaaattaatccttgttctaccgcttgaacaagtttttccttataagtagtaccacattccagatcacaaccactgtttactcctaaagcagctgcctcctccagcgagtttaccacccggtgctgccaattcatcaccccaatagccccgcaatcagaaactacaaatccatcgaatccccattcttttctcagcacatcatcaagtaaccaatgcgaaccgctgggtggtactccgttaaaagcattataagccgtcatcaccgattgtgcgtttgcctctttcacgcaagcttcgtaagcggggaaataatattcatatagctgtttcgtcggtatttgtgaagaactggagaaacgattgttctcttcgttattggccacaaaatgtttgattgttgcgacagttttcagataagtcggatgatccccctgtaagcctttaacaaaagccactccaagtcgcgaagtcagatgcggatcttcaccataagtctcttcatttcttccccagcgtggatcacgcgccatgtttatagtaggcgaccagtaagtgagcccttttcctatctccagatatttcaaccgtgcctccgtagaaatagcagaagccacccgtttgactaacaccgtatcccaggtagaagccagattaatggcttgcggaaagactgtcacttcaccggcacgagccactccgtgaagacattcattccaataattataagcaggaagattcaaccgcggaatgctatcactttcgctcaccaactgagctaccttctctgccaatgtcatctgttgaatcaacgtccttacacgaaccgcgaccggttgcgacaaatctccgataatcctctcttttacaccacggacttccacttttccgcctgcattaaaagccggacaatcctcacaccctccattgtcctgagccctcaacattatacctgtagaaagtagaatccctatcattactaattttgtttgcatgtctttcatattctgtctccactgtttttagttcatacgcttttcaataatgcaaaattatcgggattccatcaaaccatccagtattattttatccattcataatacaattattattttgataacctatgttgctccataaatcgattatctttgcatcatagttaatcttcaaaagatctcagcatatgatcaatcctatttattcagccgataaagcaagatactccggtgggatgaagtaccgtcgttgcggtaaaagcggtatactgttaccggaagtttctctgggcctctggcataattttggtgatgttgacacactagccaacagcctccggatggctcactttgcattcgacaaaggtatcacacatttcgacctggctaataactacggtccctcttacggctcagccgaagaaacgttcggactcatcatgaagaaatcctttatgccctatcgggatgaactattcatatccaccaaagccggccatgatatgtgggaaggtccttacggaaactggggctcccggaaatacctgatgagcagtctcaaccagagtttaaaacgtatgaatctggagtatgtcgatattttttatacccatcgttacgaccccgaaactccacttgaagaaactcttcaggcgctcgtcgatattgtccggcaaggtaaagccctctacatcggtatatccaaataccccaaagaaaaggcagagttcgcctaccgatatctggaagaacgagacgtgcattgtctactctatcagggacgatacaacctgtttaaccgcgaactggaagaacaaggcattctgcaacaagccaaagaaaatggtacgggctttatcgccttttctcctctggctcaaggtctgctcaccaaccggtatctaaatggaattccggaagactcaagaatagcccgcggaggtttcctgaagaaagagcaattgaccgagcaagtattcaataaaatcaaagcattgaatgaagtggcaggtagtcggggacagaccttagccgaaatggcattggcctgggtcttgaaagatgatctggtaacctctgttatcgtcggcgcgagctccgtcaagcaactggaagacaatctgaaagtgacggaaaactgtaagttcagtacagacgagattcaacgtatcgggaacattcttcaatgaactctttttcaccacagattaacagatcacacagatgtgtaatattcagattatcatatggaatttagagtcaatccacgacccaacaatcaatattccttgttttcgagctaaagttcactcctgcctttagcagttgacggggatcattggcaaacggagcggcatatcccttttcttctatctgtttcaaagcctcttccgcactcccgtcaaatttgaactccatcacataaatgtatcggtctgtcttcaaaaccatatcgatgcgcccgttagaagtatgatactccgcctggacataaaaaccaagtaacttataaacaataaaaagaacattctgataatgcaactccaagtcacgtaccagttcataaggagtatcggcgaagaaactttgcagacgacgaaagaaagcatcacaatctccctgttccacttcagaaacgaatctggttatatgaaaccctgtttgtcctttatcaatatttgcataaaaaggaagtaaatacctgataaatccttcctctacttcccgattgggaaatcccaggcggtagatatcaaaacgttcatcatacccttttatcgtcagatagccactctgataaatcaccggcagaggattcttcgaagtagaatctatgcaattcagcatatctgatgtcgcctcatcgtgcgccagctgttgcaagtcatatttatcacgcagtaaaagttttaccaaataagacggagtacctgtttcgaaccagtaactgccaaacttcatcttataaaaagtattcagtatactgaacggattatataaaccgatagaattttccgtgaaatgataaccatcataccgttccttcagctcccggcaagcatcttcgtacgacatcttttgatatttcgccaactgacgaatttccggttccagataatgatggatttccttttctgtaattccacacaactccacataaggttcgtccatagagatatcgttcagattattcaggtcactaaacacacttaccttaccaaacttggtaactcccgtcaaaagggcaaagcggatatacccgtccatcgttttcagcacagaataaaaacctttcagtgtatcacgatacttctctcccaactcctcattaccgatagcctgcaacatcggtttatcatattcatcaatcaaaatcaccacccgctgccccgactgttcacaggcacgctgtacaatacccttgaaacgcaaaggaatagaagtttcagaaggagcagtcccgtacaccatttcccatttagccaacgtatcgttcaatattcgatccaggctttcgggcgtatcatacttttcggtgttcagatccagatgtaaaatcggatattttatccaatctttttccaactcctccatagccaaaccacgaaacaagtcctttttcccttgaaaataagcttcaagagtagatatcagcagactcttgccaaagcgacggggacggctcaggaaataatatgaacccgtttttaccaatctacagactaatgcagtcttatctatataaagatagccttccctacgtattttctcaaagttctgtatcccaatcgggtaaagtttagccataacacatttctattaatcgtttcactcacaaatatacaagattattcttaattatcggttttgctaaccataataataaatgccggtacccattcttccgaacagataccggcatttattttttcaaccgaaacgatcggtcagctatcagagcaatccctgccctcctatcactcctgcaatggcgcttgccacagctataatcacctttaaaaggatattccagctattcttcttcatgtatttatctgattaaagttattatgcagtcggatcatccacaatgtctccatcaccattaccggaatcatgaccgcccgaagtgccgatactgcctatcttctgaaactcaacaccctgaagcaatgcacgggtagtgccaagtcatattcctaatctccttttgttcatgttattactactaattttattcacacttcgttgatcaacattgcaaaggtggacatttacaggaagatgacaaagaaaaacagggcatccggaaccgatcactcagaaaagttataagtatcacattctcaggaaataaaaaagagagtatccttttctggacaccctcttccccacgcatctgcgtcacatactttactattgtttgatttcccatattatacccgtttaggtacaaatacaataaaagactcccacctttatacccgatatggtataaaagtgggagcaaggcaggaatctatacccatttgggtatattgttactcattctatctgattacatctatgactttcctgatattttcattagaacctactttctcctatctattacatttcttttctactccttcgtaaacttccgataagccccttccagttttttatcatactgattccgggcatatccgggtccattatacctcctggcaaacccgacccagtctttctgctccagataggactgcaacttagcaagtttcacaaacctcgcaaaagcttccagttgcttatcttctccgacacacatatctttcaccatttcctccacactgccatacccgcacatcgcatagttaaagcccatcacttggaacattccccatgaagtggaagcatcagcagcttctttatgtatttcccgggccttttccagacgttcatactctttcatcccgccataataatgacccttctcccatttaggataaagaatattttcattgcccgcaacatacctctccggatctagtccccgcttcttgagttcacgccaaaagatgtgaccttcgaataagatcatcggtcgccccggagccacaaagcccccatgcccaccggtctcaactgcctgtacagcttttaccactgctacctcaatgccaagtaaatccgccacacgctgaaaatcattttctgttaagtttcccatgagtaattagatttattttatttatatcgctctgatcgtatccaccactctcctgatatcctcatctgtcagtgtaggtcccgaaggcagacacaagccgatatcgaacaacctctcactcgtaccattcccatagaacggagcatccgtgaacacaggctgaagatgcatcggcttccacaaaggacgcgtctctatgttctcggagtccagcctcaaacggatatcctcacgactcttacccgcaagcttcggatcaaccagaatacaagtaagccaaaagttggaagcaaaccgcgaatcagggttctccatgaccgtaatacccgccacatctttcagcaaatcaacatacaaagagtgaatggcacggcgacgggcaatatgttcatcgaggacaaacatctgcccacgaccgatacccgcacaaatattactcatccgatagttgtaaccgatatgggtatgctggtaatgcggagcggcatcacgagcctgcgtagcgtagaactttgtctgtcgggcctcctcttccgtacgacagatcagagcacctcccccggaagtcgtgatcatcttgttgccattgaaagagagagcggccagttcaccgaatgtgccacacttccgtccgttcagttccgaacccaaagcctccgcggcatcctccaatacggggataccataacgattcgcaatatccatgatctcgtccatcttggcaggcataccgtaaaggtggacagggataatagccttcgggagcttacccgtcttgcgcaaacggtcctttatagcctcctcgagcaataccggatccatattccaggtatccttctcactgtccacaaaaacaggtttggcctccagataagaaatcggattggcagaggcggcaaaagtaaagctttgacagatcacttcatcaccgggcttcacatccagaagaatcaagcccaagtgaagtgcagccgttccagcactcaaagccactacatagcggtcttcatgcaaatattcaaccaaagattgctcaaaggcatccacgttaggtcccaaagggacaacccagttcgtatcaaaggcctcttttataaagtcttgctcacggccacccatgtgagcaagcgaaagccagattcgtttgttcataaataatataatatttaattcattgctttttacctcgattacgccatacgtaataaggaacaaacaaccaaaaaagaaacaatctcatgaattaaaatagagaatc

SEQ ID NO: 4992 - DNA, 11694 bp, Unknown
  gut microbiota DNA sequence
aatacctttcatttttttatatgttattttatcaatcttctacctcactacacggataccgattatcttccattgtctgcaatgtctccatcacttccaattcttcttctgaaagtgccctatttttccagctatccattatttgatgtgcttcttgtgctaaatcctcctcgaatacctcgccatagcaataagtcagcaattggcatttcaatagagaagcaggaagatggtccaatacggcaaaagagcgatctaaaatgctttgtatcttagattctttgtcgccatcattgtaaatggtagcattatagcccattaacagggacagacaaatcgctgcttcttcctcggatgtggcacctttcatagagaaaagggcttcggacaagcgaaaaacttcggtgttcagttgacggaaatgatcggtatagatgggagaaccatccatacccaaataaagcaactcacgggcaatgtgttgcagattttggacttgattcatataattttgaaattacgaattacgctgaaagaatacgaaggtaacttttaggtactttgacgctggcagaaagaactccgtggatacgaatcactacgtaagtacggttggcaaggctggacaattcgccctcaatgccacaaaactctcctttgacgacctgcacttttgtaccaacagtaaggggaagatcatcaaaagttacattttccggagctaaatccatcacaaacttgaaatcttccatctgtttattgggaacgatcaacaaagtatgggtatagagatccttcatataataaagaggaacatgatcatccttcgtgatagaccaagcacggtctttcgtggtccggacaaaaataagattcttgataacaggaacttctaccctacgacgacgatatttcagttgacggatgacaaattgtgttggaagaaagtattctattccaagcttttctaaagcattgcgaacagaaaactcctgatccttctttgtccgagcggcaaaccaatactcctgttgttcagacatttattagtggatattaaaagtcgagaggttactttcgggtgcgctacgcggtttggacgagacatcttttcccattcaaaccgtaagaatttccgaaactatttttagtggtaaaacgaatgaaattgtttcaaaaaacgttcgtttataaacacaaaggtaaggcacatttttataacaacaaaatatttttataaataaattgggtttttctttctttatctattttagtatactgattataagagtattatatacatgaaatagaatctttatatatgtgttttttctataagaacatgatttttagaaaaggtcgaaaaaaggtgttccaaaagacgaacgttttttgaaacacccctccccttttcttccatctactttatattacgtatctgtttgtagtccaataggtaagtaccctagcctcctatcatttacacaaaaaaatttctccttacgcgtgagacgacacctactttagaaaacaggttcttcgtcaagtttggtggtaagttttcttttactcatggaatctaattcagttttcggaagtgcaagccctcgtttatagttgacaaaaaagcaagtatcccggctttcgcccgaagtgtccattcgtgaggtgaagaagcgaatcttaggctaaactatctgaaaatcaacatctttaaaaagtaagatttctgtcttcaaaagctttgttttaacacagagttaaagcttgttctttggatataaataagaagttctttaaatgcaaaagacttgttatttgcgcacaagaacctgacaacctgtaaaatgcgttaacaatgttaattgaagaaagatataaggatgaagataccggttcagacggcgtaaattcacttcctaaacttgagttatcttattcagccggtgtctgttttttcttatcaaagcaagcaaaaaggacaattatcaacttggagataaagaatttaccaccaaatttaatttaaataggctataaatagtaatatggaaaaagtgaaaatcggagaaaactccagaaaagtatgacgaatacttatacatgcaagaaaagtctctgtgaaagaactttgcagcttgacctgcctgaatatagacgatgtaatgcttgctgtcggatggttggcaaaagagaacagttctttttatcgaaaagaaagcagattctttttatgtcagcgacggttctgagtattacttctgcttcggataggacatgcagatgaaagaacgagggtgtgtcgaaactcgtattcaccacagattgctctgtggtgagtcatgacacactctcgtcgttctttattctccttttgccttcatcagtttcccggctttgaggtcaatgtagtaaagcattccccgggctatctccatgcgcccgatctccttacccggaaactcggccagcactccgagcaggtctcctgtctccggatcataacgctgtattttcccactcttctgtaccgacatcagtaattcgcctccgtagacaagcagtccgagtggttgaatatcatcgtacttaaacacggcatcggaagtgatatgtgtctcttcaccgaacacgatctccattttcgacggagtgaatacttgcacactcttgttgtaccagtcggtcagatacatacgcccatcatactctgccataccatggatacgggcctgatagtcatatccgactccttcgggcactttcacctttccgatccagggaacccggaacgcaggttcggtaacggcttcgtaaatccaatagccgcgaatggtatttttatcacgcaccatcagtctctcgccacactcacgaagtccgtagcaatgggtcatgctataaatatcgtctccccactttccgtctgaacgcccgatggcattgacaaactgaagggtgcgacggtcaaaaatattaatacgggagttgtacatacccacaaagatataacggtcagaaacagccatgtcgcctatctcggcattaaaggtctctttgacacctttccgtacccatgaatcgatacgtccgatcagttcgcctgtcgtcaggttcagcaacagcacggaacggtcagcggcattggtattggcaacaaacaaagtgtcccccttgacccgtacggaccggggagtgaaattggccggaagcactccgggaacaaccacttcgccggcatctgtaaaagtggtgtaaactggctcttggggaggagtactgcccttatctgaaggttcttcgtccttggaacaggatacacacagggcaaatatcaataataacagatataaaaatttcaaattcatgcttgattgttttctcaccacagacgacacagaaagttttcttctcttaaaccgtcatccggatatagaggagtgtacaaacctgcataatctgcagcgaatcgtaattattcatttttttagtccagctcggatatttcaacaaacataactttcccctgtatcagccggggagcattggcattgcgtcctgcaagatagaatgtatcattatggaacaagaggcgtccgggagttcccagccccactcctccggcaaaggatgaataagagccgagctctttcccggtacggaggtctactctcacgatgcagttatttgcgcagacaacatacatttcgttctgaaagaatcccatactgagcggtttgttcggcatgcggtaagagcgcagaaagcgtaccggctctcccttgaccgccacggtggcgggatcgatcaccaggatgcgtgaggtttcgtagtcggacacatagatcaagccttcatgccgcgcgacggactcaagattaaaaccgttattagaagacgtactgtccgtattctgagcaaagacaggaaccttaaaacgattttcaggcgtacaatctgaaatctgcaccactttaatcttctgtttgtcacggatgaacaatttatcaccggccacttcggccgcttcgcattgcaacagagaactcgactgccatccggtacgcccgatggtggtcacatacgaataatcgttccgtcggaacaggtcgatccgggacgaacggttcaccacaaagatgtaatcgctgctgaccgccacatccatcacctgattgtcgaacttctcgtttttcccgttgtaggtccagccggtcagcgaataaagcaactccccggtcgaagcgcgtaccacccacacaccgtcagaaccttcggcacggttggcaatgaaaagagtatcgcccgaacgccgcattcccaccggattgtaattttgggtccccactccgacaaaggcggcatccaactctttatcgaaagtcaatgtaaggatggagtcggtcgtgaaactaaatccgggggcactatttttatcgcatgcggcaaaggtgagcagcaggactgccagtaccgtcagtatgttatgtctcttcatcatagctctatgtcgggattgtcggcatcgttgatgccgggattataatcattgtaactcttaaagggattgatgatataaggcagcatgcggtgcttcatcatgtagcgatacactttcggtactatttcatcgggcaccgacccgtaacacaggctgctagaatgaccatagcccagacagtgccctagctcgtgaatccagacatgaagcacccagttgcaatcgattgccacccggttctggtagaagaatccggccagatattcttcacgcaatcccaaagcatttcctccaccgagcccggcgataccggaaccggtaaccactccgaacacaagactttgtttattgagaattgaattcagtagcccttcacggtcgatctcctttcctgcatcattgtgaatgctacctttgtagttcatcaatgaatcacgaaaaatttcggaactgaacatgacagccatattcaccgccgatgtggcatagtagcgggctgcatttgctgtcatgactccccagtttccactaccgtactttcccatctggatacgggttttcatcttgatggtcttcagcatatcgaatacggagtcgttgcacgaaagcagcaattcatactggtcgggcgacagcagtgccagattattcacacggacaggctttccactcttcgaagcgtagacggcctctcccattttcaatggagaatcaagtttgatgttataaaaaccggggacttcctcaaattgcatcaattggatggtgtcacgcaaatggggcatcgtcagccaaagggagacttccttgaaatcgtgcgccatgccgttgaacagccggagctttccatccgccatcgaaacattaaaggggttattcacatagaaggcacgatcggcggaaacaatctcgtccacgctttcgccatcttcaaacatctgttctccctgatcgagaaactcttgtgccgtcatcttcgtcaaagcaggcggagtgccaaaagcatcgagaatatcggctgtatcatcatcctgacaggcacacagcgagaatgccagaagcgagatacacagaatttgctttctgttcatagtgtagggtttattcattttgagggcgcaaagataatataaaaaatatttttcccacaaaaagattcttccggataatcggagcgaaacatcgctaatcgcatacccgattaccacacaggcttttgggcagaaacggtttataataaaaaaacggccgatctgccaaatccataaatgattctttgtaaatttgcacatagttattagataaacattatgaagaaactctttttatgggcactgtcagctttgttaacccttccggcagcggctcaagacttcgtccccgaagcctcgttttacggcgaaaactactggacacccgacacactgggtaaccatcgcgccattgtttccgtgaacactcccgcctccgtagcggaagcttatatcccctggcgcagacgtgacgccaatcccgaacaaaaagggattattgtgatcaatgtatctaccggcaaagcggtagacaatgtacttccggtggaaatcaaccgtgaatacggacgcatccgatttgacgcaagcggaaatgccggagattattatgtgtactacctcccctaccacacctcgggagggccctatccgaaagtaaactatcctcagcaaccggataaggcggatccgcaatggaaagcaacctgtaaagccactccggccggaaaggcggtacaagccaagctggtacgtttcgaatcgctgggcagtttcaacagcttctatccgatggaaatcatcgccacagcacaggagaagcaggcattgatcgatgctaacagcaacaagcctttcctgctgttgcccgaagaccgtaaatatcccatccgcatgttcgatgatctgtcataccgccaggtgacgcaaggagccacaggcgagtttttcggtgaagcggatctgaacgaatactatgtgctgcaactgggactgtgggcattcaagaatccggtgaacggagtcaaagtaacctttaccgacctgaaaggaaagaacgaaagtatacctgcatcggctcttacgtgtttcaacacggaaggaaccgactggctgggacgcccgatacatccggaggtaaacgtcggtaaaggccgtgtacaacctttatggatcggcgtccagatgccggaacatgccggcagagggatctaccgaggcacggtcaccgtgagcgacctgagcggtgcttcacaggaagtgaacatagccattaacctgtcggacaacgtactggtggacaaaggagacggagacttgtggcgtttgtcacgtttgcgctggctgaattcacagtatgcagtcaataaccggccggtgaagccattcattccgataaaggtggcagaccgtacaatcagcgtgctgggacgcagcgtcactgccggcgaactgggactgccggcttccatccggagttacttcaccgaagagatgacttccataggcaaagaacccaaagacattctgtcacaaccgatggaatttgtcattcgccagaatggaaagccactgcccgtcaccatcacttcaccgctaaagttcggcaagaaggaagacggaacggtaagctggaccgctaccggaaaagcaggggcactggagataacagtacttgcaagtatggaattcgatggtttcatgaattatcagatcaaagtaaaggctgccgaaaatacatcggtagacgatatagccctgttaacttccatgccggcaacaacggccaaatatcgtttgggaatgggttatgaaggctcactgcgcccgaaaagcgaccaatggaaatggaatgtggaacggaatcaggaaggtttctggtttggcgatgtaaacgccggcatgcaatgcctgttccgtgcagagaactatcgccgtccgctaaacacaaacttctacaaaatgcaaccgctgaacatgcctccatcctggtttaacaacggtaaaggcggcatcagctataaagagaaaggaaaccaggtagacatcaagacatacagtggcagccgcaccctccaaaagggcgaagagctgaacttcgacttcctggtactggtaactcccttcaagcccatcgacacgatgaagcaatggaccgaccgctactaccacggataccagcctgccgagaaactgaaagagggcgacgcacacgcctaccaggctgtagacgttgtgggagaaacaggagcaaacgttatcaacctgcatcacggcaatgcggtgaatccgcatatcaactatcctttcttccgccctgccttcatgaagcagtacgtagacgaatcgcatgccaaaggatataaagtgaaaatatactatacggtacgcgaactgacgaaccatgcaccggagctgtttgccctgaagagccttggacacgaaatcttctcaccgggcaagggaggaggctatgcctggctacaggaacatctggacggcgactacatcggagcctggtttgtagatgcttacaaggatgcggcaatcgtgaacaccggcatttcgcgctggcacaacttctatgtggaaggactgaactggctgacaaaaaatgtcggcatcgacggagtctatatcgatgacttggctttcgatcgtaacacgatgaaacgcatccgccgggtactggaaagtaaccgtcccgatccgcgcatcgatgtccattcagccaatcagttcaatccggccgacggttacatcaacagcatattcctttacatggaacacatgccttacctggaccgcctttggtttggagaatactttaaatacgaaaagtcaccggaatactggctgacagacgtatcgggtatccccttcggcatgatgagcgaaatgttgcaggatggcggcaatccttaccggggcatgctgtacgggatgaccgcacgcgaaccgatggaatccgtcccctcacaactctggaaggtgtgggatgcattcggcataaaagacagccgcatgatgggctattgggtatcctacaatccagtgaagacaggacgcaatgacgttctggcaacctcgtttgtgaaagatggcaaagtaatgattgccattgccagttgggcaaaaaaagacagtgatataaaactgcagatagattgggagaaactgggcattgatgctgataaagccaggctgacggctcctgacatcaaaggtttccaggaaggattcagcctgtcgccaaaagataaaataaaagttcccaaagacaaagggttcatctttattctggaataaaagtagatatatgaatgggggcgtgccgaaaatgctgaccaggcgggaaagtacatcccggcacacctccatttttaaactgactcagtctaattttcgaagctaatatataaaaaaacagacatattagaagaatccacaagattgacaaaattcacttgcagccaatgctacggcctcaggttcaattgtaaaaaacaaaattttccggtatcggattttctttcttttcctcgtcatcctcacgctgagaagcagttaacagtaatactccatagtccgtgtcattatcagtctattgttgttgatattatataaaaaatgtttttgattctgagcataagtccacactgcaagtcctgctctttatcatacttagatagatgccttagtaattctcaataataacattcccgaatatatcttttttaataatttgctttttcccatgattatcttcgattattttattaccgaatatatctgtcttaatggtctttttataacctttattattttcaatgacagtatttccaaagatatcttttttgatgcttttcctattaccacgattgtcctcaatgacagtatctccaaagatgtctttcttaatggttttcctattaccgcaattgttctcaatgacagtatctccaaaaatgtctttcttgatagttttcctattaccgcgattgtcctcaatgacagtatctccaaaaatgtctttcttgatagttttcctattaccgcgattgtcctcaatgacagtatctccaaagatatctttcttaatggttttcctattaccgtgattgtcctcaatgacagtatctccaaagatgtctttcttgatggttttctttccttgattagttaccgaatgtccatgattatttccgatagaatttgcaccataacttcctgttatccgagggatcagaataaactgaactgtaaatagaataaataaaatctttttcatgatgttttttttaggtttgcaacaaaagtaaagcaggaaaatcatacctgatctgtgaattctataattacttatagggaaaaacctaaatttatatggatttaaacggtaagaacttataaagtaccccaattcgcacatcaaaaatcaagcatctataccactaaaatcagtacatatcgggacatccactccagagtgaatactaaaataatctgcaagtaacgtttggcaataagaaaacaatcagcacatgcaaatagcataagcataaatagagtttttttcttggaaaagctgaaataagaactggtacctatatagataaagtagatggtaaaaagatattattttttcggctctgcataaacgatataacgtgtagagtcttcttcatcaagtaacaagaccgcattggtattatccgtcacccattatagcacacggataagcattcggatattctttttgctcagaaaacaaatcgttatacagtcgaaatatcttttgtttatccttcttatcttcataagtaggttgtgaatagagtaagcagaggtaattgtaaagtgaattgtagctatgactcatgcataataaaataatccctcaaaatttagggacgatcccgaattcagatatgatcctttactcccttttctttaagaggttcctggcgttttttttaaaatttccctaatatcattgattatcaaggaaattagcaaatacagttcttacattcgactaaattagtcttgatttaaattatatatctatttctttaatgcgttccaactgcctatttagaaagtagtcagaatacttagtgtaatcccccgtttcataaaatcgaatcaaccctttcctgtaattcaaaatatcagcatcttttgctgaatatacaggaataatatcagcattcatcatgacaacactttctatcatgcgagaagttcttttattcccatctataaaaggttgcagccgtgcaatattacaatgtaagaaaactgccttttccaatggattagtataaacgtcttgctcatataatatctctcccaatttactttttatttcttgcaaatcttttggaggagcataatcagtaccgctgatcctaactgcacgtgtccttaaaaagcctgattcctcattagaaaccaaacctgtggaaatagattgatgaagtctgaaaagagtacattcatctataatctccttatttttctcttgatgaatatattccagttcggaaatgaatgtattatatagatttttcagcattttagcatcttcatattttttttcggaagtgatgccgtccttaagcaatgcttctgtttcaacataggtataggtattaccctctattctccccgaataatagcaccatacaacagccaagtcttttatctcgcttgagtaaagttccgacagtttagccaaagggctttcaagaatgaatgttgctttttggcattgttccttattgaagatatgtttcatatatcctatctattgcttaaaagagagattttatttctcgatttcattattatgcaaaactactaaaaagtacttagatacagcacacttccattataaaagttctattcttaacacccacctctaagtttttggcacacgccacatccttgtctatataatcagtaaaaatctttccccatcttaacgcataataacacacggcctttatatccgggaattgcttgaacagaattccagccctccgtttttggctgtccgtccacttgcccggtaccttgaacagtagataccggcttctagccaacaattgcctaagagtatcctcaaggaagaggatgaagcaagttgctcaggag

SEQ ID NO: 4993 - DNA, 34491 bp, Unknown
  gut microbiota DNA sequence
agtatgcctgaagggaggaacatagtcaagatttttacggtgagccccttctaatcctaaaaagaaaaaactcttgtaacatatactgaaattcagttagttacaagagtttttttaagaggttcctggcggattcgaaccgccgtacacggttttgcagaccgctgactaagccactcatccaaggaaccttgtttctcgtttgcggttgcaaaggtagtacaaattttgaaactaccaaactatctgcaacaatttttctttgtattctttttcttggacgagcactccttctgcttcttttccatcatatcctttaattcacagccacttgcacaactcgcacaagggttatcactttccttcacacgacgaaaaaaaagataaataccataaagaatacgggctacgcacaatacaatcagtagcccgactacccattcctgccaattcataaaaacattcctcctatctgatagacggcaaatgaaacaagccatgccaacgccgtggtatatcctgccgtgaagatagcccacttccaactaccggattcctgcttgatggctaccaacgtggcaatgcacgggaagtagattaacacaaacagcatatagctaaatgccgcaagcggtgtaatcggaattcgttcggccaaactgactacatcggcatcggcatcatttgtatagagtacgccaagtgtacttaccaccaattctttggcaccgacaccggagagcaaaccgatactcagcttccagtcgaagcccaacggtttgagcacaggctccactgcctgaccgatttgaccaatataagaattttcctgctgttctgcctgggtaggataagcatcgtgatcgggataataccccaagaaccagataatgatagaagcaatcatgatgattcctcccatctttttgaggtattgcgcacctttctcccatgtatggcggaagatggatttcatggtcggcatacgataaggagggagctccatcacaaacggagtatcatcccctttgaccagaaaacgactgaacagacgcgccatgataactgccaatgcaatgccgatagcataaatagccaataggaccaagctaccattctttgggaaaaaagcaccgaccaataacaaatagataggcaaacgggcactacatgacatcaatggattaacaagcatggtaatcaaacggctctttcggttttcaatagtacgcgaagccataatagcaggtacattacaaccgaaacccataatcaaaggaatgaacgacttgccatgcaaccccatcttgtgcatgatcttatccataataaaagctgcacgagccatatagcccgaatcctccatcaaagaaatacaaaaatataatatcaggatattaggcaaaaagacgataactcctcctactccaccaataataccatcaatcatcagatccttcagcggaccttcagacatattatccctgatcagattccccagtgcctcaacgagccattcgatacccatcatcggatattcaccgatcacaaaggtaccttcgaacatcagatacataaaaagaaagaagatgggatatccccaaatgcgatgggttacaatagagtcgagcaccttggttgtctgttcctgctccaggtggttatcggtaaaagtctctttcagagcaccactgataaaaccatatttggcatcagtcaaagccgactcactatcttcattcatcgtctcctgaatgcgacgggctgctttatcccgcttcttttctacttccacagcattgggcagagtatgaataaaacgttctatttccggatcattctccaataacttgatagcaagataacgagtagaatacttgtgacggataaactcgttcttcgaaatctcctctttcactgcatcaatggctttctccaaatcgggtccatgattgatatgaatatggcggaacactttacccaccggttctttgccatgggtataatcagccggatgttcaccatggtctttaaaattgggtaaggactggtgccaatccataatttcctttgccacctccggatgtatatgcccttttttatcaataaagtcggcaccttcataaaggttgatgactacatgaaaaagacggtccacaccgatattccttttacagacagtaggcaccatcggaactccgaacaactttcctaacaggagatagtcaagcgtattaccactggcttccagttcatcatacatgttaagagccactaccatacgtacattcatatcaataagctgggtagtgagatagaggttacgctccagatttgaagaatcaaccacattgataatcacatcaggtgtctcgtcgataatatgacggcgcacataaatttcttcgggagtataggcagacaaagaataagtacccggcaaatcaactattttgaagtgataaccctggaaatcaaaatacccttctttagcatctaccgtcacaccactataattacccacatgttcgtgagcacctgaagccagattgaagagagacgttttaccgcaattcgggttaccgaccaacgccacattaatcgtgcgtcgctttccaagagcaactcgtttcaagtcttcctccttcacatcgatatcttcagtaagcccctgatgataagcagcctcctgtgtttgtgactttgcctcctgctcgctgataatctcaatcatatcagcctcctgtcgtcgcagagagatttcataacccattattttgtatttgatcgggtctttcaatggagcattaagcaatacttctacggttttacctttgataaagcccatctccacaattcgtttacggaagccaccgtgtcccaaaacttttacaatgactcctttctcacctgtttttaattcggacaatcgcatagtgtgtgtacctcaaaattttccgcaaagataattcataactttggggcatgcaaattatttagattgtttttaaataaggaagatttcttatcattattagcaaaactattatctttgcaatatgatacaaaatagagtagcacaatacatcgaaaaagagaagctgttttgtctgaatgacaaggtattggtgacattaagcggaggggccgactctgtggcattgctacgtctcctgctatcaatggggtatacctgcgaagctgctcactgcaatttccatttgcgggataaagaatcggacagagacgaagcttttgtgcgccgattatgccatgaatcaggggttcttttacacatagaacatttcgatacaacccaatacgccgcaaagaaacatatttctattgagatggctgcccgggaattacgttatgaatggttcgaaacgcttaggagacaacgtgaagccagtgttatcgcaacagcgcatcataaagatgacagtgtagaaaccgtattgttgaacctgattcgcggtacgggtatcaacggattactcggaattcgtccacgaaacggtaacattgttcgccctttactttgcctgagtcgcgaagaaataatagcctatctgcaatatatcgaccaagattacgtaacggacagcaccaatcttttggatgaatatacccggaataagattcgtttaaacttattgcccctgatgaaagagatcaatccatcggtgaaagagagtatcatccgcactaccaactatctgaatgacgcagcaactttatacaatcaaagtataggggaggcgcgtaaacgtatattgacccccgaaggcatccggatagaagccttgctgcaagaaccggtacccgaagccattttattcgaagtattacacccgctaggattcaacacgacccaaatagataatataaggcaaacgctcgacggacaaccaggaaaaaccttccttggtaaaggatggagagtcataaaagaccgtgacctgttattaatcgaagaagatacaactgcagaaaagtcccagccacctttccggttagttatggaagagtacgattatacttctgaatttataattccaaaagataaaaacacggcttgcttcgatgctgacaaaataaataaaacatgggagatacgcaagtggaaaccaggagatgtttttatacctttcggaatgaccggtaaaaaacatgtcagtgactacctgacggataaaaaattctctttgagtgaaaaagaaaagcaatggatattatgctttggagaacaaatagcctggctgataggagaacgtacggataaccgatttaaggtaaacgagaacacaaagcgggtaataatagtccgaatcgtttccgaacattcagattttattgaggaataacctaaagatacgaagcataaatttgagggtgcaaatagtaaactctttataggataaattgtatctttgtgaatataaaccttgaaaatatatgattgatctggcctgtaaacttccgatagagatacagatgtaataatatctgcgatttgactgacagatggaagatggttaaagcctggagtgaaattcagtacagagtaaagaaatataaatcattggttgacaaaataataataaactaaacgcttatttgctatgaaaggaaaaaagaatcttttaattctattctcctgtgttcttacagtaattatcgcaggactgttcgcttgcacacgcagcgcaaaagaaattattccgtcatcggaatatgctccttatgtcaatgcttatacaggtggagtcatttctcaatcttctcccatacgaatcgaactgactcaagatcaaccaatggtagaccttaacaatgaactgaaagactgtccgttcagttttactccatcgttaaaaggcaaagcttattgggtgagtaataacaccatcgaatttcttccggaagaaggagaactaaagccgggcaagttatatcaaggctcgttccaactaggcgattttgtcgaagtggatagcaaattgaaagttttcgatttctctttccgggtacaagaaagtaatttcacactgcataccgctccattggaaatagcctcttcttcacccgataaggtaaccgtaaagggagaaatccgttttagtgataaaatgactaaagaacaagttgaaaaaatactttccactaacggtacctctacaatcaccataggatccacatctaatccattagaatatagtttcattatcagtaatatccaaagaaaagaacaggattacgatcttaaaattacagcagacgggaaacctgtcggaatggacaggaaacaaagtgagtccattacgattcctgccaaagacagcttccgtttcctttccgccgaacgtatcagtcagcctgagaacgggatacaaatcgtcttctctgatccggtttctgatactcaggatttaaaaggtctaatcgaaatatccgagattccatcctatattttccagattacggataataaggtaaatgtttattttgaagccggtcaactcagtaaactgaccctgaaaatacatgaaggagtgaaaaacaatcaaggcaaagcattgggcggttcccattctatctctttcagcgaactgaacctgaaacctcaagtcgaaatatcttctgcaggtgccatcattcccgattcaaaaaatcttgtaattcctttccgggctgtcagtctgtatgctgtagacctacgggttatccgcatttttgagaacaatgtgctaatgtttatgcaaaataactcactgtcctcggccaacgaactaagacgatcgggaagactggtttataaaaagacactgtttttgggtaaagatccttcaaaagatctccataaatgggaaaactattccatcgacctggcaggcctgattcatcaggaaccgggtgctatttatcgtgttatcctatccttcaagcaggaatattcggcttatccctgcggcagtggtgagaatccgaaaatgcaattttccgaagaaaccgaatctctgaccaaggtcaaatctgatatcctttcggaagaagatgaagccgtctgggacaaaccggaaacatattattacttcagcgggaatgaaaatgccgactggagccaatatcgatgggatgaacgggataatccctgccatccgtcctattatatgacgtccgaccggatagcagcttgtaacgtactggcttccaatataggtatgatcgtaaaacgtaattcgatgaacaaactttggatagccgtaagcaatattctggacaccaaaccggtagaaaaagctaaagtcattgtctacaacttccagttacagcctatcggagaagcattgacagatgcggaaggttttgcaataatagaaacgaaaggaacaccttttattgtagtggcagaatcggaaaaacagaaagcttatgtaaaagtagccgatggagaagagcagtctaccagtcgttttgatgtaggcggcaaagacatccaaaaaggcttgaaaggatttgtatacggtgaaagaggtgtatggcgaccaggagacaccttgcatatctcgtttgttctggaggaccgtaacaaacgtattccggataaacatcccgtaactttggagctttacaatccaagaggacaattttacagcaaacaaatttcaaccaatgggctgaatggtttctatacattcaaggtcccgacacaaccggaagatcccaccggattatggaacgcctatgtaaaagtgggaggtaccgctttccacaaatcactccgtgtagagagcataaagccgaaccgtctgaaaataaacctgaaactgcccggagagattctgaaagctgcggataaagaagtacaagcacatctttcatcagcttggctgaccggagcaacggcatcgcgtctgaaagcaaaagtcgaaatgtctctgtcgaaagtcaatacacaattcaagaactacgagacatacatctttaataatccggcaacagaattcacatcaataagaaccgatattttcaacggtaccctggatgaaaatggtaataccgggttcatgctgaaacttccgacctctgagaatgctccgggaatgcttcgtgccaatatcacgactcaggtattcgaaccgggcggagatgccagtatccagactctgtcagttccctactctcctttcccgtcatacgtgggtatcaatctgaaccagccacaaggcagatatatcgaaacagacaaagagcatatttttgatatcgtaacggtcaactccgacggaaagccggtaaatcgttccggtctggaatacaaaatataccgcatcagttggagttggtggtgggaaaacgacaacgaatcattcgaaacatacatcaacagcagttccatcacccccgtagctacgggaagattcaacacaacaggcggcaaaggacaattcagtttcaaagtgaattatccggattggggacgctatttggtttacgtcaaagaccgtgaaagcggacatgctacaggaggtaccatctacgtggactggcctgactggcgagggcgttctaataagagtgacccgagtggcatcaaaatgttatctttttccattgacaaagactcttacgaaccgggagaaaccgtaacagccatattaccggcatctgccggtggaagggccctggttacgctcgaaaacggttcgtctgtaattcaacgggaatggatcgaggtatcagggaaagaagacactaaatatcaatttaaggtaacccctgaaatggctccgaatgtttatctccatatcagcttgctacagccccatgcacagacggtgaacgatcttcctatccggatgtacggcattatgccggtattcgtgaccgacaagcaaaccgttcttgaaccgcaaatcaagatgccggaagtacttcgtcccgaacaggcattcaaccttaccataaacgagaaacatggcaggccgatgacatatacacttgccattgtagatgacggtctattagacttgaccaatttcaagacaccggatccctggaataatttttatgcccgcgaagcattgggaatccgtacgtgggatatgtacgacgatgtattaggagccacggcaggaagctatggatcaatgttcagcacaggtggtgacgagacactgaagccatcggaccaaaaagcgaatcgcttcaaacctgttgtgaaatttatcggtcctttcagtatcggtaaggggaaaagccgtacgcaccaaatcactttacccatgtatgtaggttctgtccgtgctatgatagtagcaggtcaggacggagcatacggaaatgccgaaaagacagttccggtacgtacccctttgatgattctttcaacattgccacgagttttgagcaccaatgaagagattgaagtaccagtcaacgtatttgcattggaaaacaatgtaaagaacgtcaacgtatccatacaagcttccggtgcaggaacacaagtgacaggtaacaagcaacaaacgcttaccttcactcaaacgggtgaccgcctgatctttttcaagttaaagacaggtacgaaaaccggaaaagccaccattcatcttactgccaacggaaacggacaaaacaccaaagagaccattgagatagaggttcgtaatccgaatccggtggtcaccctgcgtgaaagccaatgggtggaaaccggaaagagcgaagaactcaattatcagttaagcagtggctcggaaggaaacagtatacagctcgaagtctcacgtattccgtctgtcgacatcagccgccgttttgactttctctacaattatcagcacaactgtacggaacaattaacctctaaagctcttcctttgctatttatcagccagttcaaaacagtagacaacgaagaatcagaaaagataaaagtcaatgtacaggaagctatccgtcagctatacggacgccagctaccgaacggaggtttcgtttattggcccggaaatgcctcggcagacgagtggatcacctcctatgccggtatgttcctgatactggcacaagaaaagggttatgcagtaaacagtaatgtactgaacaaatggaaacgtttccaacgggcagcagcccaaaactggcaacccgttgcccaagaacagagctggtggtattggcaggcagatttccagcaggccttccgcctctatacattggccatggccggagcaccagaacatggagcaatgaaccgcatgaaagaactgcctacactttcgcaacaagccaaatggcgtttggcagccgcttatgcactcaacggtaaagaaaaagcagccggcgaactggtattcagtgcaaaaacgactgtagaaccctattcatcgaataattatgtatatggttcatccgaccgggacgaagcaatgatacttgaaacgctattgctaatgaatcgtcagcgcgaagccatggaacaagctaaaatcgtttcacataatctgacaagagagacgtggttcagtacacagtccaccgctttctcactgatggcaatgggacgtctggcagaaaagttgtccggcacattggatttcagttggacactgaacggaaaacagcaaccggcagtaaaatcagcaaaagcagtatacgagacacctatttccacttcatcacgtgaaggaaaggtaattctgaaaaacaatggaaaaggagctttgaatgcagacctgatcacacggacccaattactgaacgacacactgcctccgatagccaataacctgcggataagtgtaaagtacgttgataataacggttcaccgatagatacgcattctctgcatcaagggacagattttatggcagtggtaactgttgccaataccagcggtacaaccgattatacaaatctggcattaacacacatcatccctgccggatgggagattttcaatgaacgaatgacaggacagattagcacttctgctccttatagctatcaggatatccgcgatgaccggatactgacttactttaatttgcaacagggacaagccaaaacatttaccgtccggttgcaggcaacgtattccggtgactttgtcatgccggccatccagtgtgaagcgatgtatgatgccaatgtacaggcaaggacacaggcaggcagaactaaagttgtcagacaaagcatcgaataagaaaactgatgaatcagattcttaagccacacaatcttcccccctcctttcaagggagggggtggaagataagtatcaaaagttggtggaaacctgcccttttcctccttcttgtcctgtatatattttgccttcccagccaattattcacctccccttactctaccgtcgtaacagaccggaacggtgaacttctcggtgcccgtatcgccacggatggacaatggcgttttcccccgcgcgacaatattcccgagaaagttgccacttgcctgattgaattcgaggatcgccagttctaccatcattggggagtcaatcctttggcaataggcagagccgtagttcaaaacctcaagcacaaacgtatcgtcagcggaggaagtacccttaccatgcagaccattcggttggctcggaacaagccgcgtacattcaaggaaaagctgattgaaatggtgtgggccacccgtttggaatttcgtaaatctaagaaagagatactgtcactttacatttcacatgcccccttcggaggaaacgtagtaggactggatgcggccgcctggcgatacttcggacactcggctgaagaactatcatgggcagaatcggccatgttggctgtactccccaactcacccgccatgatccatctttcgaaaagtcggcaagcactcctcgataaacggaaccgactattgacacacctgcataaaaaaggaattctggatacttcgacatatgaactggccatcagtgaaccacttccgcaggaacctttacctcttccacacatagcgcctcacctgacagactatttttatcaaacccgaaatggaaaatactccgtatcgaccatcgacagaggtatacagactcaaattgaaagtttggtagaacgatggaacagtgaattcaaacggagtgacatccgtaatctggcgattcttgtgattgacatccggacgaatcaggcgatagcctattgtggcaatgtacatttcgacaaagagcagagcggcaatcaagtagatgtcatccggtcaccacggagcaccggcagcattctcaagccttttctttattatgccatgctacaagaaggagaaattctcccaaatactttgttgccggacattcccgtcaacatcaatgggttcactccacaaaattttaatctgcaatttgaaggagccgtaccggcctcggaagccattgcacgctctcttaacataccttcggtaacaatgctgcaacgttacggggtacctaagttccacagtttcctgaaacaaatcggactgactaccctgaaccgtccctcaagccattacggactttctctgattctgggaggtgcagaagccacgttatgggatatcacttcggcctatgccaacatgggacgcagcctcaaccggttacctcaattcccgtgtacactcctcctgtcggattccatctccgttcatcgcccatcgtttcaatccggagccgtctggcagacttttgatgcaataaaagaagtgaaccgaccggaagaaatagactggcgtaccattccttccatgcaaaccattgcctggaaaaccggtaccagttatggtttccgggatgcctgggcagtgggtataacccctaaatatgcagtgggtgtatgggtagggaatgctacgggtgagggaaaacccgggttggttggtgcccgtacggcaggccctgtcctgttcgatgtattcaacctgctcccttcttctccctggttcgaacgtcctcagggcgaactggttgaagcagaaatttgtcggcagtccggccatctgaaaggacgattctgtgaagaaacagatactttgctgatccttccggcaggtctcaaaacagaagcttgcccttatcatcacccggtcaccttatcggcaaatgaacggttccgaatatacgagaattgtgccaatagcgaaccggttgtccgccgtaactggtttacccttcctcccgtatgggaatggtattataagcaacatcacccggaatatcgtcctctccctccctttaaatcaggatgtggagaagaccggttccaaccgatgcaatttatttatccgccaatgggagcccgtatccatctgcccaaacagatggatggcagcaaagggcagttgactgtcgaattggttcacagtcatccgaatacaaccatctactggcatctggacgagacatacctgacgcaaacgcaggacttccacaaactttctctccgtccgtcccccggcaaacactccctgacggcagtggatgacgagggaaatacaatttcgacaacgttctttgtggaatagcctctaaaatgataactttgtgccatgaaacagattttgaaagaaaacggcggactaccggcttcgattctttggacacttgctattgttgcaggtatatcggtagccaatctgtactataaccagcctttactgaacatgatccgccatgaattgggtgtttcggagttcgaaacaaacctgattgccatggtaacgcagatcggatatgccctcggactattgtttatcgtccccttaggcgatttgtatcagcgaaagcggatcattctcaccagcttctccatattaatcgtttcgttgctggtgatcgcgatggcccccaacatccacgtcatcctgtgtgcctcgctcctcaccggcatctgttcggtgatgccacaaatattcatcccgatagcttcccagttctcacgtccggaaaacaaagggagaaatgtaggaatcgtcgtatcgggactactgaccggcattttggcctcacgtgtagtcagcgggtttataggagaactgtttggttggcgtgagatgtattacatcgctgccggcatgatgttgatatgtggtatggtagtcatgcgggtattaccggacatacgcccgaactttcagggcaaatacagcgacttaatgaagtctttgctttcactgctgaagcagtatcccgagctccgcatcttttcagtccgcgccgcacttgctttcggttcatttctgaccatgtggtcatgtctggcttttaaaatgggaagtgcccccttctacgctgacagccacatcatcggtatgttaggattgtgcggcattgccggcgccttatcagcctctcttgtaggtaagtatgtacggaaagtgggagtcagacgattcaatttcatcggatgcggactgatcttatcagcttggttgcttctctttatcggagagaactcctattggggaatcgttgccggtatcatcatcatcgatatcggcatgcaatgtatccaattgagcaatcagacccgtatcttcgaactctgtccgagtgcttcgaaccgcattaatactatttttatgacaacttacttcataggagcctccaccgggacatttctggcaggaactttctggcaggcattcggttggcatggagtcataggcacaggagtggccttgactaccggctcactgctgattacttttttttcaaaacgataatccgaatagtaacaaaagttgttatataaatcatgaagtacggagtaaacagacaagtgttattaatcacagccggcatcgtctggatagtggcgggagccaatattctccggattggtattgtcacctggcttaatgactcacaatattggctttttaaggtaggcgaagccacagttgttttcctgctcttttttgtccttgtcttccgaaagctctactacaaacacactcgccggattgagcaaaagaaaaaagagaaaaattgccccttttctttcttcgatgcaaagggatggatcgtcatgtgtttcatgatagcaatgggaatcaccatccggacattacacctgttgcccgacactttcatttcggtattttacaccggactctcactggcacttatgttcacaggcacattatttatacgctactggtggcgcagaagaccacatacttagtacccatgcaagagctctctccgctcgtttttcacagaggtcgcccccagaacagcagggaaagccgaagggaataaaagacctaatgccccatagactaccctccctatagagaaagctcaaatatcagttagtatttccggacagttattaaactccataccgccaattaccacgtatttctgaacggctgaaatcaacaggctctcagaaaaaaggagcattgcctattcttaatgtggctaaagaacttttaaatatcccgactcaacttcatgaaataaatgacatttgcgccatttattgtatctttgcaaaattaaaagtgatgaagatggacttgaagaaagaagtgaaggaagagtttatccgtttccaacgaaatgagaaaaccgaaagtatcgtatacgaacgactggcctctattgaaaaagacgaatcgaaccgcaaagtattacgtctgatctcagcagaagaaaaagcgcactatgccacactgaagaaatatacggaaaccgacgttgcaccagacaagttgcgtatagccaaatattactggctggcaagaatcctgggtattacatttgccattaaactgatggagtcaagtgaagagaatgcacatcatgattatgccaaatatacagattatccggacctccggcaattggccaatgaagaagaagttcatgaacagaaattaatcggtctgatcaatgaagaacgacttgaatatatgggttcggtagtgctcggtctgaatgatgctttggtggaatttaccggggcattggcgggattcactctggccttgagtgactccaggctgatagccctgacgggaagcatcacggggattgccgcagctttatcaatggcttcttccgaatatctctcgaccaaatcggaaggaggagaaacgaaacatcccataaaggccgccatctatacgggtattgcttatatcatcacggtagtggcgctggttgctcccttcatattgatcgaaaacgtactgatagctttgggagtaatgctggccatggctttggtaatcattgcattatttaattattactattcggtagcacgcggagaaagtttccgcaaaagattcaccgagatggcagtacttagtttcagcgtagccggcattagctttctgataggctatgcactgaaaacatttacaggaatagacgcttaaacataaaaaaggaaaagaagaatcatgaaaaaagccccctcacctcttgtctctctgatccctctggtcgtattggttatcatgctgtttgccaccatacgtacctttggcagcgatgcactcagcggaggtagccaagtgtccctgctgactacaacagccgtttgcatactgatcggtatgggattctacaaaataggctggaaagactttgaactggctatcacaaacaacattacaggcgtatctaccgccctaatcattctgctgattatcggcgcattgagcggtgcatggatgataagcggtgtggtccccacattgatttattacggagtgcaaatcatacatcccagttttttcctgacctctacctgcattatctgtgccttggtatcggttatgaccggaagctcctggactacgattgctaccatcggaatcgctttaatgggcattggcaaagcacagggattcgaagaaggctggatagccggggccattatttcgggcgcatacttcggagataaaatctctccattatcggatacgacaatattagcagcctcagttaccgatactcccctcttcagacatatccgctatatgttgataactaccgtaccttcactaatcattaccttggttatctttacagtagccggattgtcacacaatgccggaagcacagaacatatagccgaattctcggccgcactggcaggaaagttccacattacaccatggctgctgattgtaccggtagttacaggtgtactgattgctcggcgggtaccttccgtcatcaccttatttctgtcggcggcactggcaggggcattcgccgtattcttccaacccgacctgttacaggaaatatccggtttgcaaaattccgaaggcacacagtccatcttcaaaggactgatgatgactctttatggagggaccagtctacagacaagcaatgaagcactcaccgaactggtggctacccggggtatggcaggcatgatgaatacagtatggcttattatctgtgcgatgtgtttcggcggggctatgactgccggcggcatgttaggaagtatcacttccgtatttgtccgcttcatgaaaaatacagtcagcatggtggcctctacggtttgctctggtattttcctgaacctcgccacagccgatcagtatattagcattatcctgaccggaaacatgttccgggatatttatgaaaagaaaggttatgaaagctgtttgctcagtcgaaccacggaagattctgttacagtgacctctgtattaataccatggaacacctgcggaatgacgcaagccacgatactgagtgttcctacactggtttatcttccctattgcttcttcaacattatcagtccgttaatgagcattacgattgctgccatcggatataaaattgtgagacgcaagtgaacaatctgaaaagggagttgttcttggaataaacgaacaacagttttaaacctaaacaaaaaaaagttatgaaaaagtttattgcattagtagcattagtattagtaagtgcatcgactttaatgtatgcacaagagtcacagagagacatacgccgcgctgaccgtaaagcacaaagagacgcagaaagagccagactgaaagctgaggaacaagctgccgaccaagtggcctatcagcaagccgtacaggctatcaaagacaaacagtttgtactggaagccgatcaggtaatcttcaaacgcggccagacagctttcgtatcgtccaacactaactttgtaatgttgaacggacagagagcaaccgtacaggtagcgttcaatactccgtatcccggccctaacggaattggcggtgtaacagtggacggaaccacttcggatgtaaaagtgactaccgacaaacgaggcaatgtgaactgcaacttcagcgtacaaggtatcggtatctcggcacaagtctttatcacattgacaaatggaggcaacaacgccactgtgaccattaatccgaacttcaactccaatacattaacgttgagcggcaaccttgttccgctgaaccagtcggatgtatttaaaggccgttcatggtaataagagtgacgagactctatttaagctcgtaactaattcacataactccgctgcaaatcgcacaaaaagtgtacatttgcaacggagtttttttatggatagattatgagagaatatatcatcgcagataatcaggacatcacgaaagcaggaatgatgtttctgttaagcaagcaaaaagaggtaagcttgttgctggaagccgacaataagatggagttggtccagttgttgcgcattcatccgcaagcggtggttattttagactatacactatttgatttttccggtgcagatgaattgatcatccttcaggaacgattcaaagaatcagactggttattgttttcggatgaattgagcatcggatttctgaggcaggtattgttcagcagcaatgctttcggagtcgtgctgaaagacaactccaaagaagagataatgtcggccctgcaatgcgcatcacgaaaagagcgctttatctgcaatcatgtaagcaatctgttattatcgggaagtggaaatgtaaacactgcttcagccgtgcacactttcgtaccgcaggaagaccgtctgctcacaccgacggaaaaaataatcttaaaagaaatagcttccggcaaaacgaccaaagaaatagcggcagagaagcatctgagttttcataccatcaacagtcaccgaaaaaatatattccgcaaactgggagtgaacaatgtgcacgaggctaccaaatatgccatgcgggcaggcattgtggatctggcggaatattatatctaaagcagaagagcgtaccgaaaatcaacccaaatacaccgattcatacagacctcgagcagcgaccgattattaagccgcatctctgtacaaaccggtgtcatctgaaggagctttcgttatattcttatcctatttctccactcccgaaacaaacccgggattcggcgtcataaatcacgccaaactgtcccggtgcaattccctgtaatttttcggaagaaataatccggtatccctcttcgtcatgtagcaaacggcctttgataaactcaggtgtatgccggatcttaaatgttacttcctcctcgcctgtcgagccttcccacgggttatctgtaataaaattgaagtctttcatcctgaattcataaccatactgctgctcggcatcataaccgtgggagacgtaaataatgttatcctgaatatccttcttcacaacgaaccagggtcctcctcccaatcccaatccttttcgctggccaatggtatgaaaccaatagccgcgatgagtaccaatcttcttacctgtttcaaattcgatcaccgccccctctttttctcccagaaagcgacggacaaaatcgttataatttatcttgcccaaaaagcaaattccctgactatccttccgacaggcactgggcaatccggcctgcaacgctatctcacgcacttcatgcttcatcagcccacctatcggaaacaacaatttcgaaacctgcaaatagtcaatctgggccaggaaatcagtctgatcttttatcgggtccttggctgtacccagccaggttttcccgcctagttgcaaggtcgtagcataatgtccggttgccgtaagatcgaaatcttttccgacctgctgctcgaaacagccaaacttaatcagcttgttacacatcacatccggattcggagtctgccccttccgtatcttttctatggcataagcagccacattatcccagtattcccgatgtaaatcgacaacctccagtgccaaaccgtagcgtcgggctatggcagtagacagttctatatcctcttcggcagaacagtccatgtattccgccccatccatacctattttgatgtaaaacagtgtaggcttgtagccctgctcacaaagcagatgtacaacaaccgaactgtccactcctcccgataataatgctgctatatccatttttttaaattttctctaatgcctgacgtaagtcatcaataatgtcctcaatatgctccgtacctatcgaaagtctgaccgttccgggtttaatcccctgttcctccagctcctgcgcattcaactgcgagtgtgtggtagtggccggatgaatcaccagcgacttcacatcggccacattggccagcaaagagaatatctgcagactgtcgataaacttctgcgcttcctccgttcctccctttacctcgaaagtgaagatagaacctgccccgccaggaaaataacgttgatagatggcatgatccggatgaccgggcaatgatggatgattaacagccgctaccttcggatggttcaccagaaaatcaataaccttcaaagcattggccacatgccgttctacacgcaaagacaaagtctccaacccttgcagcaggataaaagcattgaacgggctgatggcagcacccgtatcgcgcagcaacacggcacgtatacggacaatgtaggcagcagccccggcagcatcgacaaaccgtaccccatgataacttacatccggctcggtcagttgcgggaatttaccggaagcaacccagtcaaatttaccggaatcgacaataactcctcccaacgaactgccgtgtccgccaatgaattttgtggcagaatgtaccacaatgtctgccccgtgctcaatgggacggataaggtaaggcgtaccgaaagtattatccacgatcagcggaatccgatatttatgggcaatggcagctacggcatccatatcgataatattggaattggggtttcccagagtttcaatgaatatcgcctttgtattttcacgaatcgcccgttcgaaattaaaaagatcggacggatctacaaaagtggtcgttactccataagcaggcagagtatgcgccagcaagttatatgtgcccccataaatggtcttggcagccacaatatgatcaccggaacgggtgatattctcaatagcataggtcacggcagcagctccggaagccacggcaagcccacctactcccccttcaagtgctacgatgcgttcctccaatactccctgagtggaattggtcagtcgtccataaatattcccagggtcttgcaatccaaatcgtgcggcggcatgggccgaatcccggaacacataggaagttgtctgataaataggtacggcacgcgcatcggttgccgggtcgggagtctcctgtccaacatggagttgtaaagtctcaaaatgtaattttttcgtttccatttgctatctatatttagagttcattgtcagtgtccaatctttatatgtggcaaagatagaggaatccggtatggaaagaaatcgcacattgaaggcatttttataccacaatcgtggtagatagagcaggttattaactacatttgcaggcaaataaaacattattgatatgaataaacttctatactgtttctttttatcattttctgtcatggctacctcggcatgtaccgatgataaggaagaacgggaatttcctccggcccccgatttcagcctgatgatcctgaaagagaatctgcacagtaacggaggcgacgtattacgcaccgatacttatgtatacgataacaataaactaacgacccataccacattacaggagttctacgggcagagcctgacccacgaaacgactctctcctactccggtaacgaagtgacattggcagatgaaaacggaaataccgccatttatatcttaggaagtgcgggatatgccaccgaatgtacttacaaattgtccgaccaagtcagaaagtacaccttcacctattccggtgaatatcttacccggatcgatgaagaaataaacagtacgccttattcttccgtagagttggcatacgacgacaacgggaatttaagccatatcattgccaatggcttgcaaaccaattatcaggcgggaaatacggagaacctgtatcagctcccttgcctgcaagtttgcgaaacttaccccctgtctttccacaacgacgctatttatgccggactgttgggccgtcagtccaaacacctgattatcggcaacactccgaaagaaaacaaagaggagtatacaaaatacacttatgaactggatgaaaacgaaaagccaaccggaatcatcgctaagaccacttctacaggtactgtgatcgacataaacggtaatgcatacgatgaaacaaaaacagacacgagaaccatcggcatcaccatcgaataaggggaacgacttcaatcctgcctccacgaagtagtaatgtaatgccccataacaatatatgttatttcgattacatatattgttatggggcattacatatattggcattttccttacaaacaattcctccccggactcaccggcacctctccggattccatacgccgagggaggaacgggacgtataatcccatgatgccccttatcactcgctctttactctccggcaaagaacttgctgaagaaaagaatctgataatcaatggaattattccagtattttccattgtgttcaccgggacgggtaataaaatcatgatctatcttgcggcccaacaaccgatcatgaaagtctttgttcacattcagaaaaaaatcatcctcaccgcaatctataattaaagcaagatcaccattctgaatcttatcgagttgattgactaccgtatgttcgtcccatattcttttatttgaggccagttcacccaactgcttgttcatgctccagtttttggggaaaggacggatatcgacacctccgctggtgcttcctgccgctccaaacacgtctttatggcgaatacctaaccacattgccccatgtcctcccatgctgagaccggtaatggcacgtcccttccgatcagcaatcgttttataattacggtcaatgtagttcactaactctgaagaaacaaacgtttcatatcggtacgccggattcttggggctgtcccagtaccaactgtctttgccgtcgggacacacaaaaatgatccctttttcatctgctatttccggcaagttcggttttatctgaatccaggtcttagcatgaccgccatacccatgcaacaagtaaagtaccggacaagccgctgcattttttcccaaagcaacatcaggggtcactaccaacacctgcacctccttattcatagagggactcttcaccatcagcgtatctacccttgcggcactaagcggcaatacaaataaaagcagacaagccaaaaataaatttcttcttttcatttttaatctatgttttttagagtttgtcttttcaatctttctcttccaaagcagaagggttgaattccgtaaccggcttttcgaaagctttcccacaatggtcgcagatatattcccaatgattgcctccgggcgggacagtagccagcatagaaacaatggcagcgctgacagccctcacacgatgctcctttttaagaacaaacttaatccggtccgaaccgcagaaaggacaaaacttctgttcttcgggtatcatctgattctgcctcagcaactgcatggctgcttcataatcgcaatccgccaccaagacatccactcctgagatgtcatggacaaaaccccgcaacaaggtcgacatattttcattatgtaatagagaatcaataccttcattagcaagtgctccctgtataatatgagcttgaaaggcatcatcgcaagtaatcagttttacggttttcatcttttctatttaaaactttcccacaaaaatagcagataaaaacgagagacgaaaccatttttatataactttgcacagaattcacaaagtatatcgaaccgggccaatgaagaaaaatgttttgttcctgttgttactcggcctgctcaccacagtcagtgcgcaaccgacacaccgaataaagggaactgtgattgacaaagccagtcgtcaaccgctggaatttatcaatgtactggtcttagggctgggacgcggaggagtgacagatgccgaagggcacttcaacatcggagaagtccctccgggcatttatcgtctgcaggcatctgctgtaggatacaaaaccatactcacccccgaatatatcgtctctactaaagatctcaccatccaaatagaaacagaagaaaacctgaccgaattagaaggagtcacggttactgcttctcctttccgaagagacccggaaagtcctgtagggctacgtatcatcggattgcaggaaatcgagaaaagccccggagccaaccgggatatctcacgtattgtccaatcttatccgggcgttgccttctcccctgccggatatcgaaacgacctgatcgtacgcggaggatctccttccgaaaaccgtttctatctggatggagtagaaattcccaatattaatcatttcagcactcaaggggcctcgggaggtccggtgggcatcatcaacgcagacttgattcgtgaagtcaatttctatacgggagcttttccgaccgacagggggaatgccatgagttcggtactcgactttaagcttcgggacggagatatggaacgcaattcattaaaagcaactttaggagcctcggaagtctcgttagcatcgaacggacatataggaaagaagacatcttatctggtttcggtgcgtcagtcatacctccagtttttatttgacatgttggggttacctttcctgccaactttcaccgacgcacaatttaaactgaaaactcgcttcaatgccaacaacgagttgacaatactggggctcggaggaatcgataacatgaaactgaataccaagctggatggagaaaaagcggaatacatattgagttacctgcccaagatacagcaggagacttttacactgggagccgtataccgtcactatgcaggcatacatgtacagtctgtagtcgtcagccacagttacctgaacaaccgcaataccaaatatctgaataatgacgaaagcagtgcggacaacttattcctgaagttgcgctcagtggaacaggagaccaaattccggatagagaacacctcgactttcggtaattggaaaattaatttcggagccaatctggattattcccaatacaccaacaccacctttcaacgagtgtatattgatgaaggcaggacgtttgattatcacacatatctgggtatgtggcgttggggcatattcggaaccatcaactatgcaactaccgatgaacgattcactgcctcactcggcgtacggaccgatgccaacaacttttcttccggcatgaaagggatgggcgaccaactctcaccccgcctgtcactatcataccggctgacagacggattatatttaagtggaaatgcaggactatattatcagctcccgccttataccggattgggatttaaagataacaatggagcatgggtcaacaaatacctccgttacatgagcgtcagtcaagaaagtctcggcctgagttggcatccgggaaatacattcgaactgtctgccgaaggtttttacaaacaatatgataaaataccgttctccatcgcagacggcatccccctggcttgcaaaggcaatgactacggagtcatcggaaacgaagccttgtcctctaccgcccaaggacgtgcatacggcatagaaatattaatgaaatggctgatagctaaaaaactgaatctggcatcctcgttcaccctgttcaaaagcgaataccgcaacaacaaacaatcggagtacatcgcttccgcttgggacaaccggtacattttcaatatgagtggaacttataactttccacacaactggagcctgggcatgaaaatcagctgtataggaggagcaccctataccccttatgatgtggaaaaatcatctcttgttacggcatggaatgcacagggacgtccatactatgactacacaaagtacaataccggacgcttgcccgccttcggccaactggatgtacgagtggacaaaacattttatctgaaacgctgtatgttgggattctacatcgatttgcagaatgtgacaaacagcaaattcaagcaaccggatatcctgatgagtacaggcgttatcgaaaatccatccgcccccatggcagaacagcgctacaaaatgaaatacataacccagaaaagcggaacattaatgccaaccttgggtatcacatttgaatattaaatctcgaaacaactatattattaactataaaaactcacaaaatgaaaaaaagaattgtttttattgcggcacttttatgcggaatgtgcttcacgacagcatccgcacagttcaaaatcggtggaaagaaaatcaatgtaggcaaagtggtacaagccggtagcgacgcagcgaaagccatcaccttgtccgattcggacatcgcagccatgagcaaagaatacatgcaatggatggacacccacaatccgctgaccgcagccgacagcgaatacggcaaacgcctggagaaactgaccggacatatcaaagaagtagacggactgaaagtgaatttcggagtatatgaggttgtcgacgtgaatgcttttgcctgtggtgacggcagtgtccgcatctgtgccggattgatggatattatgacggacgatgaagtgatggcagttgtcggacatgagatcggtcacgtgattcatacagactctaaagatgccatgaagagtgcatatcttcgttcggcagtaaagaatgctgcaggagcagccagctctaccgtttccaaactgactgattcggaactgggagctatggcagaagcattagccggtgcccaatattctcagaagcaagagagcgaagccgatgattatggtttcgaattcagcatcaaacataacattgatccgtatgcaatgtacaatgctctgaacaaactactggaactctcggccgaggcccccaaagagtctaaattccagaaaatgttctcttcacaccccgatacagccaaacgtgtagcacgcgccaaagaaaaagcagacaactatactaagaacaagtaagttcgagaaccacaaaactgagtttaaccgaggccggatcccaatatatgaggtccggcctcggtatttttgaaaaaattcattaataattccgatagtttttgcgtgagtccgtactttggtgtaatttgcggtcatgaaactattcaaacttatatggaattcttagtaattattcttttactcgtactgaatggcatttttgccatgtacgagattgccttagtatcctcaagtaaagcacgtctggaaaccctggtcagcaaagggaacaaatctgcccggggagtattgaaacaattggaagaacccgaaaaatttctttctaccattcagattggtatcacgctgatcggtatcgtatcgggtgctttcggtggagtagccattgccgatgatgtgactccgctctttgccatgataccgggagccgaagtctatgcaaaggacctggccatgatcacaaccgtaatcgtcattacctacctgtcactgattatcggtgagcttgtacccaaatccatcgctctcagcaatcccgagcgctatgcaaccttgctgagtcccgtcatgattctgctgaccaagatttcattcccttttgtctggttgctcagcatttccacccgcctgctcaacaaactgatcggtctgaaaagcgaagaacgcctgatgactcaggaagaactgaaaatgattcttcaccaaagctcggagcagggtgtgattgacaaagaagaaaccgaaatgctacgtgatgtctttcgcttttcggataaacgtgccaacgaactgatgactcaccgacgtgatctggtggtgctacatacgactgacagcaaagagaaagtgcttcagatcatcgacaacgagcatttcagtaaatacctcctgattgatgacgacaccgacgaaatagcaggtgtggtttctgtgaaagatatcatactgatgataggtagcgaacaggaattcaaccttagagaaatcgcacgtcccgccttgtttatacccgaaagtttatacgctaaaaaagttttagagctatttaagaagaacaaaaataagttcggagttgttgtaaacgagtatggcagcacagagggaatcattaccctgcatgacttgaccgaaagtatctttggagacattctggaagaggacgatacggaagaagaggaaatcgttcgccgacaggacggctccttgttggtagaggcttcaatgaatatcggagattttatggaagagatgggaatactctcttatgatgatatcgaatcggaagactttacaactttaggcggattggctatgttcctgataggacgtattcccaaagccggagatatattcacttacaaaaaccttcagttcgaagtagtggatatggaccgtggaagagtcgataagctgttggttattaagagagaagaggaggaatagcaactcactttttatattaatttaaagcacttaacaatgaaaaaagtaattatgttagcagccgtcgttgctgcattggtatcctgccaatcaaaaggaacgaaagctgaagaagcagtcgcagacagtctggcagtagctatggaacccacaatggaagaaacccaggtatatgaaggtgtgcttcctgctgctgacggtccgggcatccgttacgtgttaactttgaacacactggcgaacgcaaccgatacaacgtatacactggacgtcacttatctggatgctgaaggtaaaggcaaagacaagacttttacttctaaaggaaagccggtaaaagtggagaaaaccgtcaaagataaaaagaaaacggccatcaaactgaatccgagtgacggaagtgaacctgtttatttcgtaattgccaatgatactaccctgacactggctgatgacagcctggaagtatcggaaagcgatctgaattacaacattatccgtgtaaagtaacgccgaattagcttaaacttacaaaaacaaaagccacgctgtacatattgacagtgtggcttttcttgttttatcggcccagaaattatttcgtcagtttctcaaaatatggcaaacgttcaaggggaacatctattgtcattgtccgcggccctttaaacaccttgccccgatcatctttccatctaccctttggcaacattacggtacggcttgttccggatgtcagcatcggagctaccagatatttatcccccagcataaactggtctttgcaatcgatgaatccctggtgaggatactgatattccatgtggcgaacaatgggttcaccggtctttgacgcatgttttgccaactccaaaatataatctcccatttgctggtgaagatgggcatacttcgcacaaatagccacattctctttactgagaatacgccaaggagctaccgagaattgcatcattggcatcagggcatgcacctggcacgaacgtacaataagttcttcatcaaatttcttcacattcagaaaagctccgaattgtcctccgcctaccatatcgggacaagtataataatgccccaacaatccggcagcagtcatatcgggaatcaataactgagtcgcacgccaagaataatctttatcacccagccgctgtaccaatgcctggccacccaacttccaagatgcacgcaattcattgtaaggaaaactcaaacctatctcagcccatttttccataaaagtattcacattggcattcttatcatgaaaagtatactctcctgtcatataagctacgtctccaccatcaaacttaaatccgtcgataccatatttttcttgattggcttttaactgttccttcagataattcatagcttccggatttgtggtatcataacaggcactgtaaccattccaccaatgaataatggccgtgcgcccgtttttatctttcaacaaatatccttttgcttccaattcacggaattcgggactatcgggcgaaacatagggagccacccacaacatcaccttgaatcccatccggtgcaactcgtctgtcatccctttcggatccggaaacctctcggttttgaagtcaaagttaccataatatctctgccagttatcatctaccataaacaccccctgaggaaatccgttctccacagctttatgggcataattcataatgtcttcctgattttgatcatacatcagctcaatccaggtattatattgcggaagagaaaagaaagtaggttccggaatctttcccgaagatggaaaatgtttagccgatgcagccagcaaagcctctttcagcgtagttccggctttcaccggctctatcttttccgagtctgaataaataatcagctgcccatcctttacttcaaaacaaaacggattttcggcccagatatacctgccctccgaagaaagcatgaacggcactacttggttgttcatattattgcgtgacatgtcttgcatccgcaagtgatcattgaatggcatttgatttcctaaagccacgaatccaccccaccatctttcattttgcaggggttcgatcaccgttttcaatttttcctgtgcgactgcaccgagcagcagcacgaatgtcacgagaaatagtaaagtcgcttttcgtttcatgatagttagattaataattaaaattctcaaggggcaaaaatagataaaaaagaaagaacagatcatctatcggcaaagaattattatttccggaccgtagcttcccgcataaaaacagaatctaaattttccgattccaaattcttgtccgaattttgcacattacaagcacctgttcaaatctcccttgcctatttttcatcgaccgcagccacggtggtttagagaagcttttatctttttcaccggaactttcggaatccaacaggccctaaataattattttcgcagtcacaattcagaaaagaatagaaaaaagattctttcattatatttttttctatctttatcagacagttacacatacaatctaaaaaaagatggaacaaacatttaaagcgcgaaatccccaattaggagtttggttgttcgccataggtataatagcatgcattgcgatcagtttcataactatacaagcaatctggataggtaccgcatgtataggtcccagtgcaaccatctatttttcacaaacatcctgcaaatacattgtcaagcaaaacggagatttacaaatagtaaatgacttcttccgccaaaaacgaacattcagtcatatcactgatgttacgtatactcgccatgccttgggcatgcaaaaaataaagatcagacacgccaccgggtttgtcatgatagatccccaatcaccccgggaactgataaaagccctgcaaaagacgaatcccgatgtaagagtaaagaactttatttaagacaggactcacaacggaaaaaccaatctcccatctaacccaagatacgaaatgaaaacacctaaaacattaaaggtacatttgctattatacctgttttgcctgagtgtatctgcacaaaccacggacagtattgtccaaaaactaagccaatacgcctacctgatcgataatttttccaaatatatccctcaagagaaggtttacctgcaatttgacaataccagttattaccaaggtgataatatctggtttaaatgtttcctggtcacttccgacctgcatccggccactgacctgagcaagattttatatgtcgaattattaaatcccggtggtgaagttatcgacaaacggacattaaaaatagaaaacggacaatgccacggagatttcacactaggccaaatcccgttttattcaggattttatgaaattcgtgcctacacaaaatatatgctgaattttggaggagatatcattttctcaagactgttgccggttttcgacaaacctaaggcagaaggcgactttacggaaaaagagatgcggaaatatgcgacaggaaactacccgctggagcgtcccaaaccgacaaaaggtaaaaaagtaaatttaaagttcttccccgaaggtggaaatctggttcgggggatagaatccgaagtggcttttgaagcgacagatacctatggaaaccccattaccctcaccggtattgttattaacgaagaaaaacaagaaacagcccgtttcaatgtcacacatgatggacggggaattttcaattacacgcccacgggagagaaacaaaaagcaatagtcgaatttaatggcaaaaagcaccagttcaatatgccggaagccttaccggaaggatatatattacatgccgacaatttatcatacacagacagcattgaaatagcagtgcaaaagaattccaataccccctccggcgtattgggactggcagtcatcagcggaggcaaactatacaaattctgcctgatcgatgtcgaaggtaatgaaacgattcgcttcaaaatagataaaagtaaattagtacccggagtttcccgaatcgcgttattcaacagtaacggagaggtcctatcggatcgtttgatatttacctatccccaagagcaattatccgttcaggtacaggcagacaaagagacatacgccccttacgaattggtaaaccttgaactcaccttgaccggaaaagaaaagattccggtacaacccccatttgccctatctgtgagagacggcatgaatgaagtagaatcagggcacaatatgttgaccgatcttttattaatgtccgaaataaaaggatatgtcaacaatccccaatattatttcgaatcccgggacgatacacgccgcaaggcaatcgatctcttattaagagtgcagggatggcgccgctactcttggaaacaaatgacaggaattgagtctcttgaccttaaatacggaccggagcaaggtatcgaaacgcgagggcaggttgtctctttcgtccggcaacttcccaagcctaacgtagaagtgtcctgcttcctgaagaaacgcggggagaatgaggaaaacagcagtttcatcgaagccatcactacagatagtttaggacacttctcactaatatccgatatatacggaaaatgggacttgatattggcagttacagtcaatagaaaaaagaaagattaccgtattttattggataggctattcagtcctgccccccgaaaatatcattatgcggatatgcaggtaagcattgccaatgcagaaaaagagaaagaacttatgcccgaagtggaaaccactcccctacctgaagaggatatcgaaaccttctttgccgcttacgcagattcgctggcaaagacaggtaaccatgaaaagaactaccgtttaaaagaggtaactatcaaagccaaaaagagaaccaaagaaaaagagatatatgaaagccgttcgaaatcgattgcttattatgatgtacattccgaactggacgacataaaagacagtggaaaatttattggtgacgacatacacgaacttatgatgaacatgaataaaaatttcagtcctgtttcaggacgaaattacctgtattataaaagtaaaatgccacttttcgtaatcaactatgaacgcacccggcatacagaaatggattataataaatacaaatatataagactcgaagccattaaatcgatttatatcactgaaaatctatctacgatctgccagtatgcagatccgcgattgactccgttcgatgtatccgacttatacagttgtgccgtactgatcgaaacatatccggaaggtaagataccgacagaagcagggaaaggtgtccgaaaaacatggctcgacggttacagccaagttaaagaattctatcaccccaattattctgtgctccctcctgtccccgactatcgtcgtacattatactggaatccgtctgtcactccggataaggagggaaaagcacatatccggttctataataacagtagatgccggaaactgaaaataagtgcagaaactatcacaacgaatggattaatcggtacctacgggaattgataaaaaacgggaatctcccgaaagaatacagagaaaatacagttttcatttttcctttcgcctgttttacttttcccaatatggatagttgccatcatccgtggggaggacattcagaagtttactaaaaaaggtggcatacggaataaccgcgaagccacctttcttttactttccagcctatctagccactatcaactggacaccaatagcaaatataaaataagctacatagcagagtatggaaacgcccagggaaacaagcagttgtttcataaaagacttttcctgccgcatatgattataattgaacgtagcacccatgatgccgaacaaggctccaatcaacccacctagaaagacaagtaacacaggcagaccgcccactatgtattcgcggatagatagccgttcctccagatcgattttctgtccgcggaacacagcgacatggacaaaatcaaaaccatagacaacctttatttcttctttttccccattggtgttaatcacataatatttcggattgaatcgtccttgttttttgatctctcttccgtcttggtataaacgttgattaaaaggaccgtatttcaactttaaatcaccttgtacaccttccaatgtaaaattcaactcttttgccatactatttattttagaattaagtctatttacaaagatagacaaaagctttgattttcatcattcataaattatttaatttaacgtgaatacgatataattcatcaatctgttatcttaaaaaaataggaatacagcaataaaatcatttaagttagaatattcaatcataagatttaaca

SEQ ID NO: 4994 - DNA, 157491 bp, Unknown
  gut microbiota DNA sequence
atgattttccagtgtagatatgtatatcagtacctaacagtttatcggcacgaagttaataatccggagatccaaaccccaataaaccgataacagaagtgacggatatgcagttatccgggagtatttatccggattccatttccggatcactgtctttctacacagagcttgtcagcgaaaccgcatgatacgctccatagagtcagtaatccatccatttcactgacaatcggtcagaggctttatcaaaaagaaaaacgacttcacggggttcaggagtcaaaagctatattctgtttggcagaaaaagacgaaatgcgtaactttgagacctatttatcaagagatcaatggcaaaagagaaaaccgtttatgtatgcagtaactgcggacaggaatcacccaaatgggtgggcaaatgtccttcgtgtggcgaatggaatacctatgtagaagagattgtccgcaaggaagttccgaataaacgtccggtatctggcatcgaatcgcccaaagccaaacccgtcaccctgagcgagatcgaagcagatgaagaaccccgcatcgacatgcacgacgaggagctgaaccgggtgctgggaggcgggctggtacccggatcgctggtactgatcggtggcgaacccggcatcgggaagtccacactggtgctccaaaccgtgctccacatgcctgagcggaggatactctacatctcgggagaagagagcgcaaggcaactgaaacttcgtgccgaccggttaacccggacttcgagcgactgtctgattgtctgcgaaacatcgttggaacagatctatgtacatatcaagaatacacgtccggacctagtaatcatcgactccatacagacgatatcgaccgaaagcatcgaatcgtcaccgggaagcatcgcgcaagtccgggagtgctcggcatccatcctccgttttgccaaagagacgcataccccggtgttgctgatcgggcatatcaacaaagaaggcagcattgccggaccgaaggttctagagcacatcgtagacaccgtactccaattcgagggagaccagcattatatgtaccgtatcctgcgcagcatcaagaaccgctttggaagtaccgctgaattgggcatctatgagatgcgtcaagacgggcttcgccaagtcagcaacccttcggaattgttactgtcgcaggaccacgaaggcatgagcggggtagccatcgcatctgccatcgaaggggtaagacccttcctgatagagacgcaagcacttgtcagctctgcggtttacggcaatccgcaacgttcggcaacgggattcgatattcgccgcatgaacatgctgctggccgtattagagaaacgtgtcggatttaagctggcacaaaaagatgtctttctaaatattgccggaggactgaaggttaacgaccctgccatcgacctggctgttatcagtgccatcctttcatccaatatggatgctgccatcgaacctgaggtttgcatggccggagaaatcggattatccggtgaaatccgtccggtaaaccggatcgaacaacgtatcggtgaagctgagaagctcgggttcaaacggttcatcctacctaaatacaacatgcagggcatcgatacaaagaagctgaggatagaactggtgccggtaagaaaggtggaagaagcattccggacgctcttcgggtgagttcaccacagagaacacggagtcacacagagttcttaccattaaacattaaaacatggagataaatgaattaacaggactgatactaaagaaagcttatgaagtacatactgttttaggacccagattactagaaagtgcttatgaagaatgcttatgctacgaattaatccaatgtggattaaacgtagaaaaacagaaagcactacccgtagtatataaaaacattaaagtagatgcaggttacagattggatattgtagtcaacaatgctgttataatagagataaaagctgtagaagaattacatcccgttcacaccgcacagctaataacctatttaaaactatcaggaatcaaatatggcctgcttatcaattttaatgtaagaagcctcaaagaaggcatcagaagatatattgtttaattaaaaaagactcagtgaaactctgtgtcactctgtggtaaaccatgatacaagaataccaactccgcatcctccccgaaattgccgccagcgagcagcaactcaaagcatacctttcacaggagaaaggactgaatcagcgcgatattaccgccctgcgtacactgaaacggagtatcgatgcccgccaacgcacgatctacgtcaatctcaaagttcgggtatacctgaacgaaatgcctaaggacgatgagtacgaacatactatatataataatgtggaaggaaaaccgcaggttattgtggtaggtgcaggccccggaggactgtttgccgcattacggctgatagaactggggctgcgtcctgtcgtcgtggagcgtggtaaggatgtgcgcgaacgtaagaaagacctggcacagatcagccgagagcatcgggtagacccagaatcgaactacagtttcggtgaaggaggagccggtgcatactcggacggaaagctgtatacccgaagcaagaagcgcgggaatgtggacaagatactcaatgtattctgccaacatggtgcttctacggccattctggtagatgcccatccgcatatcggcacggacaagctgccacgggtgatagagaatatgcgcaatacgattattgaatgtggaggtgaggtacacttcaagacacggatggatgcattgatcatcgaacagggagaagtgaaaggaatagagacgaatacgggcgaaacattcctcggtccggtcatcctggcaacaggtcattcggcaagagatgtatatcgctggctggccgccaacaacgtgactatcgaagccaaaggaatagccgtcggagtgcgtctggaacatcctgcaggattgatagaccaaatacaataccacaaccggagcggaagaggtaaatacctgccggctgccgaatacagtttcgtcacacaagtggacggccgcggagtatacagtttctgcatgtgtcccgggggattcatcgtaccggcggccagcggtcccgaacaggtggtagtcaacggaatgtcgccatccaatcgcggatcccggtggagtaactcgggaatggtagtggagatacaaccggaagacatcatcaacgataaacggttaacggtaaacaatgaagcagaagaaaccttccccgaactggctgtgctgcacttccaggaagagttggaacgccagtgttggttgcaaggaggcagacgccaaacggcacccgcacaacgcatggtggactttacacgcaagaaactgagttacgacttgccggagtcttcgtacagccccggattgatatcctctcccttgcatttctggatgccggaattcattgccggacgactgtcacaaggcttccaacagttcgggcgcagcagccacggtttcctgaccaacgaagccgtaatgataggagtagagacccgtacctcttctccggtccgcatcgtacgagacaaggataccctgcaacacatcaccttacgcggtctcttcccctgtggcgaaggagccggttatgcgggcggcatcgtctcggcgggaatcgatggagaacgatgcgcagaagcagtagcacaatttatgaatccatagacttatgatgaatcaccaaccagaaatagctatcgtagaggcgaacaccctcaccagcctgggactgaaaacaatcctggagagaatgatccccatggcagtcatccgcacgttccatagcttcggcgaactgacagatgacaccccggacatgtatgcccactacttcatctcggcacagatttatgtggagcacaacgctttcttcctcccccgaaagcggaaaaccatcgtgttggcgggagacagccaccagttccaactctccggcgtccccatactcaacatctaccaggcagaggaacagttggtgaaagacatcctaaagctccaccagcatgcacatcatgacggctatccggtaaaggacatgcctcctaccccgccgaccaccggacacgaactctcggcacgcgaaatcgaggttctggtcctgatcaccaaaggactgatcaacaaagagatcgcggacaaactgaatatcggcctgaccaccgtaatcacgcatcggaagaacattaccgaaaagctgggcatcaaatcggtttcgggcctaaccatctatgcggtgatgaacgggtatgtggaggcagaccgcatatagcgaactatgtggtgaatccatggtgaaagcatatatcctaataaatgaggattgccgtttaacattttttgctgcatctttgcaaacgaatcaatgaaaagatacagcacatgaagaaaaacagtattcttattgcccttgccctcttttctgccggtggcacatgggctgaagagcttccgaaagacacactgaaagtgatagatgtggaagagattgtagtcatcgcagctccgaaagaaaaccgcaaactacgcgaacagccaaccgcggtaaccatgctctcacaacaggatatgcaggccaatcaggtgaactccatcaagagcctgacggcacttgttccgaatatcttcatccccgactatggctcgaaactgacttccgccatctacatccgtgggatcggttcacgcatcaatacaccgtcagtaggtttgtacgtagacaatgtcccttacatcgacaaatcagctttcgacttcaactatgccgacattgagcgcatcgacgtgttgcgcggtccgcagggaaccctctatggacgcaacaccatgggaggactgatcaaggtacacaccaaatcgcctttcagttatcaaggcaccgaccttcgactgagtgccggaacttacgataattacaatgcttccgtgactcactatcaccgcatgtcgaatcagtttgccttctccaccggagcattttatgaatacggaggaggttttttcaagaatacctaccttaacaaaaagatagacaaaagccaagctgccggaggacggttccgaggcatctacctgcccagcgagaacatgaagctggacttgaacgtcagctatgagtacagcgatcagggaggatatgcttacggagcttatgacaagcacacgggaacctacctgaaaccggcctacaatgatcccagcagttactatcgcaatctgctgaatgcagggttgaatctggaatatcagggagaccacttcacactgagttcggtaacgggactgcaacacttgcgtgaccgtatgtttatcgatcaagacttctctcctgccaatatctatgtgctggaacagaagcagaagctgaccacgatctccgaagaaatcgtcctcaaatcgaaatccggacgacgctgggaatggaccacaggtgccttcgggttctatcagtggctcaccaccaacggaccggttacattcaaggaagacggggtgacagaaatgctggagaaaggcatcaacagtcacttccccgatctctcggcgatgggaatgaaaatgaacctgaacatcacgaaccctacgttgttggtggacggacgcttccacacaccgatcctcagtggagcagtctatcatcagtccaccttccgtgacttgctgatagaagggctttcggctaccgtaggactgcgtctggactacgaaaagaactggatgaaatacaactcgggcagtaccattgactatcagttcaacatgacaagccctttcatgcctgtacgcctggaacagaccagttcaccacgcctgaacggcaagttcagcaacgactatctgcagctattacccaagttcgccctgcaatacgaatggaagaagggtaacaacgtatatgccaccgtatcacgcggataccgttcgggaggatacaatatacagatgttctcggatctgatacagggtaatatgcaaaacgacatgcaaggacagatcaaggcaggcacaaaacagatcttcgaccgccttgtgactcaaggcatgccacaggccatcgcggaccgcatcttgtcgaatattccggatgcgggtgagaatgcggatccgaaagcatcgaccatctacaagcccgaatattcctggaattacgaagtgggtagtcacctcactctgtgggaaggtaagctgtggatggatcttgccgccttcctgatggatacgcgtgatcagcaaatcgcccagtttgccaaaagcggattggggcgtattacggtcaatgctggcaaaagccggagctatggggctgaagcggcactgcgtgctaacctgaccgatgctctcagcatgaacgcaagctacggatatacgtatgccacgttcaccgattataaaaccatcgaccggggacaaaatgaaatcagctatgacggcaattatgtacctttcgttccgaaacataccctcaacgtgggtgggcaatacatcttccgcattgctccccgccactggctggaccgtgtacaggtgaacgtgaattataatggtgccggacgcatctactggacagagcaaaacgatgtaagccagtcattctacggaacgctgaatagccgtgtcagcctggcgaaggggaacggacaaatcgacttctgggttcgcaatgcgctggataagaagtatgctactttctacttcgaatcgatgggcaacggatttatgcagaaaggacgtccggtacacttcggggtagacataagatgccgattctaatataataaaaccagacataagatcgactaatttttagtttaaaaggtaaggggtgttggtttaaaaccaatgccccttacctctctgggtaaactcctcttggttttaaaccaacggagagtacctccccaacattcataccacattcccgatttattcgttaacagccccacagtgaggacattgccccttctcccgaagcttctgtccacagtttccacaacggtatttataaccggagcctctacgtactttctttacaaaaagccagatgaaacaggccagaaagaaatagccgatatagatgtgtgtggtgagaataaagaagaagtaacaaaaaatgcagcacgacatcagtcccagcaagtagaaaacagcagcggcaggagtaagctgacggaacagatcatcaagtacggccaaagtgacgatgataaacagccaaatgccggtcaggaataccgaaagaatgaaaggcaccttgaacggagacaaggtgggattgaagtaaaaatgctcccaggtgtcgggtacaaacacctgcatcgtctcgtagactgtagcgctgaatgccatcaacaggcaaagaaacaacggatagacgctgtcgatatcattaaagtaaaccatctgtaaccgcttcttcataaaagcacggagcagatagaccccgacaaacaaggcgaatatgaaaacgaaatatgaagcgtgggtatcgctgaacagatggatgaactgcgaaatactatcagtcggtacgaacgaacgcaccaactctttattgcgtacccacccctgcacttcctgtgaatgggctacttttacccagatactgtctacactgtcctgcggatggacagaaaactctgccacaaccacacggtcacctttatacagattgacataggcatccttcaacggaagatattccagacgaaccgaatcgtccaacacctccaggttcgtattccacgtataatgatacttggaaaggtaagtcagagagtctttggtcttccggctcattccctccgccggaagatcgggcagggaataacggcaagaggccaacagaaccatgaccaccgaacaacacaaggctacgcagaaccggaccttctctctcatacggcattcactttcatttggcagttcttacagtcaaactccaggcggaagcgtttaccatctgtcgacaccaggtaataaggctcacggtacggagagcgttcccgttgatggacaggacaccatcccatgctgtagcgcaggcaatgtttgcaaaacatcaataccgccttttctgccggtgcccgctcaaaagcaggagcgatgcttgccacgccgtgcccggcatagaaagaaacggcttgtgcattcatcacatttcccagataggtaagcgtgctttgtggaaaggcatgagcggtaggtttcagtacaaataattccctccgataattgatacggcgggcggaaatcagtttctcaacggcctgccggcgaaaatcggcgagtaccgaagcaggtagaaaccagttcccggcaaaatcgatatcgatgcgtaccgcttcgaaaggggtgttgccaaacttagccaactgtgttttcaaattctcttcctgtggtgtacgtgccggctctttctcacgtgccagagacagggttacactgttatcatcttcatctgtcagtgtcagggcgaatccgaaaggagtatccgtcaatcggacagacacagctatcctgcgctcggacgacttacgagccagaatcttttcgaactcctgatcgaaatttcgatataacaccgtacggggcttgatacggggcatctcctgcggataaagcttattgccctccacccggttgatgcggaagccttgcagcctgccttgctcatcgatgtagcacaccccgtcaccgttattaaaagatttcaatcccgctacggtcagatagtttcctcttgcctctttcatcgtacccatctcctcgcccaacgacttaggggtgtcgaacgaaaaaacgtccttggtacgtccatgcaggtaataatgggtaaagccccggctgaaactcttgtcgagctgagggttaaaggcataacggcaactcccggacgaggcacgcgcgtactctttgcggcgggcaaagatggcatccagcttccggcgataggcagccgtcacattctttacataagagacatccttcagtcgtccctctatcttgaaagaagaggcaccggcatcgagcagtgcttccaattcgtcactctgattgaggtctttgagtgaaaggaggtgcttgtccttcacgatcacccgtccctcagcatcgaccagactgaacggcaaacggcaaaactgggcacattcgccccggttggcgctacgcccgaaacaagcctgactgacataacactgcccgctatagctgacacaaagagctccatgcacgaatatttccaaaggtacatccggacaggcttcgtatatcttgctgatctcacgcagcgaaagttcgcgcgccaacaccacttgccggaaaccggcatcagccagaaatcgcaccttctccaccgtacggttatccatctgggtactggcgtgcagcggaataggcggcagattcagaccggtgattcccatatcctgcacaatcagtgcatctacaccggcacggaacaaagcccaaatcatcttctccgtctcttgcagttcttcatctttcaagatagtattgactgtcacataaatccgggcattgtacagatgggcatactctaccaaagcagctatgtcctccaatgaattgactgccgccgcgcgggcaccaaacttcggcgcaccgatatacacagcatccgctccatgatcaatagcagctatgccacattccagatttttggccggagccagcaattctattttacgttgttttatcatcggatatcttcaatattataaggagtctcctgatagacgaaatagttcagccaattggagaacaacaggttggcatgtccgcgccaacgcaccagcggtcctttgtccggatcatcattcacgtaatagttacggggaatctcgatgggaagccctttcgaaacatcccggcgatattccgtatccagtgtcagtggagagtactcggagtgcccggtaacaaaaaactcacgtccgccacgggctaccaccatatatacccccgaatcatccgactcggaaagtaatgtcaattccggtactttcagtatatcttcctttcgcacttccgtatgccggctatggggcacatagaattcatcatcgaagccacggaagatgggatgcagcggaagcagcgtgcgatgcttgaaaatgccgaacattttcttatccaaagcatacttggggataccgtaatgatgatacagtcccgcctgtgctgcccaacaaatatagagtgtggaggtgacatgggtacgtgcccagtcgaatatctccgttatttcatcccaatagttcacttcctcaaactccatttgctctaccggtgcaccggtgataatcataccgtcatacctgtcttctctcatcttgtcgaagtcggtataaaatgttttcatgtgctctatcggtgtattcttcgaggtgtggcttttaatcttcataaaagaaatttccacctgaagcggagtgtttgagagtaaacgcaccaagtctgtttctgtcgtaatcttcaacggcatcaggttgaggataacaattcgtagcggacggatgtcttgttgtgttgcgcgggagttatctatcacaaagatattctcctcttttaatagttctatcgcaggaagcttatcgggtaaatttaaaggcataattgcatacgtatttaataatcaatgcaaaaatagtgttttccttatttagaagatatacaaattaaaacattttaatcaaaaacgataccaactaatgattaaaaactctatttttgtacctacaaattagtactaataattaaaatatcaaacaaaatggcttacgtaattagtgaagattgtattgcttgcggaacttgtattgacgagtgtccggttggcgctatctctgaaggtgatatttactcaattgatcctgagcagtgtacagattgtggtacttgcgcagatgtatgtccttctgaagcaattcacccagctgaataatacaatccccaacaaaaaagataaaggctgccttcctaatggaaagcagcctttatttatttcttttcagacgtttggcaaattataaccgcgtcttcaattgataacttcccgaaggaaaactaaagacagcataactaccttccatccggagaaaagtccccccctctccgacgatccgcttcttttctttcggatcgatacttttatctgctaccggcacataaaccaaagcagaagtattgcacggcaccgagatatcccaacagaacgaaccgtcctcttttttccaatgacttctcacctcaccgtagatagagtgaaacgaagtattcacaaaatcgaggccatctaccgggtaaggctttagctgtatctgtttaaaaccgacattcccgggagcattgctgatacctcccagatagccatatgcccatacaatcagatcgcccaacagcatcacatggttggcagaattcatagccggatcggctgtattaccattccacagctcccagattgtggttgctccattatctaccatatatccccaactcggataagtccggttagtcgctatccgataggcgaggtcagttcttccataatccgatagtccgcgcatcaactgctggataccgaccaggccggtactgatatgcccattgaaatctttcattgttttctcaactatattccggaacacgacttccttataagcctcaggaaccatgccgaaccgcagggaaaggatatttgcagtaactgtattgttgctataataccccaattccgtatgaaggtattttgaattaaaagcttctttaaccagttcactctctttccgaaaatcttcagcatcctgcggataaccggccaacgctgcaaaccgtaccatcaaattggacaaataataataaaaggttgttcccagcaccgcagcttccgtgatacgtgaaggagatctttagagtggatcagttcgggagattcgggaggcatacaccagtctccaaaattatctttcgtcataatatgatctaccatatacttatctttcatataacgcatccacttcttcatcgaaggataatgtttgatgatgggttgtttatcgccaaactgatcataaagcatatttgctatgattaaataggcaccgggccaggtcatattgtcagtgcaaacgtcccagtagttaggagccacatcgggtacagctccattttctttctgcgcctgttcaatatcatcgagccatttggcgtaaagaagatgattattaaaaatataactttctccttgcgaaccaaccgcacggtcacccagccaccccatacgttcgtcacgctgcggacagtcggtaggcatgccgcgataattaccgcgtataccccaataagcgttcttgtaaatcctgttgatcatcgggtcggaggtttccagattacccgtagtctccatttcatcataaatcacttgtccctcgaagtcggatagagaaggtttttccctgaaacccatcaattcaacaaaacgaaatccatgataagtaaaagtcggttgccactcttccatagaatttccctttaagatataggtatctgccgaatgtgccgttcgcagatttgccgtataaatagaaccgtctttctgcaacaactcggcaaaacgcagttttaacgtatcgccggattgcccctttactttcatgcgaagccaaccgaccatattttgtcccatatccagaatatatactccgggagccgattcggtaataccgataggtttcacggtatccatcactttcatattacgattgagttgggcctccaactttcctcccggcaggcttacaacttctgcctgaagccatttcgtatcatcaaacggatatgtattccatcccggcatctcttttcttgcatcatactcttcaccgtcaaactcattatttgttccgatgggaccttcggccgttattttccaggaagcatcgctcgcaatcacccgtttctctccatcttcatagtatacctcaagttgggcaatcattttaggtacatcaaaatgccgcactcccggcatacgcatcgaagtataccgtccgttgcccaagatggcaccgatggcattagctccctttaataattgtccggtcacatcaaaccgattatacttcaccgatttggaataatccgtaggcgtaggagccaatacctgatctccaatcttctttccgttaatataggcctcataaaatcctaatccgcaaatgtacagggtagcctttctcactttcttcgagttcaaattgaaaggtttgcgcagataacgggcagggactcgcgtattcccctccagtttatcttgtggaaaagctctccctatccacacagcctgccagtccgacggatgcaacagtcccatctcccaactggcaggttcactccaagcggaaatacctttattggtttttaccctcactttccaataacattggatacggctatcgagcatatcgccgccatacgaaatatatgcggactgatcggacgccacatcacccgtatcccacaaatcaccttcttcccggtttaatttctccaacgaagtggatacgaggatatggtaggagacttgtcttacatctctcacatcagataaaatctcccaactcaaacggggagagggacaatcaatgttttggggatttacaagcatctcggttttcagacaggagatactcacttgagccttcttaccggatacggcgaggctcatgcttaagaataagcagataaaaaaaatgttcttcatgtgttgtgtatattttgtgttgtaatgtctctttagagaacagagtatcgaaaccaaatactctaaaagtaaagaaggatgcaccttttcacagataacaccctccttttttatctgattggctgaatcttatttcaacttcgccaatgcttctttaatacggcgaattgcttcaacgatattttcatcgctggtagcataactcatgcgaatgcattcaggagctccgaaagaagtaccgcctacacatgctacgtgagcatcttcaagcagatacatcgccagatcatccgaattctcaatcttacggtcacccgctgatttaccaaagaaagaactgcatttagggaacaggtagaaagcaccttccggtacatttacctcaaatccgggaacttcctttgccaattttacaatcaggtcacgacgacgttcgaaggcttgacgcatctcctcaaccggagcctgagaacctgtataagcagcctcggcagccttctgagataccgaacaagggcctgaagtatactgtccctgaagtttattgcaagccttcacaatccattccggaccggctatgaacccaattctccatccggtcatcgcatacgcctttgacacaccgttaacaatcaccgtacggtctttcatctcggggaactgagcaatgctctgatgttttccgatataattgatgtgttcatagatctcgtcggcaacgactatgacttgtggatactttgccaacacagcagccaaaccggccaattcttctttgctgtaaaccgaaccggtcgggttagacggtgagcaaagtatcaatgctttggttttgggagtaatggcagcttccagttgcgcaggagtaattttgaaatcctgttcgataccggcagtcacaatcaccggcgtaccttctgccagtttcaccatttcaggatagcttacccaataaggagcaggtacaatgacctcgtcacccggattcaccaacaccataatagtgttacatacagattgttttgccccatttgcacaagaaatctgagcggctgtatattccagaccgttttctttcttcagtttctctacgatagcattacgcaaagccggataacccggaaccggagagtagcgagagaagttgtcatctaccgctttcttggcagcttctttgatgtggtcgggagtattgaagtcaggttctcccacactgaggttaattacatcaacaccctgagctttcagctcagcacttttttgcgacatagcaagagtcgccgagggcgacaagctgttcaaacggtctgatagttggttcatttcgtatctattttattgttgttgagtgaatttgattgcaaaataaactataatatttgatatatgaaagcaaatagacagtttacttattaaaatgaagcgtatgacccattttatctttcttagtcttcaggtagcgttcattataaggattcggcttaatctcaattcccacattctcggtaatctctaacccataggcttccagaccgatacgtttcaccggattgttagtcatcagtttcatcttcttcactccgatctcacgcaaaatctgtgcaccgactccataatcacgttcatcggcatcaaaacccaaatggagattggcatctaccgtgtcataaccttcttcctgaagtttataagcagcaatcttattcatcaggccgatgccacgaccttcctgattcatgtaaacgatcacccctttaccggcagcctcaatcatttccatagctttgtgaagctgttcaccacactcacaacgacatgaaccaaagatatcacccgtcatacaagaagagtgcacacgcaccagaatcggttcgtctgtatcccaggttccctttatcaatgcaatgtgttccattccatttgatttctggcggaaaggtatcagacggaaatgcccgaactgtgtaggcatatccacttcaacacctctatcgacaatagactccatctggagacgataagcaatcagatctttaatggagattattttcaatccgaagcgacgggctacttctaccaactgaggcagacgggccatggtgccgtcttcattgataatttcgatcaatgcagcggcaggatataatccggcaagcttagccagatcgacacttgcctcggtatgacctgcacgacgaagtaccccgcgagagcgggcacgcaaaggattgatatgtcccggacgccccagatcggcaggttttgtcttcggatcagccaaagcgcgaatagtcattgcacggtcatgcatggaaactccggttgtacacccctcaagcaagtcgacagtaacagtaaacggagtttcgtaaattgaagtgttggacgacacctgcatatccagttccaactcagcgcagcgttcttctgtgattggagcacaaagtactccacgaccgtgagtcagcatgaaatttactttttccggagtaatcttctcggcagcaataatgaaatcaccttcattttcacgatcttcatcatctaccacaattacaaaattaccttctttgaagtcagctatcgcctcttcaatggtattcagtctgattggttccatacttttatatcttgttttcgttattaatatcttttattgtcaattccacatcccggttcaatgcgataatccgctccatgtctttattcagacgtatacgaaaagcccagatccggaaataaaagaacagaccgataggaatcacaattcctattgccatattaagccaataattatggaatgggcgcacatgcgcatttacagggataatcggatatttttccaacttctgaagtagtatcagtgaacgggtattagacatctcatcaaccaatgcttccatacggttgtttatagcgataatttcctgatcttgcccgccggacatccacaggctaaaataattgggtgccttggccaatcggttcttttgcatataagccctacactcctctgaaaggccattcaaatcgaacggaagacgttgataatccggatcatgaataataacttccttcttggacagatgtcggacactacgtaccccaaacactcttttgaaccaagagatatatacatccgtattcaatacaacggagtctttattcgatttataagtcaggaaatatccaagcggagccagaatggcagaactcatccacatccccatccacacaatccactttccatcacgggccattttgtaacccgtgttgtctattatatagtaaataataaaggtaagtacggaaacaataacaggcattcccaatccacctttacgaataatccctcccaaaggtgcaccaatgaaaaagaataaaagacaggatagagaaatcgtgatcttccggtgccattctattttatgtttccttatactgaagtcattctgggtcatcgtaaagctcttaaatccccagtcactcgacagattctctgtacgcccaacagctgatgctataatcttctgcttattcatcaacgtagcagcctcaaacagactatctacattatagtcacggatctgcgcttcctgcattttcaaggtatcttctttcgtcagtccgactgctgtacgatagggtcccttgcttgcttcaacaaaatactgtcttccgatactatcggccaatacggtcatagaatcgatagatgcctgtatttttatcatatctttggtagtggactgattgctcatgatgctggcatcagccatattaaaatctgagtcgaactgaataatcgaatgcttttcccggaaagactcacgacggtaaggaacattcttcgaactcatgctctgtgctttcagattctcaaacatctcgccgctgtacagatgcaagtagagatgctgtttatcagcggtcatttccaaacgtcccgaatcagcaactataatgcgagcattatcaaagttgttggagaaatcataaatgatcacatcataaagcatacccgttttacggtctttcctttgtactttcaggttataaccatctatttcatcatagaaaactccttcgggaatatcaacttcaggagatttctgcttcatcgaaataagcagggttcccaacttggcttgcgcctgcggaccgatgacgttctggaaataaaaggatacacaacaaatggcaaagacgagaacaataagcgggcgcatgattttaagtaatgaaatccccgccgctttcatggcaagcaactcaaaacgttcaccaaaattaccaaacgttatcaaagaagccaacaacactgccaagggtagtgacatcggtaccagactcaacgcagaataaaagaagaattgagccagtacactcatctccaacccttttcccaccaattcgtctacatacttccacaaaaactgcatcatgaagatgaagaggcagatgaaaaatgtaccgacaaagagtaataaaaaactctttattataaaaatatctaatctttttatgcgtagcatcttaatagtttcatgcaattaagatacaaaattagcacaaaaaaaggagtgcgaaaaatttttggtcgaaagttaactaaaaaccacatgttctccgtaacttactcacctgagaatcccacaattccttcaaatcatccgcttcatccgcttcagaaaagtcagtaatttcgagcacatagtcacccgtcaattcattataactcatcttaatttcaaaatagtccctttcattttcgtcatcaagccagtggaaacgaatgaacgaatatgcccgaatcgcaacaataccagcctgacgctgttcggttttgccccaacaaaaggtcaccgttttatcatctgatactactttgtctgcgaaccagtcctccaaaccggtaggtgtgctaattgctgaccaaagaatatttttagaggtcgcattcagaaggtattctaaatgtattttctcttttttcatagcttcattcattattgattgtgtgtgccaagataaatacttttttctaattacaaggcataattaattcactttcttcattacatctcttctttccgggtcaggaacagcctgtccatcgtactttcaaagatcttttttttaagttaaacacaaaaaagatagaaaatgttttggagattaaaaaaaaggctctatctttgcacccgcaatcgagaaacaatggcgggatagctcagctggttagagcgcatgattcataatcatgaggtccccggttcaatcccgggtcccgctaccaaaagaaaattagcgtttaggaggcttccactcttgggcgcttttttattgccacatactctcctatagttagattcttaacacagttatcaacatagttattaacagatatacaccaaagttattaacaggttaacagattacaattcaacaaattaagcattttacctccatatcaatcaactagcttttcaaaaggctatcaacaagctggaaaatactcaatttttccatttcaacattcaaaagcattacaaactccgttgctcaccttatgaaataaaaaagtgactaacagatcccaaagaatatattgtatatcaaaacaaaacatttatttttgcataaatcatgatgctacagatactaaaaatagagacacatgaccaagctaaaaagtgtaacagcttaaaataataaaaagaaaagtactttcagagagccattctttgcgtgtcagcagccgtctgatgtaacatagtgaactaatcttgagagttatttatgatattaacctgaaacccagtatagatgtaaatatagtattagggatataatttaaagaataacaaaaatggagatatttagaaatttaaccgttgtccttaccataactaccttggtggcttgtaatgatgttacgatagaaggctcttgggtggaatcggttcctggaatatctaatttaaaacaaggattcacgcttgaagcaaacggaagtgcttcttccatcaatatggccactttgaaatatgagaaatggaagaaagaaggaaacttattactcctttccggtataagcatcggcaaccaccaaagtatatcctttacagatacactaacagtagagcaattgactcaggacagtttgattctcaaaaaaggcgagttggttttgaggtattccaagacgaatgaaataccagacgaagaagctataccgacaccggacactcctacccagaaacttttgtccgtaaaaggtaaattgatcatcggacatgaaacacgttctttcacttcagaaggggattccactgattattggattgttgataaaacaggagaactcctacaaaagtatgatggtgaaacaaaaggaatcaaaaatggaacacctgtatatgtggaattagaagttattgatatgggtaaatcagacgaaggctttgccgccgattatgccggtgtttatcatgtcatgaaaatcaataaaataactgtaaaataacatcttacaccaaaattgcacaaagcatggaaaaaaggggaaacaacctaattgtcgataaaaaaagcaaatgcgtggaacgtaaagaaatagaaaatcattgattagtatccaattcatacctacgagtgccttaggcaaatctcaaattccattaacacccagaaatcagcgtttaagaaatttagactcttaaacgctgttttattgcctaacatttccagacacttaattcccccacgcagttgtcaacaaagttattaacatagttatcaacagataccaaccgaagttatcaacaggataattcactattgaacaatgaattagtaatccaaatacaacctacaacatcaccatgtatagtttcaccctaacacattgttttttttcaaatacacctacactatagatcgcggttactatatgatctcattcatcaaaaaggtacttctcaccacgtctttgacctttaagcaaattactgataaactaaattcagcatcaggaaaagacatatctaaatgtatcttggcttgaaacagtcaaggaacaacacaacagtcgatatcctagagaatttcaacaaagtagtttccacctccaaacgaatgtactaatataacaagcatacggattcgacttcaaaagagacaaataaagaagaagaagttgaacttacaatatgttacttattatcaatctgttaacgttctcccttttgtatttgggaaacacctgatttaacagaatgttaaaataagttctttaataatagaaaacaagtctttgagatgctaaagacttgttttttgccggtaaaaaaagaatgaaagagaaatgccattaacaatgttaatgaaaacaatactgcgcttctatgcacttctgaatattcggaaagtaatacgatctcaattcaaaaagaatagaaacgcagtatgcccaagaaaactattttaaatttaaattgctccttacagaaacaatggccggtttagccggtgtaacggttttttgagtacaataatcaaatacagccgatttatctccactaaatgacttccatttcaaagtcaacggaaccgtttttccattcgtatccggaagtcccaccagcttaaaggctaccaaaccatcaccaaccgtaccatatgtatcgccatatgcattatggcgaaactcaacctcatatgggtcagacggattttgccccaacaataaatttacgaaatgggctttattataatcaccccattttgttctgaatcgtagggtcaaataaccatcttccgcaatagtcacccaatcgtttactatttccacgggatctgttccataaacaacgtcattttctgatcctaaatccggggcaatcgatttcgtcaaaatactatctatccagttcacctgtaccgccttatcatatctgccaccagactcactcacttcatcataattcaccaatgccctgacttctttatctccaaaaggtgaagaggacatattggtcggcaacaaagtcgtgctatcattcagctgtaagaagaatgaaccatcagtcgcatttttcaccgtaacaagagcattaggaaatccttccacataataatacttatcattgtcatccagacaagactgtaaactggcagaacaaacaactgccactgcaatcataactcctttattcaagcatgaacagatcttcataataaatttcttttttcgttagatattcaaaatatgttctctctacttatagaaatagaatattcatagaaagcctgcatgcaagaatgttaattaaaaataatattaacggcaaagagttgtttcaggtcctaaatatgaccttttgagcccacccatatcaataacgattttctgaatcacagttccgggatctccacagcgaatctgcaatgtatgcttaccgggggcctttacataaagagtggatttattcactctacaatttttcagcacactgtcataccagatctgggaatattctatggctgaagtggatggagtagaaatagatccgtcatcgatacggacactatatttggtatccgaattggtatgctccggtagtttataatcccgatcagcatgcaaagggaaagtgggcagtacgtaggtatacacatcaaccattccagcattgaaagtataaaaatcatattccactctaggcacctcggacgaacgatacatctgtaagggagctatcggacttcctatttgcaaggcagcaccttcaaagcccaaaccgggaagtacactcatcttgacatcttcactctcaaacttacggtggaaggctgtagcgggcagagatacgtagccattttcctctatgaaaagtccttgtaattcgtcgcgtaccggagtcttcggattgaatacggaaacaagcacccgttctttctgcattccggaagagaactcaataaatcctgtgactttctctcctgatggtactttattccaatcgatcgatacttggatacgatcttcagtacgagtactgcccgactgacgagacaaaacgatccactcgtcagaaagttccgatttccagtccaacattcctcccccctgattataaacatcgatccagtgacttttacgggagtaagtattgaacacgggtaaagcccggaaactaaaacctccccgattcaattgctcactttctacctgaacggccaactttggatcgcccgttgccacataactttcttccatcaatggaagcataaaataggaactgcttccatcataattttgtcttagtgacatcatgtatttccatttgccgtccaagagcgaattatatccgtcggtaataatctccaaactatcgtgacaagtcgttgtttctctcttcagatcatcggcagcagcacgtttctgacgaacatattgccgataaagctgaccggtcatattcatacgattcatcagttcggcccctttcaccggataatacaacaactgatacagcgccggttttgcctttttatctacagttgccaacatttcctctgcttttttaccgatccgccggtactcagccaaacgcctcccggcttcattgtaatttataaaagaaaactcggtatcggtacgtttttcacctccaccccaatagttattccagtatccccaccccatgtattccggttttctggaaaaagccaaatttatatgtgagcaggtaatgtctttcaatgtatcgtaatattgttctccgaagatttgtgccaaccaacgggcaggataagtatgcacattattttcgttgaattggtcgatatcataagccatatcgagaaaaaacgatacttgtgcctcagcccctttcaggtctccacagtttgccaaccagatacggtcggccgtagtatcatacgctttgcgaagctcttcatacattaatgccggaggagtggtactaaaccataaatagctatgaggtacaccgaggtaagaaatatgatagtatacacctgcacgtcctgtacgtttttgttcttgagggccactcaaacgcttcatatagccaaaattatcatccgcccagataatggtcacatcatccggcagttccaatccattcgagtagatttccagcacctctttataaggggtgaatgcctgcgggatagtttcggcaggcttatcaatatgccgggttagcaggcttctctggtctttcaaagcattctccagcattttcactttctctttcatcggtacgtctcctccacccatggcagcatcgtgcaatcctctcaaggctaatgtgtatacattctcataagcacaattttctttcacacgattgcccaaaacttcattaatcttatccttattagcattataatcccagggtcccatagtcttgctatgccactcgctggccgtattcaacaataagggttcacaatggctggagcccataacaatggcaaacgtatctgctacgagtttattctcgggaatctgataaaaagcggtagatacgggatgcattgccggagccagatgattagctttcaaacgcagtaacagttcacaaatcttcgcataggtacggggaccaatattaccgcgttctttctcaaaggtcttagcagcccagggtttcagcccccaatcttcatcgttcaggaaaatacccctatatttcacggaaggtgttttagaatatgtgggcggagcatctacatacaaagccttgtgcgtttttaccgggacatcaccccaccaataccaaggggatactcccatcatttcggaaatagagaacaggccataagccgctccccgccgatcactccctgctataaccaatgctttggctactcctggagaagggttgtcgacagtttgaatcaaataccgttcccaagcaccctgcaatggccggatatcaatttttcctttttgcgccaattcacaaatccattgattcttttcaatggttccgacaataaccagagctttggctctttccctttttgggatcagttcaggcttttgaccggtcaccatttgaatatcgcgggcaaacaattctgccgatctcttgataacaagcgcatcattcacatcgtaataaatcttagcccgtgttttcgcagtagtcaaagcaaaaccggttttacttttaggaagtcgttcttgtacacgaatctgtgcataagaaatgcaggcacaaaatagtgctgccaataaaaataaatgtctcattttgtgtttatgttagtgttttttcattttatgcaaagatacgtattcctactatttttcaagcttactacagaaactgtttctcataaaaatatcccatacactcacaaactgaaacatatcgtatgtttcagtttgtgagtgtatgggattaacaggagttattgtaaagtcaataaccggactgcccaaaagcccaattgcaatatccttcaggcaaagaacaggttttaccatcgaaagacacagagaaagaatgcttcaagttgcaatgtagattcacgatctgtttctcgtctgcctttacagtcaatgtattccccttccgggttacacggcaattgtatcctacgacttctccattcggacgttctatgacaaaagcgttagtcagaacagcttcaccgatacatttaaataattcgtgcacatcattatcctgagtattgaccgtctgccaatcgctaatcatattgacatattgctcaccaataacaaacttacgggtatcatataatttcggatgcggattaccaaaactaagatcagaaaaatccagtttagtatcagcgctacacgcctgttctacttcaagatgcggatcgacaacaaaagcccaacgcaactgccccgttttataatcaatcaaattggcaaaagctcccatcgcattaaatgtttgttccagccatttctcgtcgcctgtcagcagataagcataataagtagcatacgcacgccatccgctccagccatggggtgaattaaacatattgggaagcatctgtacatcgtattgcgcttcccaataacgcatagttccttgccgacggcgcccatcgggtacacggagttgagtaaggcaatcatggctgttcagtatcttcaacattgcatcggtataatatttgcgtgcaacagcatcttgctcgatgactcccatcatacctatctgtaaagctgaacaagaaatcatgccgtcttcaaaggtcaattctccctctgtctgaaaatctccttgtgacgcaaccagttggtcaaccgccttttttgcagacaggaaatgacggtcggcacatgttctccaaaacaaatcctgttcacccaatttacgttcgaggacagccagttccaaaacacttttagcgatatagatcacactggtatagactgttccatgattataatatgcaccattttcgcgctgggaggtcgcgatcatccagtcagccaacttcgacgcctttttcagatcttccaaatctccctgtgcctcatatttatctaccaacattccaatagtagtagaggtattttgaatacgtgtcttaaaatacaacggttccacttttaccgaatcatgcaatttgttgtaaagccgatcaaaataattgctcaattgcttatccaatgactcattcgggaaataacgggcagcaagaaaagccgaatagaacccataccaactctcagcatgtgacgtcggtttctgatgataacgggctgcattctcacgtgccttttccatcacccattgccaaggatgatgtactgtccatatcgcttcggcaactttattgcccgaacggacagaaagggtatagagacctgcatcttccaaccggacttttcctatccaacgattccctttggttttagtcagtacgacaggcagttcttttccggcatcattggtcacctttacgttaggattatcggcagtaagtgtgaacgatgcttcctcacgtgcagcatgcgaagtctgacggatatcaatcaaaggaatatccgaaactcgagcaatggcatgttccagattgtccaaattacccacattgacaaatgtaaaaatccactctttactttccccctgtttcagttcatacagattctgcggatgacgtgccggcaaaggcaattcattcaataaatcgagatttaatgattcgatgcgatgccccataaaccaaaatggggccggatcctgatagcccagattataatctacactccaggatgctacaggctgctgtgatacaagtcccaatgtatgtccggaaggggtttgaagatagccataaaaatgggtcttttcgtttctcatcaaggttggaaagtatttaccaaaccaatccggaaatttatccatatatgtatcgatgcccaacttcagaccggccttctgaggttgataaggcaccggtgagttgtttgtcagctttacccttaatgcaggttgaccatgatcttttatatatgatatccggcaaagaactccgtctatctcgctccgataggaggcgtatccatccggaatccaggatccacgcacttctttaccttcccgttttgcataaaaggatggaccggcatgttctccttcacgaaagaaaggtatggtatcatttcgttttccacctttaaatattagttgttcggcacatccggtttctgaaattttccactcccaatcagagtgcttcaaaacaatttgtgccgacaccctcaagctaaagctcaacagtccgagcaataagattgtaacacgtattctcttaaaaagcatgatttaatttttcaattctagttgtgcaagaacggacttcggcaatttagaaatcataagacgtctccatgacacattgcgaaatccgttctgaattaatttataataatctcttaagaagcattagtatccttcattctgaatgacctgaccactgctttccgttatgacactctgtggcaaaggcatcaggttcatatactcttttgcggtagtcgatcctttgtatttgatagcatagtcgatatacaatccatagcggatcagatcactgcgacgacaaccctcaccccataattcatgcccacgttctttaagaacagctccaagaaaatcgtccagtgaggtaaaatcactcaactgataagcagccagtcctgcacgtgtatgtacatcattcagacggtccacagcttcctgagtaaccgcattattactacgtgccaatgcctcagccatcagagtcaatacatcggcataacggtaaacaaccacatcgacttcactattttcactggtttgtgtcggatcttctccatatttgatgggtaaagcccctttatccaaatactcaccgggattagtttcattgtatgtcactccatctgttcctacatattcactacagataacttccaggcgcttgtctttaggatcgaaactgtggtaaaactgccatggcatacgataaccattccatttttgtatgttcggattagttgtaggatagttgcttggcaacacatgcgcatgccacatctgttcgtttactcctctggtttcaatgcatgaaaagatcatttcatcattaccctcattgtctaaagtaaaaatgtccttataattagtaaccaacgaatatccacatttcatgacttctctgccacattccacagccttgccccattctttttcatgcatataaagtttcatcaacaccgtatatgccagtcctttggtgaaccgtccaaagttctcatcagatttactatatttagcaggaagtacctcagctgccgctttcaagtcatcttcaatcaacttcactgtttcctcttttgaagaacggggtacaataaccttttgggtaggattctgtaaaacttctaatgaaggaatctgaatagggccatacaagtcgtaaagaatatatgccaaccatccacgcccacaacgtgtttcggcaattaaacgtgttttttcctcttctttcatatcaataccagagatacggtctaatgtcaatgtcatctttccgatatgattcgcccatgttccgtaaaaagaagtaggaatatcagaggtagcagtgaaattcaactgtaatacagccggccaccacgaatctccccatttacaatccaataggtcggtagacatatctgtattagaggccaaaccacctttagcacattgaaataatccgctatacccgtctgcacggaacggaccgtaagctgctgcaataaccaatgcatcagcatcatctgcattagtaggaaatatagttgtattaattgagtcatatgattcggattccaggttaatgcaagagcctaataaaccaattactgtgataaacagggaaaatatataaattatctttttcatatcattctttatttttttattgcttagaaagtaatatccagaccaatactaaaactacgtacattgggatatgcccaataagaatcatctgtttccacatccaaaccatcatacggagtaatagtaaacaagttgttcacatcggcgtagatacgtacattggaaaccagtttctttgccgacttaacaggcaatgtatatcccagcgtaatattgcgacagcgaataaaccagctcttctccaggaaatagtctccatatccataattactcatatactgaaaataacccggcatcttacccgatgtattgtcatgcgaccacacttctttggccgaagtaggcatgttataaccgcgatataagttattcaccccggtcattgttcctgaaccgacaatccaataatctttataagaaccactctttaataaatccaactgaccatagaaataaacattcaagtcgaaattcttataacggaaagtattattcaatcccagtaaataacccggatcactacaacctttaaacacagcgtccgcataatctatctttccatcgggctttccagtcctcaatggaatgccatgtttgtcggtcttataagttccgtcttcattgtatgcgtatccatcaatatcttttaatttcacctgtcccggtagagctcccggcatccaggatacttcctcccccggctgaatcaacccgtcagacaaatacatatagtatcctctcaacggagcattatacatatcgtatggattcgggctccaattctcatcacgttctttccacttatcacgatagaacgagaaagtaaaatcggtattccaactaaaatcttttgtatcaaaattctttgtattgattgtcaactcaaatccctgactctgagttttaccgatattggcagcaatcgaaccgacttcattatacgaaagtacactacgggaactaagcaaatcagaaactaccttatgaaagtattctgcagttacattaaaacgattgtttaagaaacccagatccaatcctacattccactcggttgtcgtctcccattttaaatccggattaccgatctgactgacatagactcctgtatattctttattaccgaaaactttattatatcctgtaccataataagtgactgatttatctccgatattcgagttacctgtttgtccgtaacttaatcttaacttaccgttagagagcactttatccaaattcaaagaccgggcaaagttttcctccgtaaatctccagcccagagccacagaagggaaatatccccaacggttattttttgcaaagttagaggcaccatcagcacgaagagtggcggtcaccaagtaacgatctttataggtataatttacacgaccgaagaaagaggccatttcacttttagaagcggaagaaccaacccatggtttttcataagtacctgcacccagattattaaacagaaaggcatctgtcagaaatccttggttacccgcattgagatacttactggtgaatctttgaaaagagtatccaaccaaagcattcagattatgatcacccaaacgttttgcataattggcagtcagttctaacaaataatcagacctgtcatattgcccgatgtctgcacggccatcagccttttctccgtaaagagttgttttaggcatgtatacctcacgacgctgatagttacgatcgatgccaaaactggctttcaatgtgagctcattgattggtttgatttcaacaaacggagtggccaggaaacgttctttagtcgtctgatcactgatctcaagtagcgaaacaggatttggaatataagcagcctgttggttcagactgtaatcaccattttcatctttcacagacaatagtggactaaactgagcagcagacactaaaatactggcatattcattttgccctgctcccaacggaacattgtccaatgtattacgactcactgtcaggttgatacctacttttgcatatttactgagcttctgatctagatttacacggccagtataacgcgacatgccattattctttacaatgcccttttgattaaagaagttaccagaaatcagatatttggtatactccgtacctccattgattgagatattatgctgtgtctgaaaacccgtacgagtaatacgatcataccaatctgtatcatttaccggattcgcaatatccgcatccgaatatttgggatgatatgcactgccggcctccgattcatttttaccaccataaatgccgactttattatcatacatccacttttctttaaaccagcggttagactgaatcataaaatcctgtgcatccagcatttcatatttagtagccatagtctgcacagtggcagatcctgaataggtaactttcggtttaccctcttttccccgtttggttgtaatgataataacaccactgcccgcacgtgcaccgtaaatagcagtagaactggcatccttcaatacttcaattgattcgatatcattggggttgatcgaggccaatatattgtcagtcgtaccattatcactgttataaccgacactcacattacctgcattacttacaggaaatccatccacaataatcaacggatcattgcctgctccggtcgaagcagctccacgaatccgaaacgttgtgccaccaccaggctgggcactgattgtatttacctgtaaaccggctgcttttccggctaacgcatggctcactgtagatatcgtacttaggggagtatcgtccatcttcactgatgctactgcaccggtcaggtcctttttcttcattgtaccataacctacgacaacaacctcatccaaggttttagtatcttctttcagtaacacagccaattggtcccggttttttacagcaacatcctgctgtacatatccaatataggtgatctgcaatactgcgttacccggcacttccaactcaaaacttccgttcatatcggtgatcacgcctgttgccgtaccctttaccaatacgtttgctccgataattgcttcaccgctggcatctttcacaactccttttacctttttgacttttgaagccggcttttgttccacgggaacaatcacaatgtagttaccgttctttttgtacgtataacccgtatctttcaggatagttgccaatatctccagtacttcggtttctttttgattcaacgaaactttacgagaaacattcaggtgtgaatcattataagcgattttatacttcgaagatgcttcgatcttttcaaacgcttgtttcaacgacactgttccatcccgaaatgttactttctgggcatgtacttgcagagaacccgccaacatcaaaccaaggcaaaaagctgccactcggattgatcgatttttgttcataatattattttttttagttaaacaatagccgtcctttggcggcttttacaataggacagtctgttgtttaactacacccaacgatataatgttaacaaatgataatataggccaagccttaatctatataaatatctttcccctctatctggtattcaagtccagggatcatttctttaatcaacatcataatattctcgatggactcattaggatagaaatgaatagtcagattattggattgataaatagaagtctgcaaatgtacctgaaccgaataggtacgttctatagtctgtatcacttctttgaatggactattactgaaatacaaacctccacctctccaatcagaataatcagaggccttcacgcgttttctctctatatgtccggtggacggaatataaacaatctgatcatccggctccaacaaataggatgaatcgaaacgattcagcgacatacggatagatccttcttccaaagtagtcactaccttatctatattcggataagcgtttatattgaattccgtaccaagtacacttacagaaacagagttcgtttttacaataaatgggcattctttatcttttgtcaccgagaaatagccttcaccagccagatagacctcacgttcgtttcctataaacgcagacggatagatcagcaaagaaccggaattaagccaaactttcgatcgatcgggtaaagtgacttgctcccgttttccattactaacataatattgaatgaaagtcacattgctaagttcgttcttaatgataagagtttctttgtataagtaagcggaaccgaacaatagtaataaggggacgatgatagaagcagcaatccaactccatcggggaatacgaaaacgcgaaaaagaagattccgattttaaagaatctcctctaatctgttgttccagcttttcaaaagctctcagcgtttgatgttcatccgcttgtggaaaaccgatctgttcccaaataccggacaagacctcttctttctcttgtccgctgtttgtatcggccagtcgttgatgtactctttccaccaccccgtccgatgccggatgatgaaaaaagtaagtaattatattttttaaataactcattctaccactaatttataataggacgcataaatccggatatatccccaaccgtattaacataaatagagaaatataaagaataacaaagcatttttcagttctttcaacgctaagttaagatggttctcaacagtttttttactaatctgcaacttctccgctatttctgcattggtcagtccggcctcccgattcaaccgaaaaatcatttgccgttgaggaggcatattctccaccaccatatcaatcaatagctgcaagtctttagcaaccaactcttcataaggagtcgtgtctgtagactcttctacccattctgtcctctgactatcctgacgattctgccgggaacgcaaataattgaaagttgtatttttagtcaagacatacagataggttccgaacacttctacttcacaaaatttctcacggtgcgtccacagtttgagaaaaacttcttgtgtcaaatcttcggcttcactctccgatttaaccaatcccattataaaagagcgcaccttcggataataacgcataaacaatgccttaaacgctatatggcttccttgggagaattgggagaccagtaatttttcttctgcgatttcagaatgcattattatccacttaaaagattaacttagacaagtatcatattatatatcaatacgtcggcaaaaataataaaaaaccttaatataataatgtcataagtagtttttctaggaaaaagtcccacagaatcacaagtctatctccataatttccagcattatcatgccttcaaccttatcacaaagcaactccccttacccggttcgctctgtacggtcaatgtcccgccatgtgcttctacaaagtctttcgaaatggacaatcccaaaccgctaccctgaactttagttcccggtacacggaaataacgatcaaaaatgctttggtgatatcttggatcgattcctttgccaaagtcttgcacatagagctcgatatactcttttttatgccttacgccaatcactactcggccattctctttcgaatagcgaatcgcattgcttaaaaggttagtaagtacccaagctattttttcactatctacaaacagtttcggtatcttctcttgaggatagtcaacttctatttgtatattaaacttatcagcctgcacctgattggccttgatggcgtactcaatcagttcgataggtttcgtaattttaggcatcatttgaagcttgccggcttccacctgcgtcatgttcagtaactctccggtaatatcgagtaagcgctggctattgtcccttatattcttcgataattgttcttgttcgccattcaaagagcccactcttttgtcctccagcaattgaagactcatcattatggcagaaataggagtcttcagttcgtgggagatggtagagataaaagtggtttttgcagaatcgagttctttgaactctgtaatatttttcagcaagataacgtctcccaggtttcgagcctctccttcttctgccgccgcattctcaatcggaatatacgaggcttggaaatagctttctttattgtccgcatagatttttaaaggttcattcttctcaccgggagtcaccaactcacgtatcagcctgcgaagcaaatcattcttcagagaaagttcttcggcggacttccggattacattctcacgcttcatattgagtacattcaatgcttcattattgataaaaagaatttcccgttcggtatttaagccgataatcggctcatgaatactgttaacaacggcttcaaggaatttttttgcagaaagaatatcagccaatgtactgtcacgatactctgtcagtttctcagccatgcggttaaaactatccgaaacttccctgaactcttcgtatcctctcatatccaatctcttttcataattatgattggctatttccaagataccacaagtcagttcttttaccggcctattaatagaacggggcagccagataagcaggaccaaacccgtgaggatacaaatgccacctgttacggagatccataagagcgcacgctccaaagcaggcatggcaaccggactatcaggttccgtggccgttagaatctgaaggtttactactgaaagtgttaccagtaaaataatcattccggccaatattccaatgccgaaaagtagtttggtttttatattcataatggataactaagactaaatcatttttttatgcaagtataatcaaatctatgttcgcttgtgccagattatttaaaaatctgcgatatttcagcacgctacacaatgctcccggcaggcgaaggcctggggaacccatgcaaacagtggatatctgtttctccttacaaacctgcacaatgctgcctaatatatctttcgactgtacctggacgacttccccacccaactcagtcaccaacttaaaatgattcagcagatgtctctggctagccaaatcgatacgttccatgctttctttgggaacttgtacgtaaagagcgacaaacgaggtattatatcgggtagccaaacgggctactttccttataatacggcggggcgtcttctcttggctactgatgcacgccataaacttttcatgacgaactcccaaaccaatacccatcacaacctcattctctactttcttttccactcgcaaggcaacctccttcagtgcaagttcacggagttgcaggatattctcggtcttaaagaaattattgagtgcagtctgtattttttccggcttatatatctttccagctttaagtctggttatcagttcttcggccgtaagatcaatatttacgacctcatcagcctcttgaagaacgctatcgggaatacgctccttcacttcaatacctgcgatatcttgcacctcttcattcacactctcgatgtgctgaatgttgactgccgaaatcacgttaatcccttcatcaagcagtgtcatcacatcttgccaacgtttctcattcaagcttccttccacattggtatgtgccagttcgtctacaattacaatttcgggatgaatacggataatcgcttccagatccatctcctcgagctctttccccttataaaacagtttcctgcgccggataacaggtaaacctttcaacagggcttccgtcccggcacgaccatgtgtctcaatatatccgatccggacatccaccccgttatcaatcagatcatgtgcttcctggagcatccggtacgatttgcctacaccggcaatcataccgatataaaccttaaacttgccacgacgggatttttttatcaagtcgaggaaatgctgtacactttcttctctatccatcttttcttcaatttttatactgcataacccgtaacagtatcgctactgccacgggttgactaaccactttttaaattcctaagttatatctgatttcatggctttaaagtaataccaaacactaaatgcgcatcttccatacggggattccaaacagcctgtgcaaatacaggcaaagcaaacttatcagtgaacctgatctgagtagttcctttcaaagcaacattggttacggcaaacccatcacaattgtattggggagcggcataaggaaccattccacacgttacgtttaaatccaccattctcactctgaagggatagttgaattcaacataagacgaataattctggcctccctccgcattcttatcttgccctgcaaacatggtataccatgcaacagacaaaggaaatgtttcggactgcacagtataagccactcctgcctcaaagtggtgagccgtttcatgactcttaaaattaaagtatttacgtgctccctgtcctgcccaccacaagtcggcaaccgatacggtcagaccggaacgacctaatgtgtatgcagccgtcagatcgatctccttggcagcagctccggccgaagcagaagttccgtcaaaatcggtggagccccatgcggtcaatgaaaagtttccgacactaaatcccaaagtcggctggatactcgctcctgtctgatacattccgcgccagacatatgaacttacgagatctccctgaatattaaactgttgggcattcgcgttcatacttccccagaagcacatcattccaatcaccatcaaggctaaaatcgtgtttttatttatgacatttttcatctttactttctatctgttttttaactcttccagagctatattcaactttaatacatttactttctcggttccgaatatccccagcaacggcttctctacagctttatctacgactcttctcacctcttccacatccatgccacgtgcctgcgccactcttttcacttgtacataagcactctgtggagtgatgtccggatctagtcccgaggcactggctgtcaccatctcggcaggtacatccttgcgtgccagatacggatgatgaatgaggaaagtatcgatgcgtgcctccacctctgccagatattcaggattagtcggccctttattgctacctgccgaactggttgcatcatagccatcaccggcacatgaggggcgtccccaaaaatatttttcttccgtaaaagtctgtcctacattggcagcccctaccacttttccgtttaaggtaactacttctgcatttccccggttaggaccggctacctgtgcaaacagccacagcacgaggatataaaatacagagaagaatacacaaaagacgagagttatcttgatagattttaataatgttttcattgcttgaatatttaaaagaataaactgacaaccaaatcgattaacttgattccgacaaagggaacgatcactcctcctaacccatagattaaaaggttccgacggagcaaagccgatgcaccgatcggtttatattgtactcctttcagcaccaatggtatcaggatcgggataatgatggcattgaatatgacagcagagagtatagcactttccgggctatgcagattcataatattgagtgcacccaactctggaatagccaccataaacaaagcaggtacaatggcaaagtattttgccacatcgttggcaatagagaaagtagtcagggttccacgagtcatcagcaactgctttccgatttccacaatctctatcaatttagtcgggtcattatcgaggtcgaccatattgccggcctccttggctgcctgcgtaccgctattcattgccacaccgacatttgcctgcgccaatgcaggagcatcattcgttccgtctcccatcatcgccaccaacttaccggactgttgttctttacggatgtattccatcttgtcttcaggctttgcctcagctataaagtcgtccactcccgccttttcagcaatgtacttggcggtcaaaggattgtcaccggttaccatcactgtcttcactcccatcttgcgcagacgttcaaaacgttcttgaatgcccggttttataatatcctgcaactcgataaccccggtcaccttccggtcgacacacactaccagcggtgtacctccattaccagagatctcactgatcacttcttctatttctttcgggaatttattcccggctgcttccgtaatcttacggatcgcatcgaacgctcctttacgtatctgtgtgccatcggccagatcaacacccgaacatttggtttcagccgtaaactgaatcatccgggcaccggccgtctgaagactccgcatccgtacccccgattcacgtcctaactctacaatagatttaccctcgggcgtctcgtccgaaagcgaagccaacagacaggttgttacaaactcccgcggaccgactccaggtgccgaatggaatttcgttgccctgcggttaccaatcgtaatagtaccggttttatcaagcaacagtgtatcgatatctcccgccgtctccaccgctttacccgactttgtaatcacattggcacgcaatgcacgatccataccggcaataccgatggcagaaagtaatcctccgatagtagtcggaatcaaacagacaaacagagagaggatggctgcaatcgagatagctgttcccggatgttcaagactggtatagtcagcaaacgggatcagagtaacacatacgatgacaaagaccagtgtaaagcctgccaacaaaatggtcagggctatctcgttcggcgtcttctgcctgcttgcgccttcgaccaacgcaatcattttgtcaagaaagctttcgcccggttgctgtgtgaccaataccttgatatgatctgaaagcactttggtaccaccggttacagagcttttatctccacccgcctcacggatcaccggagcagattcaccggtaatggcactttcgtcaatggaagccaatccttcaataatctctccatcggcagggatcgtatcaccggcttcacaaacaaaaacatcccccttcttcagtttagaactacttacggtctgaaccttgtctcctattaccagtttagcaggagtctcttcacgcgttttgcgtaagctgtcggcttgtgctttaccacgggcttcggctattgcttcagcaaaattggcaaacaacaaggtcacaaacaaaattaagaacacacacaaattatatccgaaagtaccatattccggagtgaagagagagagtaacgttaccaccagcataataacggtaaccacttctaccgtaaacataatcgggttctttatcatcattcgcggattcaacttcacaaacgactgcctgatactttctattacttgctccttttgaaacatagaagctgacatcttatttttcataactttattatcctgctattcttataaacttaaatgttcggcgattgtactcaacgcatgtacagggaagaaagacaaagctgcaacaatgaaaatgacggcaaaagtcattactgcaaaagtcacagtatccgttttcaaggtaccggcactctcgggaataaactttttttgagccaatagtcctgcaatggctacctgtccgacgatcggaataaaccgactcaggataagtacaatgccacatgtccagttccagaaatatgtattatcacccagtccctcgaaacccgaaccattgttggcagccgatgaggtgtattcgtaaagctgctcgctgagaccatgaaatccgagattgttcagccatccgccctcactctccacaaaatcgggatgatgtgtatagacataacttgagatggcagtaaataccagaattacaaacggatgcaacaaagcgacgaaggttgctattttcatttcccgggcttctaccttcttacctagaaattccggcgtacgccccaccatcagtccgctgataaaaacggccatgataataaaggtataatagttcagccatcctacaccaacaccgccaaaccaagtattgatctgcatattcagcatctcgaccattccactgagcggcatagtcgaatcgtgcatcccattgaccgaaccattggaagtaaccgttgtggtgacactccatagggctgtggctccggctccaagccgtacctcttttccttccatcgcaccatgatcctgggcaattcccatttcgctgatacgcggattacctcccatctcctgaccgacattgataaagacacctgccagataagcaaacaacatcactccaaagataccatatcccaacttcctgcgattggtataaaagcccaaggccaataccatcgccatcggaatgatcaggatcgaccaacactctaccatattagtcagataggtaggattctccaacggatgcgaagaattgacaccaaaataaccaccaccattggttcctaattgcttaatgggaacaatcgcagccgtaggtccctgggataccatctgctcctgtccttcgagtgtagtcagttgcatccgaccgtcaaagcccatcggtgttccctgcaaaatcagaatgaaacctaccaccaatgaaagcggtaacagaatacgtgtgcaactgatcaccagaaagtgccaaaagttaccaatcgtttgagtgctcttggcagccatacttttcataactccggccatggcagccattcctgtggcagcagtgataaactggaacagcatgatgacaaacaattgagtgaaataagtcagaccactctcaccgctgtagtgttgcaaattacagtttaccataaaactgatgcaagtattgaatgcctggtcaggtgtttgagccccgtttccgtcgggattgagcggaagccaaccttgcgataccagtaacaccattccccatacaaaccaaaatgcattcaggatcagtaacgccttgaggaactgtttccagttcatctcctcctgcggattaataccacatatcttataaatcactcgctctatagacgccatgaagtccgaccaagtcttctctcccttataaacccgggctatgtaacgtcccaacggataagctaataccaccatcaggacaatctgcaccgccactcctaaaatttctgtattcattgctttattttcaaattaaaacttctctggacgaatgagcacatacgtcaaataactgaaaagtatgatacctactacaaatagtgttgtgtacataaaataaattctcctctctaaattgtttcaaaccagtcaacgcatttccaaaatagccagaagcaggcaaacccgctcaacaggcagaaaataaatgaaactgttattcccatgttttttaccttttaattaaaatgtttatacttatgttttttacctgtaactcttcatgccaaatgcgtgccagaaacagtcaaggataagataagtcactatcatacagagatataaaacaaatagggtatcttcgtcttgtacgaagataccctatcattatgaaaaggttcgttttattttggaaaggaaagaagcataaaactcaggcaacgatattcacgcgcgactcagagcttatattcttctatttttcggtataaagtagtcaatccgattttcagtaaacgtgctgcttctgttttattgcctttagtatactccaataccctcgctatatgcctgcgttccatagccgaaagttcaaagctgcccggcattccttcgtcggatttctcgtagtggctgttctgtatttccaacggaagatcgtctacatccagacggtcgccctcacaaacgatcaggctgcgttcgattacattacgtaattcgcggatatttcctttccagggttgttggcatagggcctccagataagcgggagcaatcctattgaccggatgtgaaagtttttcggagaaggaacggacaaacgattcagccagtatcttaatatctcccgtacgttcacgcaaaggcggaagatgtacctgaaacacggagagccgatagaacagatcttcacgaaaacgtcccacagctatctcggcaggtaaattacggtttgtagcagcaatgatacgcacatcaatgtgggtcggcttcgtgtcacctatcttgatgtattcgccggtttcgaggatacgcaacagcttggcttgcaactcaaaagccatctcaccgatttcatccaaaaagattgttccgttattggcttcttcaaaaagtcccttcttatctttcagcgcaccggtaaaggaacccgccttatgcccgaacatctcgctctccagcaactctttactgaacgaagagcagttaactgccacaaagttttgccgggcacgcttactgctataatgtatggactgggcaaacacctcttttccggttcccgtctcacccgtcagcaatacaggtacatcagtcaccgataccttacgggctaacgaaaccgcttctttcaatgctttcgattcaccgagtatggaatcgaacgaatacatcagtcccatcttcttctccagtttgtccaggcggatattcatccgtgccttttctacagcgcgactgatcaggggaatgattttattgttatcatcccctttcgttatgtaatcgaaagctccgttcttgattgcctgcacaccatcaggtatgtttccatgtgccgtcagcagaataatctctactcccggagattttttcttcatctccgtcaccagatccaccccgtttccatccggcagaaatacatcacacaaagccacgtcgggcatttgaagttccaattgtctgagtgctgtcttacaatcgccggcctgacacacttcgtaaccttcaagttccatcatacgtgccagcagaccacgaatctgcacttcgtcatcaataatcagaattttactcatatctgataagttaaaatgtgaatggtaaaaaacagggcgtgcaaatataatggttttctgctacaacgcaaatgatcggactgctgaaaaataaaattccgaatggcatgtcttttgaacttttattcatgactcagcgcccgataatcttccctaccccttttctgatcgctcagaagcggttcttaacgggtaaggaatcatctgaacaggcaagtgccaccttttcattttgataaaacaaactaaaatgaaaaggagacagataagaaaaaagaatcgtataactaaaaaaaatagagaaatgaaaatctacaaattcggtaagattcccacaggctcagtacagggaatgaaaggaatgctccgcctgattgacaacagtatcccccaaataatcgttctgtccgccactacagagactacggaacgtctggccggaatagctgcccatcttttcaacagagatacagaacaggcgcatgacgagataagcaggcttgaattcaggtttatcgatttcgccaacgaactattcaatgacgaatcgatcaagcaacaggcggtcgattccatcatcgatcgtttccggactctatggaactttacccgccaacgttttacatctgtcgacgagaaagacatactggcacagggagaatttatcagcagtatactagtcagcctctatctgaaagagcagggaatcaacaaccgactactcaacagcctcgacttcatgcgactggctccggaagaagaaccggacatggaatacatcggtacaaagctacacttgctcttggcagagcataagtcgaccaatgtatttcttactcaaggacatctttgccggaatgcttacaacgaaacctgttacttgaaacaaggcggagatgatgtttcagccacactgatcggagctgctcttcaggcacaagaagtatgtctgtggacagacagcaaagagttgcacagttgtgacccgcgctttgtgaagcatccggcaatggtgaagcagctcagtttcgacgaagccgaacaactggcctattgcggctggacgggattcaaccctcactgcatcctgcccgcaagagaaaacaacataccgatacgtttgctatgttcgatggagcctgcagaaggaggaactttgatttcaaattcacaaagcggagaaaacataaaagccattaccgccagagacaatatttattacattaaattccaatcgaaccgaacgttacgcccctatctgttcatcagcaaaatattcgatacttttgccaaataccacacttccctgtgcctgttcgcctcgtccggttctgatgtatctgttgccatcaacgacaaagagcgtttatcgcatatactccacgaactctcacgatatgcagccacggtggtaaaagaccacatgtgtatcctttcggccataggtaacatgcagtggcaatgcgccggatttgaagcccgaatcataaatgctttggccaccatcccgatccgaatgatctcttatggcagtaataacaacaatgtttcacttgtcatcagggcagaagataagagagaagcattgcaacgactgaacgacacgctgttcgctccctgccatgcaaatccttctcagatacatgttccgacattaaaacacagttagcaaaacactacgggccggcagtctttccctttaatgggagattgaacaacatggggatgttttggtgcaaaacatccccatgttgtatataagaacatccccatgttatcacacacaacatccccatgttttaatatctaacatacctgtatcactccacagacgataaggagatagtagtatatcttttggtgtaactgcacttccgtaagtaagataacccatacttgttaattttttaagcttttccatgaacctttttaagtcggcaaatgtttatttccataggaaactattttaaaacgaaaatatattcaaatgaagattattattattggaggcgtagcaggaggagctactactgcagcccgtatcagacgttcggacgaaacagcggaaatcatcttgttggaaaaaggaaagtacatatcttatgccaactgcggactgccctattatataggggacgttatcgaagagcgtgagaaactattcgtacagactcccgaagctttcggagtacgtttcagggtagacgtgcgtaccgagaatgaagttatttttatcgaccggaagaaaaagacagtaaccgtccgccttaagagtgaagacacttacgaggagagttatgacaaactgttaatatccaccggtgcatctcctgtacgcccaccattaccgggcattgactcaaccggcatctttactttgcggaatgtagcagacactgaccgcattaaagcatatgtcaacaatcggcctccccgccgggctgtcgtgatcggggccggattcatcggactggaaatggcagaaaacctgcacgcactgggagcgcaagtatctattgtcgagatgggcaaccaggtgatggcacctattgacttttcaatggcagcactggttcatcaacatttgatggagaagggtgtcaacttatacctggaacaagctgtcgcatcgtttgagcaagcaggcaaagaagtgaaggtagtcttcaagaacggacaatccatcctggcggatatcgtgattctatctatcggcgtgcgcccggagacaacgctggcaagagctgccgaacttacgatcggtgaagcgggaggtatcgcagtaaatgattatttgcagacttccgacgaatcgatctatgccatcggtgatgccattgaattccgccatcccattacgggcaaaccttggctgaactatcttgccggacccgccaaccgacagggacgtattgttgccgacaacctgctgggtgcacagattccttatgaaggagccatcggtacctccatcgcaaaagtatttgacatgacagtagcctcaaccggacttccgggaaagcggttaaagcaggcgggcattgtatatgcatcttcaaccactcatccggcctcgcatgcaggatactatccggacgctatgccgatgagtatcaaaataaccttcgatccccaaacaggcaagttgtatggcggccaaattgtggggtatgatggcgtggacaaacgaattgacgaactttctcttgtcatcaaacacgagggaacgatctatgacctgatgaaagtggagcaggcgtatgcgcctcctttctcttcggcaaaggaccccgtagccatcgccggttatgtagccgaaaacatcatcctcggcagagtaaaacccgtatactggcgcgatctgagagatatcgaactgaaagatgtgttcctgctggatgtgcgtacaccggacgaatttgcattgggttcactgcccggagcagtaaatataccattggatgaaatacgtgaccgtattgctgaacttccttcgaacaagccaatctacaccttctgcgccgtagggctgagaggatatcttgcttaccgcatcctgatccagcacggtttcaaagaagtatataacctctccggcggattgaagacctatcgtgctgctaccgctcccatcatcttgcacgaaaatgaagaaacagacgacacgccttctgcgcaagacagcccggcgaaaccttctgtgacagctgaggcaccccaaactacaacggctgcaaatcctaagacaatccgggtggatgcctgcggattacaatgtccgggcccggtcctaaagatgaagaaaacaatggatacgcttgttccgggcgagagagttgaaattgtggctacagacccgggattctcgcgggatgctgccgcatggtgcaactctaccggaaataaatttatctccaaggatagtaccggagggaaatcggtagtagtcattgagaaaggcgaaccccaggcttgtaacctgactacgacatgtgacagcaaaggtaaaactctgattatgttcagtgacgacttggacaaggcacttgccactttcgtcctggccaacggcgcagctgccaccggacaaaaagtaactatcttctttactttctgggggctgaatgtgattaagaaattgcataagcccaaagtggagaaagacattttcggcaagatgtttggtacaatgctcccatccagttcgctgaaactgaaactttctaaaatgagcatgggaggtatgggtggaaagatgatgcgatacatcatgcaccggaaaggcatcgactcactggaatccctgcggcagcaggctctggagaacggggtggagtttattgcttgccaaatgtcgatggatgtgatgggagtaaaacgtgaagagttgcttgatgaagttacggtaggcggagtagccacttatatggaacgtgccgataatgctaacatcaatctgtttatttaataaggaagtatgaatacaatatgtaagatgcgcgatatctacaaagcactctccattttcgaaacggcatttgaagaggtgtatggaatatcgctgaacgaagcaatggtgctatgtgcgttgcgcgaagccggaaaggaaattacctcgactgctatagccgaacgaacggaaatggctccgtcgcatacgtcgaaagtcatccgtgcggtagaagataaaggactcatccgacgggcattgggtgaagtagacaaacgccagatgtacttcagcctcacagaggcaggcaagaagcgtttaaacgaactggatctggacaaagtagagataccggaaatgttaaaaccactgatataagtttgtaacatcagaggtcaccacaggttacacagattatcacagatcacccatacagacagtcatccatttgaccttcatctgtacaggtttgtgtaatctgtggtgaaaacacctctgtaacttttctattcatctacaaaggggtaagaatgggatcactcttccaaccacttctttatcaatccgatggcttcttctttctctttttgaggcaaagtgtgaatacgagccatgtggctacccttcggctgtacaaacacatgaatattcttttttcccttcagccaggtgactccggctgctgtccacggatcatactgcccataaataaaaatcattttcggatcattctctttcaaaaaacgggttatcttgtaactcagagtctcgtcaaattccatatctgcaagctcttcggggatcatcaaacggcgaagataatctttacttgttccaattgaaagatactcccggaacggacgaatatcatatccataatatcccaattcacgtgccgcctggacaaagaacgaagtattagatccctctttcacaaaataggacggtgcactgatagcaaccaaatgatcgaacagctccttgtctgaagcagaaactgacggaatccggctgaccggaataccccactgccaaagtgaaaaagaatactcaagcaccgtataatcataaatgtcctctacaggcgcacggaactgcaacttcctcaccgaacagtattttttaaagtgaggcagtaaagcagctttacgcttcaatacctccatctggaaatcttccaccttttgacgatcatcgggcatagctactgttcgcagaaaaggctcatgacgcccatcttcgaccgaacggcaaagtggagccacataaggaaccgtaatatctatatcatccggaaagtaagtacgataaagcatcgctgtctgtcctcctttactgattccggtagcaatccattttcccggataaatggaacgaaaagcctcacgaatagcatgcagatccctggcagaattccaggctgtcagatacttccagtctttcggtttaggggtcgattcaaggaaatagcgatgttctactgcaatgatattggtattgaacagcttagacagttcctcgtaatatccgggattcagggaacgagcagctccgtagccttcagttaccatcagtgtcggccggtcatatcccacatgcgcaacgataacccgctggctgaaagatcctttttcgggatgactatgatctaatggctgtttgaaacgtaacaaatacttttccgcaaagagagaggtctctaacgattgggtacggatgataagggtaattgtattcaacttcgtcagcaaatccgactttgctgataaaggaagagttatggacagcaaaagaatgaaaagggaaagtgtctgccagatgcgtaggttcttcatatttatttcggttttaattttgtacaaagatagatctttcaccaaagcctccaagtaatcatactgcattttaacattattctttgcgaaccttttaacaagagtcttgttattttctgcaaacgccttaaggtaccagggcaagatttttttaattaacctaaacattataaagatatgaagagattaattcccatcttattggcggtctttgcattcgcagcctgcgaaaaagaccctgacatggacaaattggacaatgactatttggtttacaccaactacgacaagaaagctgacttcaaacaattcagcacgtactacatccctgacagcgttctcgtcatcggagataaaaaagatccggaatactggaaaggtgaagcagcagaagctatcatcaatgcgtacaaagaaaacctgaatagcaaaggttttacatatacagacaataaagatgctgccgacctgggtatacaggtaagttacgttcaaagtacttattacttcaccgattacggacaacctgagtggtggtggaactatcccggatactgggatgcaccttactggggtaattggggcggctggtattatccgtatgttgtaaactatagcattacaaccaactcattccttactgagattatgaacctgaaagctcctgagggtgaaaaacaaaaactccccgttttgtggagcagcttcctgagcggacctgcaagctattccggtaaagtgaaccaaactctggttgttcgcgcaatcaatcagtcgtttgcacagtcaccctatctcactaacaaataatttaatcaagaaccgttatgaaaacaatgaaatatatttctcttagagtactggccatagcggcccttgctctggcctttgccatgccggccaaggcacagttatcagataatggatacgctaacgtggactggcagttcaacgcaccactgaaaaatcactttgccgataaagccagcggatggggtatgaacttcgaaggcggttactttgtgactcctaatctcggactcggactctttatgaactacagcagtaaccacgaatacttcccacgcgcaactttccctgttggcgaaggaaccgtgaatactgaccagcaacataccatcttccagctaccttttggtgccgctgcacgttatcaaatgaatcgtggcggagcatggcaaccttatttcggtgtcaagctgggtgccaattatgcgaaagtacgttctaactacaatatgttcgaaacccgcgataatacttggggattctacgtatcaccggaaatcggtcttaacgtatacccttgggcttacggtccgggtctgcatatcgccgtttactacagctatgctaccaacaaggccaatgtgctgacttacaatgtagacaagctgaacaacttcggcttcagggtaggtcttgccttctaaaaagagcagaggtacctgactatatatacaaaagaggctgttatatcacatgacagcctcttcctttttaaaagcaatacatagtatgcttgcctttcatttgacaactttatcaatcactatttatctaaataaaagccaattggaatcttctatatgggcttctttcataatcgctttcaattcatccgttttctcggggtattgattcagcacattgtacttctccgacggatcagaagccaggttgtataattcgtaatagggcttatttccccgtatattcatgtgaacaagcttccagtcacctttgcggactgcctgacgcccattcatctcaagaaattcgaaataaagatattcatgttctttctgtcctttacggttttgtaacagaggaagtatactgacaccatccatattccgggtatccgctttcggattcaacacttccctgaaagtaggcattaagtcccagaatgaacacatgaaatcggtttccgtactgggttgtacgtgtccgggccacgatatgatcatgggtacacggataccaccttcgtacacgtcacgtttatacccgcgccatatgccattactgttgaaaaagtccggatcggcaccaccctccatatgaggaccattatcactcgaaaagatgataatggtattatcgtatactcccatatctttcaacttctgcacaatctgtcctacatatacatccaaccgatagaccattgcagcaaatgtagcgtgcggataaaactgagtacaatatcctcctttacggaaagcaggacttccaggctccactccacgataaggcttctcggggtacttcccacgaaacttcttaataatactatcttcaggtactatcagttcggcatgcggaataatggtaggataccacataaagaaaggttgatctttctccttagcggcttcatccagaaaagccaatgctttagagtgaatcaggtcctgcgaataagtacccttcccatattgcacattgagattattgtccggcaaatctacccgtttatcgttgtcccacaaatgatcgggataatagctgtgtgccagcaactggcaattatatccgtaaaactgatcgattccctgtttgtaagggtcccccgcggaaccgatatagccaagcccccatttaccaaaggcacctgtacgataaccggcattacggaaatcattgaaaatagtctgtgagttttccggcaatgggaattgtccttccggagcaagctctttatttccacggatagccgtatgcccgctatgggttccggttatcagacacgaacgtgagggagcactaaccgttgttcccgaataacattgggtaaaacgcattccgttctgtgccaaccggtcgatattaggagtctcaaacttttcctgcccataacagcttaagtctccgtatcccaaatcgtcagccaatatgaaaacgacattcggacgggtttgttcctttgctttcttctgccgggccaacgcctgctgtgtagaagccattcccacgagcagtgcacttccgagtaataatttctgattcataatgttcatttaaagttttcaaaacaaaaagaagagaatgtttcaaaagcctccttaccacagatcactcagattataacagactatccatgcggataacctatattttactatttcatccgtgtaatctgtggtgcctttgacacattcccttcttctcaaaatttaattaaaaagaacggctacagatccttttattcccatcccgggttttgtgtcaagttaggattaagagctatttcttctaacggaacctgatagagataatatttctccagccagccttttccttccttcaacggatcgttgaatagatagatatacccttcggtcatcgatccgttcgccccgtctgaagttccggtcatttcgttgagcaacgtcagtgagctgagttccgtctttgaaatccacatacctttctgctgcatattgacgaaccaaggagccattctccagcgacgtacatcataaaaaccaaatccttcgcccatcaattcgataatacgttcacgacggatttcccataataccggatcaacgagtatgccgttatcatttcctttcggataatattttccacgtttcgggtcaaagttaccatcaatctgggctactaccatatcggctacaccggcacgtttacgcaacttgttgatcgtctcgtcggcaatggtttgtgtaaattgattcgtttcgaacatagcctctgcatagttcaacaagacctcttcaattttaaagacaggtttgtcggcagtattcacctgggcattattatagttttcctcccaattatcccagttcttccatacataatatcccgaacgggaagccacataggcatgcggtccatatttctttccttcaattgtgtattgtgcgcccccttgcaggttaggaacacgacgtaccaatgaagcactccagttttgtcccggcaagcgcttcatgccaatacccggattactgcacgactcgttagctcccatgatatcaatatattcgcgatcggcaggatcactggtataagaccatgtggaataatcccccttaccatcttttaccttataaggcggcatgatggtgtgatacatacgcgggtcacgattgcggaaagtagcataaatatccttatctccctgatattggtctgaatgggaaatagtcttgccatccttacacaaatacaagtctaccgttccctgatgcatttctatatcatgtgaagaggtgtgttcataatagcacgaatgtccgggtttaatggtttccagccactgctgatacagaatgactccctgtaccttactcagatcctctgttgtccacatttcaccatatccggctgccggctgtccgtcggtaccataatataatgtaggataatccgccatcaacagcttcgatacacggatacattcatcgaagtatttgtcataactacccaattcatgatatttgcgccaggttgcttcgcgaagtgtgaaacgtgaaagagccgcacgtacacaatcacggttgatagtattcgaaccgtcctttttctcgtaaacggacgcatcaccgatattttgttcggcccattgcaagcgctccaggactttatcagccacttccagacgaggcatccgcgttccgtaagcttcttcagaggtttcgtccagtggtttatcgatccaaggcacatcaccgaaacggtctatcaactccatataccaaaatgagtggaagaaatatccaacagctttccaatgattcttttcagcttctgtcatatcagaatcatccacatgcgaaagcatcaggttgatacggcgaatgaatgtagagaagttccatccattacccgacgtagcattggtcactgtctgaaacgcatatttattctgactgctggctccacgttgattcaggtatccggcatacacatcacccatatagtgagagttacgcccgattgccgttgtagaagtggcgatattcgtattagagaacatttcataacatggccacataaaggccttaaaattgtcatacgacttgaatgcattttcttccgtcaggctggttacaggatatttctcaaggaagctatcgttgcatcccgccagtatcatccctgtaaagagggttaaaaacaataatatctttttcatattcatgtatcagattagagtttataatgtgatatttataccgaacgaaactgtacggaatgccggatagttccattctattctctccgggtcgatacccgaaggcaaagaggtgaaagtagctacgttttcaacactgacaaacgccttcatttgtgaaaggaagatctgagacaaccacttctttggtaaattgtaagacaaagtgatgttcttaatacggagataagaagcatcagacaagtatttgtcgctctgacggaggtttgaaccggaattacctcggttaccatacagacggggatacttcgcattcggattgactgcggtccagtcaccgttgtcgggatctttaggcatccagtaatcactcaaaccgtcaaacaacggaatgaagttatcaccgttcatcgggaaagtcaagacattcgaaatccagtaatcacgctttcctgttccctgaaggataacattgaggtcgaaaccggcatagttagctcccagattgataccatactgataacgcggagtcgtattaccgatcactttacggtcacccggattgtcgaatgtattgtcaccactggtaattacattagtagaactttcatcatcacggaggtttttgaatttcacatcacccggacgtacgttataaccattgatcgaggttattccctctttcagtttccaggatgatgtatcttcgaaatcgtccacagaataataaccatcggctatatatccccatatctctcccatcacctgtccgggatagaaactgctcagcaacttggtggttgcattatcatcgtatttggtaattttcgatttataatccgacaagttgaatcccaaacgatatcccaccttaccgatctggtcacgccagttcaggctcaactcccagcctcgtgtacgcatatcggcagtattctgataaggagcacttgcacctacgacagccggtagctgcacacccggagcaagcatgccgttagtgttacgctgataccattcaaatacaccattcaggcgattgttgaataagttaatatcaagtccgacattgaccgtacctactttctcccatgtaaagttctgacttaccaaagccggcaacgagctgatagaggtgacatacgtattgtcgataatccaggaagtagatttattgctgacactcattgtcggagtgaaagtatacggattcacattctggttaccgatcacaccatatgatgcgcgaatcttcaatccgtccaaccagttacgggtagactccataaacttctcctgagcgatctgccaaccggctgatacagaagggaagaaaccgaaacgagagctcttcgggaatttagaagaaccgtcataacgtccgttcacttccagcaaatatttgtcctgataattatagttgactctaaagaatccaccacgtacggcatattcactgtatgagtcggtagccttgatggtgccggttcccgatcccatggccggtacgtctatcaccgcctgattgtaagaataagcatccaatgtttcctgatagctcgactcctggttgaatcctgccattactttgaaattatggtcaccgaatttcttactatatgtagcgtaaacgttgatagcgttataattcgtatgctgtttgtactttctcagataatcgtctacaaatgattttgaacttcctccctgaatggtagtatagtcatactgtcctgtataccagtggtaatcatagatgtttttatcaaatgtatattcaaatacagcttccagtccctttagtggtttcaatatggatttcaggaagatacgcggattgtcattattattgtttaccggattcgacaacaagatctggttgcgtggagtgaacaaaggaagatcctcgtttgccaacgtattgactgatgccggcagatctccttccggataatatgaaaccaaacgggtattatacacacctcccattccaccgggtgaagtctgtagactatgcgcatagctcatagtcacttcctgagtgaaccagttagttacatctgccgaaataaaggtattgatattcatacgttcaaacttatcacgatcggacaccaatacaccgtcattcgaagtatatccacccgaaatacgataacgcagtttgtccgtacctcctgaagcggaaatattatgagtcatctggaaactggtctccataaagttcttataaagatctttttcattcaaatagtacggtacaccggattcatccatataaataccgtctcccaccgtattgaaagcagaagggttcttctggtattcactcagatattccatccatttgctgacacttggcgaaccgagcgaccaataggcatctgaatatccacaatccagataagcttgcagatagtccatcagcggagcctgtttaggcagattgacagctgttccgaaagcaaagttattgttgtaattcaatgagaacttagcagcacctttagggcgtttagtcgtaacgacaattacaccaccggctgcacgtgcaccatagatagctgctgaagctgcatccttcagtacactgattgactcgatatcttcggggtttaccatatcgaggtcaccttccacattatcaatcaatacgagtggcttaatggtgtttccgtatgaaccgtccgagttcttgacacccaccgaataggctccacgaatctggaacgacttactggttccgggagcattacctccattagatacaaacagtcccggcacggctccctgaagagcatcagatgcattcaagataggacggtcacccagtacctcatccattttcacagaagatacggctccggtcagattcgctttcttctgcgaaccataacctactaccactacttcttccagcgcctgggtatcatccatcataaccactttcagtgaggtttgattagttatcttaatattttgtgttatgtatcctatatacgaaatactgatcacagcattaggatggaccgaaagagagaatttaccattgatatcggtaatcgtaccattggaagggtttcctttttctaaaacagtagcaccaataataggttcaccgacagcatcggtcagtgtaccggtaatcttccttgcttgctgaacagcagctacagactggttctcataagtctctaaagacgtagcgaacacatagttcggagagagcaggccggcagaaatgccaagtcctatcagaacttaaaatgacatgaaaggattacttttctttttatattactttatcatttatattaggcggaaaaacaaatcaataaaagaattattttatattattttttagtattgtttattgtatttataaaaaatacagttaactttgtcttcgaaagttaaatctaatacaggtagaaaagtaggatcaagagggtaaacagacacatatagaagtcttctcaattagtcctatcccactatctaaaaaccaattaaatattaatacttatgagaaaatgctctccaatttcccctaactcctttcggaaagttctgatagaacttagagtagagcactcattttactattaattttaatacttttctccatcactgactattctcaaacttatttctttacatttagaaagtgaaacccatatttataacctgaatatcccggtggatcaatagtactaaatagaaatatcagcatatcaaacatcatgaaccataggacgttatacacaaattcctgacggagcaacgctctatcaggaattgatgtataatagacctatatatgtaatgattacttttctttcatcgcttcgtaaatcgtttcttgaattttttccctaatctcaagtttagataatttgttcacccaagcatcgggataggtacgattactaagaaatacataaatcaagccattgtcgggatctacccaggcacaagttcctgtaaatccggtatgcccataaacagtaaccggaacagaagcagcgcacggacttttactttcattcaccacatccggcttatcaaaacctaaaccgcgacggctgattttagacttttcggtagtgaatagagcacaagtttccttgctgagataacgtcttccatccaactcacctccattgagcaacatctgataaatacgtccgacttcacgagcattagagaaaagccccgcattacccgaaattcccccctggaaagcagccgactcatcatggacaaatccctgcaaagtagtcttacgcaggaaacggtctactgcagaaggtactacctcttttttatcgaagtaacgcaacggcagataggcagtatgttccaatcccatcggctgatagaactcttgccataaatattcatccatcggttttccactaagctcttctgcaagcatctgcaacaagataaacccgacatcactataacgataactcttgtcttttaacggtgcttcggctattttcttccgtatctcttcacggaacgaccggttcaaccataaactgtcacaaacctgaagagtataatcaccgttcttctctttagacgtcatccccttattaaaccggaatcttggatttccccaggtacggacacccaaccgtaccgtatgtaaggcatctttcgactgcttgaacagcgaacctttatagcttttcccgtcaatggcctcctgatagaaaagcagaccggaaggtaagccagactgatgcaagagcaattcacgaatggtcaggttctctttattcgtcttgcgcaggaaaggcagataatctgaaactttatcggtcagattgaaacgacctttatcataaagcttcattatggccaacaacgttcctgttgttttagacagagaagccaaatcataaatatccgtcggcttcactttctcgctatttgcatctgtatggtatccgaagcaccggtcatacaaagctttgccatccttcatcaccagaacctgacaaccgggataagctccctccttgattccctccaaagcaatcgtgtcgatacggcggagcacttccgatttcattccatattcttcgggtacaaagtggaaaggagtatgcggagtaatcgtaacacccgaaccggtaggaaacaatccgccaatactggccgacagtcttccatctgccgttgctttaccgaaaagtaaatcagccacacgttcctgaacgtcgtcacgagaggcatgagccaataccacagcctcagcagccgatacagcccgctgtatctgtaacatcgacttagctggcgtatagaatacatatattacaggagattccggagcaaacttggcgaaaaacgactgatagggagcaaggcgctgctctgtcacagtaacgataacacgccggtaggcggcaagagagtcacgcaacttttgttgctcggcttccggcagatctttacgcaattgaaaacgggcaaatgaagtatactttttcattttgcggtcaaaaggctcaatctcttccggtttgcctacattcagtatggccgcctctttcagatcgggatgcaaaggcaatacatcatttttattattcagcacagtaattgcagccagattcagcctgctaatcaaatcacgtgtctgaggtgtattaatacgggttcccaatcccgatagtttcacaaacggtttacgttccagccccaaaatatatttgtaagtgagtactttccgacattttgcattaatttcttcttccggaagttctcctttttccaccgcttccaatacagcgtccatttcttctttcagcctgcggggagccagcaccagatcattcccggcttgcaaagcttgcaaacatacgctcttattgccggcaactcccttcatagcaagggcatcggtaaagataagtcccttaaatgccaattcctcggtcagaagtccataaaccacattacgggataaggatgaaggcaaatcacctataggctcgatgacaggtacctgcaagtgtcctaccatcataccactgactccggcacgaatagcttctttaaaaggatacagttcaacactgtccaggcgctcacgcgtaaatggtaacacaggcagtgccttatgagaatccacgtccgtatcaccatgtcccggaaaatgcttgcagacagaaaggactttaccactctccagccccgaagcgtaagcaatcaccttatcggccactttcaccggatcttcaccaaacgaacgggtattgatgaccggattgtccggattgatattcacatctgccaccggagcaaaattgacttgcactcccatctcacgacactgtcgggccatctcccgcccatattcataaatcaaacggttgtcttggatacatcctaataccatgtttctcggaaagacaggagtaccacgcaaacgcatggaaagcccccattcaccatcaaaggtaatcagcagcggacagcgggccatccgttgcgcttcgttggtcaatgtagcctgattctgtatctttccgccggaaaaaagtaatccaccgactttataagtatgaaccgcatcacgcaacaactgcatattacgcttggtctgcacgggcgcaatggtgtaaataaacaattgccccaccttctctctcagattcatccgattgtagacagaatctacccagtgacagcacttttcgtcctgggaagcctgataaagcaacaaaggttctataggagcagacataccgggaggagtatgaaaaacctcacggacaggggcatccatagaagcaggaactttcgctcctactcccaaaagcgctgatacaactaaaccagccaataaatatcttcttttcattttatattgtaaaaagccattcacttccactattccggtgtatataacgactgataaatcacttcctggattgcttgtcgtatcttcatgctgttcagctttccattccaggcatcgggacaaagacgattactcaggaagatatagaccaggtcgttctccggatcaacccaagcacaagtacccgtaaagccggtatgcccataaacagaagccggagccgaagaagcacaggcatttgccttcggatccttcagattaggtttgtcataccccagtccacgatgactgacagctgatttctccgtagtaaatatacggcaggtttccggccgaagatagcgttttccatccagttcaccctcattcagaatcatctgatagatttttcccaactcttgggccgttgaaaacaatccggcattgccacttacgcctcccataaaggcggcagcttcatcatgcacatatccgcaaagatcctgccgacgtaagtaatcattggcagcagtcggcataatatccgctttcttataacggtttaaaggttggaacaatgtatgttccaatcccataggccgataaaactctgaaactaaataagcatcgagtatcttgccggtaacggcttccaccacctgttgcaacaggataaatccgatatcactatatacaaaacgtttacggtcgagttccgactgtgcaatactcttcatcatcgcagctttaaatttcttgtccagccacaatccatcggctatctgcaacgtatgcccggaggtttttgttgcagaaaccaatcctttcttaaacttgaaatcggaacaggcataagtatattctcccatacgggtatggtgccactcgtctacaaatccttgtgtaaaagggccggtcaccgagtattcatcgattgcatcacgataaaaacgaatataaggcaccagtccggattcatgtaacaacagttccctgattgtgatattatttttgttcgtagcccgcagagcaggcacgtatttagagacagcatctgtcaactcgatccgtccctgatcatagagtttcatcacggccagcagtgtggcactggttttagtcaatgaagcgagatcgaaaaggtcggtcgcccgtaccggagtagtgtctgttacagagtgagtgccgaaacatttatcatataccggttgtccatgccgcaataccaacacctggcatccgggaaaggctttcgccgccagcccggcagctaccaccgagtctatccggtggagtctgtatgatttcaaaccataatcttcgggtgctatgcccgctgggctaccggatatcacatctacaccggaaccggctgcaaatgtattgccgatacgcatggataaacgtcccgttgccgaagctttgcccaacaccacatcggctacatagcgttgcaaatcctcctcaccggaatgtgccaggacaacagcagccgaacgggcggcagcctcttcaagcgacgccagtgcccgataggaagtaaagaaagcgtagaccacaggagcttggggcctgaacccggcaaaaaacgaacgatactcacccgcttctttatcctgcaccgttatacagacaaccaccctccgatagtttcccagttctttcactatcttccgccgctcttcttccccggtatttttatccatccggaatgtttttaatggtaattcactacgtaacccctcgatgaaagaagcatcgctgccttcatctcccactgttaatacggctatctcaccctttgttgcagtaagaggaaggatctgaaaataattcccaagtacggtcactgccgacgtacgcagcttggttaccaaagcctgcgcttcaggagtatgaatacggtcactcaatccgtctaccggaatcatcggtcgcctgcttaatcccaaacgatatttatacgccagaattctacggcatttcgcatctatttcttccatcgtgaggcgtccgtcttttatggcttgcaccacactctcttgtgctttttctacattttgctgtaccagcaccatatcattaccggccttcagagccttcactgttacatccgattcggcagctactcctttcatggcgagcgcatcggtaaataccaatccattgaatcccaactctcctctcaatagatccgtcacaatgctatgtgacaatgaagaaggggtgatccggtcaggttctaaggccggcacttgtaagtgtcccaccatcacacctcccaatcctgcctgaatggcttctttaaaaggatacagttccacactgtccagccgtgcacgattataataaacggcaggcaatgcctggtgtgagtcgacatccgtgtcaccatgtcccgggaaatgcttggagacagacaaaatgccaccggtctccaatccacgcccataagctattactttctcagccacagttttcggattttcaccaaacgaacggacatggatgaccggattttcaggattggtattaacatccgcatccggagcaaaattaacgtgcgcacctatctcacgaagctcacgcgccacttcctgcccataagcctcaatcaaggtattgtcgctgatacagcccaatgccgcattacgtggaaacaccggcgtattttccaatcgcatggcgagtccccactcaccatcaaaggtaatcattaatggaattttcgactggcgttgcgcatagttggtcaggtttgcctgatcttctactgttccttcagagtacagaaaggccccgactttgaacttgcgggtcagtttgcccactaacttttcagtatctttatctgctcgtggagccagggtataaacaaataattgcccgactttatctttcagtttcatacgggagagcgtctgctctacccattctttgcaatgtgtatcttcctgtacaggcagaagtcctgcagcttgttgtgcccacaaagtgcctgcactcagcagaaacacaactgttagtagttgttttagcatagtttgtctgggaggtatttcatagacggtatttcaggaatccgctacagatttttacaacgtcctcttatttctttttttcaagtgttaagtccatctgccctacatagataccactcttaccggtatgcatcagcgacacattcttgccatccatattgaggagagtcttgggacctttcatgaatgtatgcgaatggcctccgagaacaacatcgatattacgtgttttagggatcaactgattctcgtcatactgcacacccagatgagaaagacaaaccactacgtcacatccctctttttctttcaggacagcagccacttcgttcgctacagttaccggatcattgtaaaccactcctacacacttattggcttgtaccatgccttcaagctggcaacccaatcccaaaactccgatcttgacaccgtctctttcaaagacgacatacggtttcaccaagtctttaagcaccgtagcacttacatcataattagcgcaaaccaccggaaaatcagccatccggaataaacgggccatattatccagatcaaaatcaaattcgtgattaccgatagtcatggcatcatacttcatttcgttcatcatcttcacttcgacttcaccctggaacatattataataaggtgtcccctgcgaaatatctccgcaatcgaacaataacatatcaggatgctctttgcggaactccttcacaaatgtggcacgacgtacgaatccgcctttatcataattccggtcaccttcctgattgataggttccaggcggctatgcacatcactggtctgcagaagaatcagctttttatcctgctgcccaaatgcagaaaaagaaataaagagaataaaaaagaaagttagaagtgtcttttccttggaaaagaacgtatgttttttattgattgggaatatcataatttactggattttatcgttttataatctataacgtttttatttcacagtgattctgccatccagtgccgaagtgatcttctttccggcagcagtctgctgtctcacgtaatcaagaaaaagcccgcgtaacgtggctccctcgggacacacacgatcatcagcctgcaagaaagcctccatacttccattaccgtcagccagataatcgattgtcgccacggtatacagcttattgtcatcgatcggctggccgcccaccgtagcattcagtaattttccatccttggtaatttccatccggataccgctcaccccttctcctttcaacgatgcaatgcttgtgagcaatgctttcaggtgtgttcctttcatcttcattacacaaagcgaattttcgaatggcaatatctcatataccgttcccaccgtaatatctccggcaggcaaaatattacgcaatcctcccatattcaccagtcccatgtctgccggcttgtcctgcaccttggttgcagcctgacgcaatacttccgctacaagattagaaagcaagctctcgggatgtcctttgtccatcttctgctcgctgctgccaatcacctcatacatcatattgtctattttttctttataaggctttaatattgccacggcatctgcatcgggatgggtgtcccatttggcgtcaatgtcaatcatccttccctctactttggcaatctggtaatcggtttttgccatctcatgcgtcgactgacaagaactaaatgtcagcaaccccgccagaatgaatcctgaaataatctttgcgtaattttgtttcatatccttaagtacttaataatgctacaaatatacaaaaacatttggctatccggcaaataattcgttactttgcaccgctttcgcgcaatcgctgtcaggagagagttacctggtatgttgcgttgtaacgataaaacaatttaataataaacaacaatggatttaattaaaattgcagaagaagcattcgctaccggaaaacagcacccgagcttcaaagcaggagacactgtaacagtagcatatcgtattatcgaaggtaacaaagagcgtgtacagttgtaccgcggtgttgttatcaaaattgcaggtcacggagaaaagaaacgttttactgtacgtaaaatgtcaggaactgtaggcgtagaaagaattttcccgatcgaatcaccggctatcgacagcattgaagtgaacaaggttggtaaagtacgtcgcgctaaactgtactacctgcgtgctcttaccggcaaaaaagctagaatcaaagaaaaaagagttaacggctaatcagccctgctctccgattcgagataaaaaagagggaatcttccggcaagatttcctcttttttattcgtaacacaagacaagtatcactcctatcttttccgacaaaaagacgctaaatcttataaaatagaatcattatactctcctttcaaacaatttgctaaccacccctttctcaaacaaagagcttctgtggatctttttgcataaaaaaagaataagaaaagagtattcatgcagaatttgatcactttgagactatatatacagaaaaagacgaaagagattattaatttcgtccaagtcttttgttaataacgtccgagtcttttattaataaagtcgaaacgaatcattaacttcctccaaaggaggtatgaatagtctaaaatcaaagccatttttcacttattggctccggttgcagaaaggtatcctaagtagcatttcgaagttcagttacaagattcgctatcacacgaaacagaataaaagaatattcccttcttccggtgagaattaagctcaataagacatctttttgagctgccggaaatcagctgaaattcattttttccacggatctcaaaccaaagaccggaatatgccctccttgaaacgatagaaaatacaaaatgacatctttgacaaaacgatattggagtacatcccgaagctcccgcccgtacagacaaaaaaagctccggaatgacttccggagctttcgctaaataatcactttaataggacgtttagtctctcaagtctttcagttcccaagccaatgcactggcacccagcacagcagcgtcagagtccttcaactcagaaacgagcaattttgctttacctttgtaaatgttcagaaggttattctccatggctttcataatcggcttcataatgtaatcacccgattttgccaaaccaccgaacaggataatagcttccggactcgagaaagcaatagcgtctgccaatgcttcacccagaatattacctgtaaattcgaaaatctcctgagccagtttatctccctgtacggctgcatcgtatacgtctttcgatacaatactctcagccgggatattacgcaacaagctggcatcggtacgtgcagcgaggaattcgcgtgcagtgcgtgccacacctgtagccgagcagtaagtttccagacagcccttgcgtccgcaaccacagatacgtccgtcacgacgaacaatcacgtgaccgagttcgcctgcaaaaccgtcatgaccgtaaaccacctgtccgttgataacgataccactaccgacacctgttcccagagtaatcatgataaaatctttcataccgcgggcagctccgtaagtcatttcgcccactgcggcagcattagcatcgtttgtcaaggcagtcggtatacccaagcgttcttcgaacatagaagccaacggcaatacacctttccaaggcaagttaggagcaaattcaatggttccggtataatagttcccattaggagcgccaatgccgataccctttattttatccaccccgccatttgcgataatcaacggcagaagatttttgcatacttcatctgcatattcttctactgtaggatatacttgagttttcactgcaccgcttgctataatagttccgcgcgcgtcaacaattccaaagacagtgtttgttccgccaatgtcaatacccaccacatagggcttctccatgcttgaattcatgatactcttatttaaagggttagttaatattaaatgtttattgcacacaaattacgtaaagaagattgagtctacaaaatctttttttaaaaaagttcacttcgtttgcaacttttcgtatcagccgtacgtctaatagaacaaatcataagaaatttgaaactaaatagatgaaactgtgatacacttaaaagacattaacaaaacctacaacaacggagccccactccatgtactcaaaggcatcaatctcgacatcgagcggggtgaattcgtttccatcatgggagcatcaggttccggcaagtctactttactcaatatactaggtatattggataattacgataacggagagtattacctcaacaacgtgctgattaaggacctgagcgaaactaaatccgcggaataccgcaaccggatgatcggtttcatcttccagtcattcaacctgatttcatttaaaaatgcagtggaaaacgtcgcactgcctctgttttaccagggagtaagccggaaaaaacgtaatgccctggccatggagtacctcgacaagctgggactcaaggattgggcacatcacatgcccaatgaaatgagtggaggtcagaaacaacgtgtagccattgcccgtgccttgattacacagcctcagattattctggccgacgaacctaccggtgcattggacagtaagacgtccgtagaggtgatgcaaatactgaaagacctgcacaagaccggaatgaccattgtcgtagtcacccacgaaagtggagttgccaatcagacagataaaattatccacatcaaggatggtataatcgaacggattgaagagaacctgaatcatgatgcctcaccattcggcaaggatggatacatgaaataaaaacagatataaatatgattgacatttggcaagaaatatacggtaccatcaagcggaacaaactccgtacgttactgaccggattcgccgtagcatggggcatcttcatgctgatagtgctgttgggagccggaaacggactgatccatgcttttgaaaagtcatcatcggcacgggcgctgaactccataaaaatatatccgggatggacagggaaaccttacgacggattaaaagaaggacgacgcatccagttggacaataaggacctggatgccaccatggagcacttcagcgacaacatcatcagtgtaggtgccagccaatggcaaagtaatgtaaacctgagttacggacaggagtacgttaacctttcactggaaggtgtgtatccgaactttaccgaagtggaatccgtaaaatcgacagacggacggttcatcaatgacatcgatctcaaagaacgacggaaagtaattgtactgcataccaaaacggctgaaatccttttcggaaaaagcaaaacagaacctatcggaaagtttgtaaatgccggtggagtctcttatcaagtcgtaggcctttacaccgatccgggcgatcagggaagcagcgaggcttatattcctttctccaccttacaggtaatctacaacaaaggtgataaactgaataacctgaccttcaccaccaaagggctcaccaccattgagacaaacgaagcattcgaggcagcctatcgcaaagtaatgggcgccaaacaccgttttgacccatcggacaacagcgcactgtggatatggaaccgttttaccaattatctacagtcacaaaacgctatgggcatcttgcgtacagccatctgggtgatcggcatcttcacattgctgagtggtatcgtaggcgtatcgaacattatgctgatcacagtaaaagagaggacacgtgagttcggtatccgcaaagcattgggtgccaaaccattctctatcctgtggttgataatcgtggaaagcgtgaccatcacaacactattcggatacatcgggatggtagccggaatcgccgctaccgaatggatgaataaagtggccggagaacaaaccgtagatgtaggaatgttttcggaaaccgtattcctgaatccgacggtggatatcagcattgccatacaagccacgctgaccttggtcgttgcaggaacactggcaggattcttcccggcaaagaaagcagtgagtatcagacctattgaagcacttagagcagattgattatgagagtagatatggatacgtgcgaggaaatcctcgtcacgataacaagaaacaaaacacgaagcctgctgacggcattcggagtattctggggtatcttcatgctggtggccctgatgggaggcggacaaggaatgcaggagatgatgcaagccgaatttgaaggcttcgcaaccaactcgggtttcatggcctcacaaaagacaggagaggcttacaagggattccgcaaaggacgctattgggatattgaaaacgcagatattgaacgaatccgcaaaaaagtaaaagacatcgatgtaatcactccatcgatagcccgctggggatcgacagccatttatggagagaaaaagtacgattgcagcgtgaaagggctttatccggactatgcaaagattgaaaaccaggatatggcttacggaagatttatcaacgacgtagacgtacgcgagggacgcaaagtgtgcgttatcggcaaacgtgtttacgagagccttttcaacccgggcgaagatccttgtggtaaatatgtacgggtagacggcatttattatcaggtgataggcatgtgtgtgtccgaaggaaacatgaacatccagggccgggcttcggaagccgttgtgctacctttcagtacgatgcagcaagcctacaacatgggaaaacgtatcgacgtgatatgctataccgtgaaaccggggaaaaaggtaagcgaccttgaaccggagatagaagccatccttaaagaggcccattatatatcgccggatgacaaacaggcagttatgaaactgaatgcggaggccatgttctcaatgatggataatctgtttaccggtatccatgtattgatctggatggtaggcttgggcactctgctggcaggggctatcggtgtatcgaacatcatgatggtgaccgtgaaggaacggaccaccgaaataggtatccggcgtgccatcggtgcccgtccgaaagacattttacaacagattttatcagaaagtatggtattgactaccattgcaggcatggccggcatctcttttggtgtactgatcctgcaattaatggaaataggcgtcaactccggtaaggaccattattcccacttccaggtgtcttttggtatggctatcggaacctgcctgttactggtgacgctgggactactcgccggactggcacccgcttacagggcaatggctatccgaccgatagaagctatcagggatgaataaagtacgatctttctctgtctcccgcacaaaaaaggacgacaagacagcatcggttaacaaagaatacacagtcaagatagaaaataataattcaaaatataaaacaagatgaaaaagtatctgaaaattacattactggtagtggtagccgccatcttcattgggacattcattttcctgtaccagaaatcaaagcctaaaacaaccgtatatgaaaccgttaccccggagattgcggatctggaaaagactacggttgccaccggcaaagtagagccgcgagacgaagtactcattaaaccgcaaatatcgggtatcatatccgaagtatacaaagaggccgggcagaccattaagcaaggtgaagtaatcgctaaagtaaaagtcatcccggaactgggacaattgaactcagccgagagccgtgtacgtgtggcagagatcagtaccgcgcaagccgaaacagatcatgaacgtatcaagaagctttataacgacaagttaatcagcagagaagattacgaaaaaagcgaagtagaaataaagaaagcacgtgaagaattgcaaactgcaaaagatgcactggagattatcaaagaaggtatcaccaaaaacagcgcttccttcagcagtacgctgattcgttcgaccatcgacggattgattctggacgtaccgatcaaagtaggtaactcggtaatcatgagtaatacgtttaatgacggtacgactattgccacagtagccaatatgaacgatctgatcttcaaaggcaagattgacgaaacagaagtgggacgtatccatgaaggtatgccggtgaaactgactatcggagctttacaaaatcttacattcgatgccgaactggaatatatttctccgaaaggtgtagaagagaacggagccaatcagttcgaaattaaagcggccgttcatgcaccggactctgtacaaatccgttccggatattccgccaatgcagaaatcgtgcttcaacgtgcgcaaaaagttctggcagttcccgaaggcattatcgaattcagtggcgacagtacgtttgtatgggtaatgaccgatagtatacccgaacagaagtttgaacgccgccagatcaaaaccggcatgagtgacggtatcaaactggaaatcaaggaaggtctgaccggaaaggaaaaagtaagagcttcggaaaagaaagacaaataaacctctcgtataatatagggaaagtatgaatcaccaacaatgcataatatgagaaataaaatattgatcaacttattgatactgaccggactgtcagcttacactgcacaggcacaggaaggatggactttacgccggtgtatcgattatgccattgagcataatatcaatgtgcaacaaacggcaaactcggccgaacagagtaaagtggaggtgaataccgccaaatgggcacgcttacccaaccttagcggcagtgcttcgcaaaattggagttggggacgtacagcatcgccggtagataacacctataatgatatcaacagcggtagcagtagcttcagcctgggtacaaatattccgttattcaccggtctggaattaccgaaccagtatgcacttaccaaactaaacctgaaagcagcaatcgaagacctgaataaagcaaaagaagatttggcaatcaatgtcacttccgcttacctgcaagtgctttttaatcaagagttaagcaaagtggcacaaagtcaggtaggactcagcaaagaacaactgagccgcatcacacgattgcatgaagtaggaaaagcttctcccgccgaagttgccgaagccaaagcccgcgttgcacaagatgagatgagtgcggtacaggctgacaacaattaccggttagctctactcgatttaagtcaattgcttgaacttccgactccggagaacttctcacttgccacaccggatacggagttggaattctctccccttacttcacccgacgaaatctataaccaggccatgctctacaaaccgggcatcaaagcagccgaatatcgtcttgaaggtagcgaaaagaatgtccgcatagcaaagagcagttactatccgcaattgtctttctctgcgggattaggtacaaacttctatacggtaaatggtaacgccggttcaaattttggcaaccaaatgaagaacaacctgaataaatatgccggattcagtctgaacatacctttattcaatcgcctggccactcgcaaccgtgtacgcactgcacgcctgcaacaaaccaatctggcattgcaactggacaataccaagaaggtattatataaagaaatccaacaagcatggtacaatgccatagctgccgagagcaagtttaagtcaagtgagtcggcagtagaagccagccaagagtccttccgcctgatgagtgaaaagttcgacaatggaaaagcgacctcggtcgagtacaatgaatccaaactaaatctgactaaagcattgtccgaccggattcaggccaaatatgactatctgttccgtacaaagattctggacttttacaaaggacagcccattgagtaagagaagttattattattgtaagtgataggggtggaacaatggttctacccttattttttattacctttcaggccatataaaaataaagggcgaaattcccattccaccctttaccaatcaaaattacaatctaagaatgagctataccacgaccggacaactcactccttcattgttatacaagtaatgtgccaaaaacataacttcctaataatcaaagattctaagaaggaaaaagatgttcgacaacgaacacctcacctacatttgcggacactataaaaaaggagcaagtgaaacatacgatagcagacaatatccccgggaaagaagcaaaacagaaatactcacaactattaatcctcttttgctttttttttcataccttgcggcacttttagatcatacagaaaaatatcccggaacacagtatacaagaatggacgacttaaatatcaacagttttaacgctctctatactctttattacaggaagtctttcttgtttgccaaatcgtatgtacacgacgaacaggtagcagaagacattgcggccgaagcactgatcaaattgtgggaaaaactgaaaactgatatcataaattcccctcaggccatgttactcaccattctgaaaaataaatcactggattacttacgtctggaacaaaacaaactgaatgctatgtccgagttgagtgaactttatgttcgcgaactggatattcgtgtatccagcctggaagcttgtgacccgtcagagattttttccgaagaagttaaccaaattatccaagccaccctacgcacactcccggaacaaacccgaagagtctttaaaatgagtcgtttcgagaataaaatgaataaggaaatagctgaaaatctgggcatcacagtcaaaggagtggaatatcacatatcaagggcgcttaaagaattccggatttcactcaaagattatcttcccttgttttacttctttttctatttccactaaaaaaaatcaagaaacagactagggttgtattcacttctatcgtcttatagatgtaacggagcaaaaaacgttcatcaagaactcgtataaattatgaatcaagagatactaaacagatatcttacaggagatgccagtgcggaagagaagcaaatggtagtccgatggctggatgccgatccacaacacatgcgtgagtatcttgccctgagaaagttgcacgacatcaccctttggcaagagaaaccggcagcaacggttgataaaaagaaacggctgacacttccttacatcagggagttcattaaaatagccgctattttcctcatagcagttacctctgtttatttcctggctccggagagaggaaaagatacacctgatttgaaagcaatacatgtcccatcaggacaacgggcagaattaacattaggtgacggaacccgagtatgcctgaattcaaatacgacacttacgtttcccgaccacttcgaccggaaagagcgtagagtgacactggacggtgaaggttatttccaggtggcaaaaaatgaaaagaaacccttcatcgtacaagccaaagaatatgaagtaagagtattgggtaccgaatttaatgtgatgatgtataaagatcaggactttttcgaaacagtcttgctgaaaggctcggtagaagtaaacgaaaccactaccggcagaaaagttaaactgcaacccaacgaacggttattcggcaaagccggtcaactccggaaagagagtatcagcgagtggaaccgggcattatggatgcaaggaatcctttatttcgacaatacgcgcatggacgaaattatccgccagttaggtctatactatgatgtaaaattcattttggaaaaagagtccctggcaaatgtacggttcaccggaaaatttcgtatcagagacggcgtagaacacgtattaaaggtgcttcaactgaaatgtaaattcacctatcaacgggatgaagacagtaataccattactataaattaaaaacaagtattaactttaaactaaaaacagagaccaatgaaaacataagaacaaaaagagccgaaagtggtggcacacttccggctccgggttaacaacaccccagtctgcgaaaacttagtgagtattaattaacacagtgtacaaatgtatgaaaaacactctaataaaaacaagtaaaatcgtaaataaatcaatttcacatactatgaaaatgatcgttttattccttttcgttttcatctcgggagtattcgccggcaatgcgaactctcaggaaacaaaggtatctatctcgaaaaacaataaaccgatccgggaaatcctgggcgaaatcgaacgccagacagattacctgttcgtatattccgagaaggaggtagatgtaaatcaacgcaaaaccgtcaatgtaagtcagcaacgggtagctgatgtactttcttctctattccgtagcaccaatgtaggttatgccatggaaggacacaacatcatgctgatggcaaaaacaactcaaacagacgctgtacagcaaaaacgtcatattacaggagtggtgaaagacatcaaaggagaaactatcatcggagccaacatcatgataaagggcacaggtacaggtgtgagtactaatatcgacggagaattttccatcgaagcagctgccggtgacgaactgattgtttctttcatcggatacctgacacaaactatcaaaatcgattcacaaaaaacgctcaatatcaaattactggaagacactaaaacactggaagaagttgtcgtagtaggttacaccgtacagacgaagtcggccgtaaccggatcggtagccgtagtgaaagccgataaattgaaagacgtaaacacactggaagtaggaagtatgctccagggaaaagtatccggcgtatatgtctcaggttcatccggcgaaccggggcaagccagcaaaatccgtattcgtggtaaaggcacactgaactcgtctgtctctccactttgggtagtcgacggtgtgattgtaggtgaggatccgggactgaacccgaacgagatagacaatatcagtgtgctgaaagatggttcggctaccgcattgtacggttcgcgtgccgccaacggtgttattgtagtaaccaccaaaagaggcgaatatgatgccaacaaatatagtgtatcggtcaatgccggtgtatccttactatcgaccgggcgccttgagatgatgaattcacaagaactttatgactatcagaaatcctggaataatcagtcgtggttcacagaagaacttctgaaacacaacacagactggtttaaagaagcttccaaaccaggattatataccaacgcaaacattacctataccggaagcagcggtcgtatgcgttcctttgttatggcagactactaccgcgaagagggagccattaaggactttacattggaccgcttcactttccgttccaacaatgatgtgaagtttacagaccgcttcaccatgtcaaccaagatttcaggttcgctctcacgtacagacagtcagcaacgcagcgtgtacaacacttatctctacctcccttgggatttcccttacaatgaagacggttctatccgctcgggacaagaacaagactggagaggacgtgacggaatcaacgacatgtatgacctgcaatggaactggagccgttcgaaaaaactgacggttgacggaaccattaatttcaattatcagattacggattggttgcgtttcgagtcaaacaactatattcgctatatcagtaaccgctccgagagctacacggacaagcgttcgcgttcggggcaatcggacaaagggtcgttatccaactctaattcactactgaccaagcaattcaccaaccaaatgatacgttttgagaaatcattcggcaaacacaaagtcaacgcactgggagcttacgaatatacccgccacttttacgaatcgacttccgccgaaggacgaggcatacagcccggcagagagattctggacgtaacaaccggtattaaatccatcggtggatacaaagacgccattgccacccaatcggcactgttcaatgccaactacgactatgataaccgctacatgggacaagtatcgtatcgcatggacgaatcatcttgtttcggtaaaaacaatcgtatgggacacttcttcacagtcagtggcggctggaatatccagaacgaaacttttttcgaatctcttcgtgagtctgtcaaccaactaaaagtgagagtcagttatggttctctgggtaacactcccggagcatactacggacactacccgctctattcctcaatgatgtataatgacgaagtagcttacttcccttcacagatggggaatgccgacctgtcttgggagaaatgttacaccaccaatatcggtatcgacgcacggttcttcgatcgcttcggagtcaccatcgacctgtacaataaaaatacctccgacttgctgtactatgccccgctacctaatatatcaggctacaccggacaatataaaaatgtaggtgccatcaataataaaggcctcgaaatcagtcttaatgcagatgtcatccgtacctcaaaattccagtggaccagtgacttcaacattggattcaaccgaaaccgggttaccgaactttatggagggaaaccggaactgaagggattgaaacgcctggaagaaggacgggatatggatgaatggtatctgagagaatgggccggtgtagatcctgctaacggttctccattgtggtataccaccgatgagaatggcaaacgcacaactaccgactcttacaataaagccgaccgtgtatattgtggttctgccgcaccgaagtttaccggtggatggatgaattcatttagctataaaggttttacactgactgccaacttcgactttgtatacgggaacctgctttataaccaatcccgcgaattgctcgattccgacggtgcctatgccgactacaattcaatgaaactgaaaagcggctggaaacgctgggaaaaagaaggagacatcgccacgcatccgaaagccattaacggaggtaacaaaaactctaacaaatcgtcttcacgctatttagagaaaggcaattacttcagcttgcgcaacttatcactggggtattccataccggagaagttatgcgggaaactgggcttgcaacaggtcaacgtctcttgcagtgctgataatctattcacgcttaccccattctcgggggtatctccccaattgtcggacagcagtaccgacggttatgcaggtactatctatccgttgagcagaagaatcgtgttcggccttaatgtttcattctaaaaaatcacgtcatattatgaaaatcaaacatatcgtatcttgctttttcgtttctctgatcggactttcggcttgctccatagaggaactcccctacaaccaactgacagaggacgagctggatggcagttatgaatctctgctgtctgccacccgtggtaactatgccgtatttaaacagacagccttccaccaggggtggcactatgcaggcgagttggccagtgataacgtttcgttgagcggagtgtcgtcggatgcattaatgtatatctacaactaccagcgcatcacggacaactaccatatgtcgaacatgtggggatgggcctaccgctccatcatcaactccaacaagatacttgagaaagcacaggaaggagagagcaaagagatggaccagctgattggcgaaaactacttcctcaggggatggctggaatttgtactggtcaatgtcttcgggcgcccttacaatcagtcaccggaaaccaacctcgggattcccctgaaactgacggcagacataaacgactatccaatgcgctctaccgtaaaggaatcttacgagcaaatcctgaaagacctgaagaaagcagaaacactgctgaattcggagtcgaacatctacgccggtcccagtgcagccaaggctctgttgtcacgcgtctatctgtacatgggtaacaataagctggctgccgaatacgctaccgaagtaatcgaaagttcaggacgtactttactggaaggagaagcttatgctacagccaatgttttggtaccggaagataatccggaaatcatctttgccatccgttgtactaaagataaagacgactacggttggaactctatcggaggcttttatgccaatatcgatggggtaggctggggagagttgtatgcttccgaaccactccgggatgcgtatgcggaatatccggaggacttgcgctcacgatatatcgttccgcaatacctgaaagatgacgagacaggtgaatatcgtaaagaatttatctatatcgaatcctccgaagaagatggagtccccagaaagtattaccgctggaacgaaatcatagaagaaaacggaaactaccggatcaaagatgcctatttgtcgaagtatgaatacaaagacacactgaccatgaagcaggatgccggaggctattacgtagaatcgagactgaaatcgggtaaagacaatcccaccccgggcacatacgaaaaacattacgtgaccatccaaaatctgatggcaaaacgcaatgactatccgaagtactacgtatacaaatgctccaaacaagaaaaccaaccccagctgtggtcaccaactgttctccgtctgggcgaaatgtacctgaaccgtgcggaagcctatgccaaagaaccggcattgggtgatgctttggcagacctcaacgtaatccgtacccgagcacacatacccgcactttcggccggtgacatgaaacccggtaaaaccatgttggaatatgtattggaggaacgccgcaaggagttggctttcgaaggacatcgccgcttcgacatcttccgcaacggactgaccatgaaccgtacctatccgggcactcacgaccgtggagccgcaacttcggtccgcctgaccatttcagctgacgatccggcagcaatcgaattcatccctcaacgtgagatcgattcatatccgggagtcttggaacagaatccataaagggagaaacatccggtggacccttgtccgagtatacgagggtctaccggataaaaagaagatatagagataacctgaacagttcatttaacaaaaataaaaacgacatgagaaacatccaacgaaccatcctttggatagccgggctactcttttgcctgccatcctccagttcaaacccagtagtcataggcaatagccgttttacctttatcaccgaccatctggtacgtatggaatacgcacagcagggaaagttcctgaacgactctaccctcttcgctgtagaccgtacccccagatgtaccgaagtaaaagtagagcgtaaagaaggcaaccgttacatcatgaccactcccgccatgcgtgtcgagtattacaatgacggatttcccttcggacaaaccaacttgtttgtctatttccgaaacggagactcccctaaagaaaaacgttggtacatagccagccgccaaagccggaatctattgggagcagtgacaacgcttgatgacgtagaaggtcccatcgaccgccaggaagggttattgagccgggacggctggtatcttattaacgataccggtaaggaagtcctaaaaaacggatgggtggcgacacgtgaccgtaaccatgttcaggatctgtatttgtttgtttacggcaatgactacaaggcagccttgaaatcacttcaggcagtcagcggaccatcaccgatgacccgcaaatatgtacacggatcttggtattgccgctggtggaactacacagacgaagattatcgccagttggtacgggaatatcgtgaacacgactttcccctcgatatcatggtgttcgatatgggatggcatacacaaaatgccaaagtcggaaccggacatgccggcacacggggttggacaggctatagctggaaccgtaaactgattcccgaaccggagaaactgataaaagacttcaaagacgatcatatctacgtagtactgaacgaacatccacacgacggcatccgtccgcacgaagatagttatcaagcttttgtacgagatttgggagtcgatacccagcaaacaggtgtacccctgtttgacgcaggtgaccgtgactatatgaatgctttcatgaaacatgctcatcaggaaagtgattccatgggagtagccttctggtggctcgactggcaacaagattatctatatcctctggtacggggaacaaatatgaaacatcttccctggatgaatcacatctattataattattcgtccggtaaccaccttcgcggtgcaggtttcagccgttgggccggatggggcgaccatcgtcacccgattcaattctccggtgatgctgtgggcaactgggacttactccgctttgaggtcgacctgactaccaccagcggtaatgcaggttgtttcttctgggcacatgaccttggcggattctacgacggaaccgacccggaactttacactcgctggacacagttcggattgctgaattcttcactccgcatccactcggtgtacgacgaaaaactcgaccgccgtccctggctctggggcgtagaagcagaaaaggcaatgcaccggatttaccacctgcgctctcaactgatgccctacatctactcttccgtccgccaatgccatacagatatgttgccacttaaccggggaatgtacattgaatatccggacgaagaaaaagcctatcagtatccgggacaatttctcttcggtgagctcttgttgggtgctcccatcaccgccaagggagaaggagaaaaaaagatagccacacaagaggtctggctgcccggtggaaccgactggtataatttcttcaccggagaaagacaagaaggcgggcaagtgatcaaaacgaaaagcccgctggaacaatttccattgttcatcaagggaggttgtcctctaccgatgcagccttatacggaacgaatgtgttccaccccgctcacagaattgatcgtacgttgttatccgggcaaagaaggagcaaacaatacttatatcctgtacgaagacgacggactgacccaagactacctgcaagggaagtatgccaccacacgcctcaactatcagaaatcagggggacagacgatcatcactgtatctccggtagaagggacttatgaaggacagccccgaaaacgtgcctaccggatcgaactgccggggattccggtacaggcccgtgtgtcggtaaacggcaaaaaggctcgaacaactcccaatcaagaattaaacggagttatcgtacctattaaggtaatggatatccataaaccgattgtaatcaaaatacaataataatacggccttttcccactctcctccccccacaaagcagattggaaaaaccaatagtaattcctacccgccaattgggaaagtagcgggataaggccctcaaataaagtacaatgctaaaaagaacatttatattaatcggccttgtcctgagtttttgttcactgccagcgcaagaactgattcagattacgacacgcaacacagcacttgttttcagggttgccaatcaatcactaagacaagtttattatggcccacgcctggcagacaccgatgtattacagaaacagggcaataactttccggcatattcgacttatggaatgggagaacaaaacgaagtggcccttcatgcagtacatgcagacggtaatacctctacactactgaactttgaaaacgtgaaacaagagtctccggaacccggcataacactgactacgatttcactgaaagacccgctatatccttttcaagtgaaacttttctataaggcatacgaagagagcgaccttatagaacaatggactatatatcagcatactgaaaagaaatcggtaacactttaccagtttgcttccgcacagctctcctttaaatcttcctcctaccgactcactcactttgctggtgactgggccggagaatgcaacatgagtgaagtagaactgacagaaggcatcaaagtgatagattccaaattaggaacccgtgccacattctttgctcatcccatgtgtctgctatccctgaacggacggatgactgaagacaatggagaagtgatagggatggctctggcatggcctgccaacttcaagttggagtttgaaaaaaacaacaatcaggaactccgtgtacttgccggaatgaatccgtacgcatcacactacaaacttaaaaaaggcgatgtattccaaactccttcgttcctctacacatacagtacaaaaggaaacggacaggtcagtcgtaatttccaccgttgggcacgtaaatatggtttacgccacggagaaaattcacgttataccctgatgaacaactgggaagccacttacttcaactttaacgaacccaaactgaaatcaattatagaagatgctgcagggatgggcttcgaactcttcctgctggacgacggatggtttggacagaaacatccccgcaacaatgatgacgcaggacttggcgactgggtggtaaacaaagaaaaacttcccaacggactgggatggctggtaaaacaatgtacggataatgatatcaagttcggtatctgggtggaacctgaaatggtaaacccccaaagtgaactattcgaaaaacatcctgactgggtaatccagcaaccgggacgtgaacatattctctttcgccggcaactggtactcgacctgtcgaatcccgaagtacaagagtttgtatataagagtgtacacgacattctgaaagataaccctcagatagcttttgtgaaatgggactgtaaccgtgctgtaaccaacccgggatccacttatttacctgccgacgaacagtcacacatatggatcgaatacggacggggattactgaatgtttttaagaaagtacgcgattcacatcccgacgtacactttatgctttgctctggtggaggaggccgtctggattacggttcactgcgctacttcgaggaatactggcccagcgataataccgatgccttgcaacgtatccttattcaatggggcaattcacagttctttccctcgatagcaatgtgttgccatgtttctgccagtccgaatcatcagaccgggcgcactactccactgaaattccgctttgacgtagctatgcagggagctttgggaatggatttacaaccgtccaccatgaatgaaaaagaagtaatctttgccaaagaggctatcaagacttacgaaagtatccgtaacatagtgtttacaggcgacctgtaccgtattttatctccttacgaaggtaaccgcacctccatgatgtatgtattgccggacaagagtcgtgccgtattctatgcttaccaattaaaatcacatatcggtgaagttagtgctccgatgcgtttcaaaggtctgagtcccgacaagaaatacaacgtgaaagaattgaacatctatccgggaagccgtgctgcaacagggtcagccaacggacaatctttcagtggcgatttcctgatgaatcaaggcttgcctattggtttatccggtgattacagtagcgctgtcattgagttggaacagcagtagccgacaagaggttgtttcataactcaccacagattacacagatttacatagataaatattattggttatcagtagatttaaaatcgttttgtgtaaatcggtgtaatctatggtgaatacgagttttgacacatttacatttgcagtaatagcaatccggctataagtgtttattattgatcgattccaaacgaagccacaatgatatttttttcatccaaagaattaggattacgaaccgttatcccatattcgcccaccggcttttctttcaatgtgatcagataagaactttctccatattttttagctgtatacggaagtagttccagattattactagaggctcctccaaatgtactcaaagaagataactcggccttacgtactttcttacccgtttcaaactgaaagatattaataatagacattggatcggtattgttgtccacagctctcacaatcaacttaaaatcatctccctgatgtaatcgtacctgagcgctaggaccatctacatttatctttgttttcactttacccatacctaccaaatatatcgaagcattggcttttgttttgattttaacagtagctttttccagcggagtcgtgctgttatccggatttaacactaacacctcacctataaaatcaggttcggtaaccgtctcttgtgcataactacctgtacagaacagaatgcttatcaaaaataataatttaattctcatacttgtcgttgtttttaaattaaaataatctacaaatatatctattattcacaatttttcctataagagtcagttacattatttctcaaatccggcaagttctttcttcacaatccaatatccaactcttgactctgaaatacccggcttcactttatggttacatatcaactcgtcatccactatcgcagattctaaataataaaaacaacaggcgtcatctccatccaatttacgggccaattctatgatatgtgtagatatcaaaaaacggctatatgcctttgctttcaacacctctgctacggcaaccgatgcctcaaaagcatcccgcgcattggttcccctaaacaattcatcgaaaagtacaaaacagtgatgccccttgttaatctgttccagcacctcttttactctcaatacttccgcatagaaatggctgcgaccatctctcagagaatccggcagattgatagaagtaaaaataccatcgaacataggacaaaccatcgaggaagccggtaccggaaatccggcatgagccaaccatacagcagatgctattgccttcaaagtcgtggatttacccgccatattcgacccggtaaagatgcagatattcccattctccatctcccaatcgttcgctacagcatctttcacttgcggatgatagaaattgcacagcataaacttgctatcattagtaaaagaaggaaagcaccaacctttcatcactgctgtccgatgcacggtacgaatggcatccagttgatatacaatagaaagaagagctgcaatggtatgatttcgtcgataacggaaaatgtaatccaaacggtcggtccggtaaaagctatcttcctgcccgcaggaatcaaccatttttcccaattctgtagcctgatagatctctgagatagtggcggcaatgttacggatcaaccggggagagagttccgtcacatgatctgcaaaagttttcagctccaacaaaacgttttcaagcaacttcgttcccctacggatgacataacgctcgggagtagccctgaaatgccggaagatatatgaaaaggcagattccaaatagctcactctcgtcggacgatctccctggctgagataaaactcaatgaaatccagttcttccctacaaatacgtatctccggaaagtccggatagcggatcgcttcctgcctttcgtgcaatgctttccaatcagacaaagggtgaaccagccactcttccagacacctctttcctccatcactttccgtcatgtcaaagagcgagaaaagagttttctcgccatacgtactttccacaattcctaagtcattgagggtctgtcgatctgttcgcaactttttcacggtacctcctatgatagatttcccaaagatagaatatttttccgggaatagcactattcatcctctgggaattgtataactttgcagccgataaatccatagtttacatattgaaatgggaaaatatcgcacgaaagggagcattgctctcatcattacaggaagtgtcctgatcctcgtactggcaggtttatatctggggcgtaacggaattctctgccggacggccgacaaacgaatactatatgccgaacaaaaatacggattatctatctgctatgaggacctgcgaatgaaaggattaaacgaaatcgaactgaaaaatctctctatagttccccgcaaccgggatacccttctcaccctgcatactttgaacatgcacctcaacttttggaaattgattcggggaaaaatggaagtgcgtaatgtaaccgtcgaccaactgaaggcctcatttataaaagcagacagcatggcgaattatgattttctcttcttgaaaagaaaacgagagacttcatccggacaggttcagaccgactatgcccacagaataaaccggatactgaatcttttctatggcttcctgccggaaaacgggaccttgtgtcaaatagacattactgaacggaaagaccgtaacttcgtaaacatccatattcccaaactaacggtccggcaaaatcattttcgctcggatatcgaagtacatgaagactcgacaacccaacattggaccacctgcggaaaagtaaaccgaagcagccataccctgaaagcagaactctatgcacaacagaacaacaaaatcatcctaccctacctcaaacgccgtttcgatgccgatattcgtctggataccctgacttatagcctgacaaaatcggaaaagaatggcggacaggttcagttgaccgggcaagcggctgtcagtggactcgaagtatatcacaaggctctttctcctgaaacggtcaatttggatcgtggtcaagtatcttaccggattcttgtaggcaaagaatccgccgaactggatagtactactgtgatacggttcaatcaaatgcagtttcacccttacctgaaagccgaaaagaaaaaacagcaatggcatttcacagcagccgtagacaagccctggtttccggcagaccaattgttcggttcacttcccaaaggattattcagtaacctggaaggtataaagacaagtggcgaattggcctatcacttttttctagatgcaaattttgccctgttggacagtctgaaattggaatcggaactgaaggaaaggaatttctgcattgtaaactacggggtcacagatcttggtaaaatgtcggaagaatttatctatacggcttacgaaaacggccaaccggtacgtacttttccaatcggcccttcctgggaacatttcacaccattggacagcatctctccgttgttgcaaatgtctgtgatgcaaagtgaagacggagctttctacttccaccggggattccttcctgaagccatgcgcgaagcgttgatacaagatctgaaagtgaaacgttttgcccgcggagggagtaccatcaccatgcagttggtgaaaaacgtatttctgaatcgaaacaaaaacatagcccgcaaactggaagaagctctgattgtctggctgatagaaacagaacgccttacctccaaagaacgaatgtacgaagtatatctgaatatagtagaatggggaccgctcgtttatggagtgcaggaagcagcaacctattattttaaaaagcgaccgtctcaactgacagccgaagaatctatttttctggcttccattattccaaagccgaagcatttccagaattcgtttaacaatgatatgcaactgaaggagagcctggaaggctattaccgtttaataaccgaacgattagtgaaaaaaggaatcatcagtgaagtggcagccgacagcatccgcccggaaattaatgtaaccggcgaggcaaagaaagatctgcaaagagacagcatacaatagtttgccaaagcctcgaagccaagacaagaggtagatgttctgacctcttatcctgactggttcaacttctgaaattttaaagaaataatacggaaacagaaaggaaaggcaaatagcacttatctttctctgttccccctctctgcagagcgggatgaagtactacggctattgctacgtttgctatccgtacgctccggtgttgctctatgaggagtagatatgttttcactcttccggacagtattcgtcctccggttattttccgtacttctggttcctctgccggtacgggtaacattcccaggagtcactctgttgttatcccgtgaagctgagctttctctttgggacactcctcttctcacctcatctctccgtcccgaattggaacgtatggttaccgatccgaaatcggaacggcgatgcgtgttataatttcgatgatctcttatactgtgcgaacccgaatagaaatcatgtcgatagcgtccgcgataatagctgttatgataatgagtacgatagtgtccaccgcaatagctgttatagtggtacggtttgccaaagtagaaatgattatggtttgtataccgaatatagatacggaaactccaactgccaccactggcataaaccggtcgataaaaataatcgacccctataaaacggcgatactgtgaagcagtcagcacccaacgcaaatcatcattacgaatgtccagggtacgatagtatttatcgagtgcccactcttctccccttatcacatcgtccatcagataacgaatggagtaaataaaatcgtaattgatttcgtatacatcattatattgccctgtgctcaggttcagttcataggccatcttatcggtcaggaaacgagtctccttgcgaatgcggctattgctcatggctgccatactcacactgcttatagcagtgattcctatgaccaaaaagaatatcaatattcgtttcatatcttaagtctatttaattctattatagttcctcacaaagttcttcaccgtatcctgattcgacagaaaatccaatccgtctattgctgcggaaaaattatctttatccactacgctcggataaagtatcttcagtaccttagtccgatcatcatcaaagctataaagttttatcaatctgcagcattgctctgatgtaaatccggtagagcgggttgctttctcaatgaaatctgtccggtccgaatcaaaagttttactctttacatcatttaaaaagcgggcaaactcatcgtttctcatggctctatagtcacaagcgggagctatgtccgaagcagtgactgtaccgcctatgcctaaagaaaaggaaggggcaggaggagcagtcggtgcaccgtctctaaacgaatccaacccaacaacacggttgtcgataaagttaacacaaatcactgaatgccctgctttggaaagatacccgcgatattcccactcttccattgctccatcaaagcgtctgtaattgggctttccaagaatcgccttcacttcctgttgtgtcattcctttctggatactcattagctgactgtttttgaagtttaagatcaagcctgcacaactactcataacaacaagcaagattaatatcgccgaaacatgtatttttttcataattcttataggttttagttacgttgattatggtattttctcacaaattcgttcatcttgtttttatccgactgaaaagtgaggctttcgatgaccagatagaaattgggtttatcaacaatccgtggatacatagcctgcatcagttttatcttttcactatcgaaactgaacagatttactaattggagacattggtcggaagtgaagcctgtcgaaacaagtgtagtttcaatcagcttgttacggtctgagtcgaaatgtttgtctttcacagttctcagaaaacggtcgaactctgtacggttcatcactacatcatagccgggacgcaccggacgatcgggacagaaatcaggacgatcattatagcccacccgaatatccctgatattcataccgggatttgagacccattcctgaaacagcaagtcgcctttcacactttgtccggtacgtggtatataacgtactgcatatacttctatccggtgcctgcccgaataattagcaatgaaacaagtctccgtcggagtgcagatttgctcgccatccacaaagacaagaatcgcctcacctgagctttggatatttattccactgattcttccggcttgtgcaacaaatgcaacaaacaagaaacaaagagttatgattacttttcgcatgtcgtttagtttttattgtttctaatatcacaaaaatagggtgaggaaactccccaccctaatgattctatctattcatacgtagggttttccctattcaacttagggacgtaccaactcgatgccgtcttcatgaagaagaatcagacgcttcttgtacaaatcgccaacggccttcttgaatgtcttcttactgacaccgaacgtgtcataaatctcctcggcaggactcttatctgtaagtccaatccatcccccatgctctgtgatgtagcgatgaagtgtctttgaaaaatcatctatcttttcaaagcccggcttctggagaatcagatctatcttgccatcttcgcgtacctgcttgacgtatgctttcagtacatcgccggtatgtaaagtctgaaatatttcactatcatacagcaagccgctatacatattctcaataatagccttaaacccgaggtctgtcttctgccagataaggatgttcacttcttcaccaggctgataagaagctttctctttagataagtaacggtctactttggccgaagctacgatccggaaactttcatcatcaatatgggcatggataacgtatttattccctacctgcatcttcatcttctgctcgctgaaagggacaaacagatccttcatcaatccccagttaagaaaagctccgaactggttgacccacgatacttccagacaggcaaactcccctacttgtaccaaaggtgtcaatgtagtagctattaaccgttcttcattatccagataaaggaagacgttcaaccagtctcccaacttacaatcttcgggtacatagcgggtgggcaacaggatttctccctcttctcccccatccagatacataccgaaatcgacctgcttgactacctcaagctggttgaattttcctaattcaatgctcataatcttcattctgtttactgcaaagataaataaaaaacagacgtaagaatgattagccgccgaaaaacatattgccgcatctgcttgttatcattggcaaatgataacttttcattatagcgcaaaacttttttcgataaacaacctgcacataaacaagttatctttgcatcggaaacaaaaaaacaaagcaattgtcgaattaaaaaagatataaattatggaattcttaaccaacgaaaaacttacgattgtaggagctgccggaatgattggctctaacatggcacagactgccttaatgatgaaactgactccgaacatctgcctgtacgacccctatgcacccgctttggaaggcgtggctgaagagttgtatcactgtgcgttcgagggggtaaacctgacctacacttcagacatcaaagaagctttgtcgggagccaaatacattgtgtcctccggtggtgctgcccgtaaagcaggcatgacccgtgaagatttactgaaaggtaatgcagaaatcgccgcccagtttggtaaagatatccgccaatattgcccggacgtaaaacatgtggttgtcgtattcaatcctgccgatatcaccggattgattgtcttactctatgccggactgaaaccgtcacaagtatcaacattagcagctttggacagtacacgtctgcaaaacgaactagtgaaataccttcatattcccgcatctgaaatagtgaattgccgtacgtatggcggacacggagaacagatggccgtattcgcttctaccaccaaagtacaaggtgaagcgcttactaaaattatagatactccacgtatgcctatgcaggattgggaagacctgaaagtacgcgtcatccaaggtggaaagcatatcatcgacctgcgcgggcgctcttcattccaaagtccggcctatctgtctatcgaaatgattgcagcagccatgggcggacaacctttccgctggccggcaggaacgtacgtatccgacaaaaagttcgatcatatcctgatggcaatggagacttctatcacgaaagaaggtgtgagctataaggaaatacagggaactcccgaagagcaaaaagaaatggaagagagctacgctcacttatgcaaattacgtgatgaagtgatcgctatgggtatccttccggaaatcaataaatggcatgaactgaacaagcatattaactgatgacatcatacaaagtttaattagttgggatactgcctgtctgctacgtgcagatgggcagtattttttaggcatacttattcctgaacagttattttggcttactttcgtcagctgcctccaattgtttataatactcctctttctctttgttctttttttgaatcaggctggtgacataaaccgtaaagatcgggaacatcatcatacccagtgccgccagcaacaccgaaagtacacgtcccgtcacggtgacagcaataatattggaacctaccgtagtcacatccataaatgcccaccaaagcgcatctccgtaaccggtcaccaagggattgaccttgtgttcgagtacaaaaaaagccaggcttgaaaagtaaacagtagcaagcaacatagtcagataggaaacaaacagtccggaagccttattataagtaagccaccccaccacaatagccatcgcatagccgcctcggaccaaaggaacaaaacgaatcatataagtcacttcgggtgaaaaagtccatcccatataggatataatattctggtaaggtatcgccaccaacaaaaagatgaaatgcgtactaagatagtgccacttatttttcgaaagaaacaactcgagaatgaaatcgaacagaaataagacacaaatccatagctgaactttcatataaaccgattgggtataaaaagggatacccttaaacgtatctatcgagatgctgatgaccagaaacagggaaagcagcaggatgatgacatgtaaaatgccgtaaatccctttcttccgcaaagcaaaatcagaaagagccattttcataagcgctgatattttataggttattttattatgcagaaggaacaagagtcctacacgatttgtttgatacccacccggattcaatagaggaaccggtgatttcactcttcaccgatgttaattaaccaagtttgacgttagtaaactaaaacatctcacgttaaacgttgttatagacactgacttaaaaatatttttcacttaaaaccttaacttatggcaaatattaaacaagcagtgaaactaggggtattcaccctggcgatcatgaacgtaacggcagtagtatccctacgcggacttcctgccgaggccgtatatggaatgagttcggccttctattatcttttcgcagctatcgtattccttattccgacatcactcgttgcggcggaattggctgccatgttccaggacaaacagggtggtgtgttccgttgggtaggcgaagcgtacggaaagaaattgggattccttgccatctgggtacaatggattgaaagtacgatctggtatccgactgtattgacattcggtgctgtatctatcgctttcatcggaatgaatgatacacacgacatgacactggccagcaacaaatactatacactggccgttgtgcttatcatttattggctggctaccttcatctcactgaaaggaatgggatgggtaggtaaagtagctaaaataggcggtatggtgggaaccatcatccccgctgccctgctgattatcctgggtattgtttacttggcatccggagggcattccaaccttgacttccatagcagcttcttccccgaccttacgaatttcgataacgtggtattagcggcaagtatcttcctcttttatgccggtatggaaatgggcggtatccacgtaaaggatatgcaaaacccttcaaagaactatccgaaagcagtatttatcggtgcacttattactgtaatcatctttgtcttgggtacattctcactaggtatcattatcccagccaaagatatcagcctgacacagagtttacttgttggcttcgacaactattttagatatatccatgcatcctggttatcaccgatcatcgccattgctcttgcattcggtgtgttggcaggtgtattgacatgggttgccggtccgtccaaaggtatctttgccgtaggtaaggccggttatatgcctccgttcttccagaaaaccaataaattgggtgtacagaaaaatatcctgttcgttcagggtggtgctgttaccgtattgagccttctgtttgtggttatgccttccgtacagagcttctatcagatcttgtcacagctgacagttattctttatctggtgatgtacttacttatgttctccggtgccatctacctgcgctataacatgaagaaagctaaccgtccgttccgtatcggtaaaaaaggtaacggcttgatgtggattgtcggcggcctcggcttcctcggttcattactggcgtttatcctcagctttattccgcccagccagatttctacaggtagcaacacggtatggttctctgtattgattatcggtgctttggttgttgtgattgctccgtttatcatttatgcagctaaaaagccatcatgggctgacccgaacagtactttcgaaccgttccactgggaaacacaagctaaaccacaagttgctccggcaacaacaactaccgccggtccggcaacaagcagcgctaccactatcggtagtacaacttctgccccatcgacaggttccggctctgtttcatccgataaggacaccccacagaaacaaagttaaaagtgtatctatctacctgaatgaaagaggttgtatccgaaagtttattctatattctaccggatacaacctcttatttttcataaatctgctcaggatttcaaaggaagggtaaaccagaaggtagatccttttgtcacttccgattcgactcccatttctccccccagattctgtacgatagtttgtgaaagagtcagtcccagccctgttccgggtacttcatggtccaatttggtaaatcggtcgaatattttatcctgttctccggcaggaatgccaatacctgtatcagaaacataaaagtaaatctcgtcctctccttggggacgacatccgaaacaaatctccccactgtgggtaaacttcatcgcattatgtaccagatttgtgattatctgtacgatacgatgttgctcggaataaatgatccattcatctgttcctgccttacaaatcagtttaatttcgggcttgtctttcagacgtatgtttaaaatgccatgcagagcacataataaatcgtttacatcaaattcggaataatggaaatccagactacccgactctatttttgaaaggtcgagtacatccgtcactatctgcaataaacgatcattgttttccgctacaatatccagatacatctttttttccgtatcatcatccgcagaagccaacaaaccggaaaaaccgacaatcgcattcagtggggtacgaatttcatgactcatattagctataaaagcagatttcaacttttcggcagaaacagcgttctctttttcaatattcagcaaccgctgcatattcttcaattcagtaatatcatagacagtcagtaacatctgttcgtgaccttcattattcaagtaagtacccgagacagaaacatcacaaggaataatctgttgatgatccgaactgagcagcctcatggatgcttctaatttatgaaaaccctttttatggcagaatgcattctcaatagtatggcgaatcatgcaattttcgcaatttttatgtgccccgcatcctccgccactacgaacagcgtttttacaattcagcagatcaccgactctaccggaggacgcaggctcttctgagattccactcaaatcataataattggtccttatcaccaccaagtcactatttatcaagataaagcaagcgttcatactacgtaaaatcatatctgattccttggtttgagccacccattcgttcttttgcacacttatctttctccacaaataccaatatctggcacaaataaaaagaataatgattataaagacgctaaagataatgtagatcatcatatacttctaactggaaatcttatttgttttgtttgttatgaacatgtccgcagttacccgctacataattttgcggtaaagataaggaaatagcattatacatataataaagacaaacgtttattttattgaggatgaccacattttaagaaaccttttcttccggttgcatctatgcatattcatacagtctctaacccaaagatactaagtcttacagattttcatacatcttctttgtctactgtccattcctaatttcattaattcaccgacagaaacgtattaatatcattttcgttgaagaaagacgtaagatcatcgtaaaatcaaaacaagaaaaaagatttccactccctttggacaaatatttcatattttctttgccaaactattgcagtattaaaaattatacctatctttgcacccgcaatcacaaaggtgccatagctcagttggtagagcaaaggactgaaaatccttgtgtccccggttcgattcctggtggcaccactttgcaagtagcggaatgtagcgcagttggtagcgcactacgttcgggacgtaggggtcgggcgttcgagtcgcctcattccgacattcgcacaaacaagccactctatttgagtggcttgtttgtttttaagaaaaagaatcggaattaacggattgtagctcagtttgaaaatttgggatcatacctaaattttgagagaattcccggatcaatctaaattcctctttttactttcaccccaaaaattactcccccctaaattatatatcacttccaatccaaattctgcatatttctacatcacatgctatttttatgtataaaaagagtaaaaaaacagctttttatgcatactatttccaaaatattgcatacttttgcgtcgttcttagaataattatacaagatgaagaagaaagcaaaccggttagacgccatcaaaatgattatctccagtaaggaagtaggttcacaggaagaactcttgcaagaattaggtcaggaaggatttgaactgacacaagctactctttcacgtgacctgaaacaactgaaagtggccaaagccgccagcatgaacggaagatatgtatatgtattacccaacgacatcatgtacaaacgtgtcggcgaccagagtgccagtgaaatgttgatgaacaatggcttcatttcccttcagttttccggaaatatcgcagtaatcaaaactcgccccggctatgccagcagcatggcttacgacatcgacaaccgtgaatctgacaccattttgggaacaattgccggagacgataccattatgttggtactacgtgaaggggcaacgcccactgccgtacgacatttcttgtctctcattattccgaatatcaactaactaacaacaattatactctatactaaatcaacaatggacactcaacaaatagatgttatggtagccgacgcctcgcatgaggtttacgttgacactattttggagacaatcagaaacgcagcaaaagtacgcggaaccggaatagcagaacgtacacacgagtacgtagccaccaaaatgaaagaaggaaaagcaatcatagctctttgcggagatgtatttgccggatttacctacattgaatcatggggaaacaagcaatacgttgctacttcaggattgatcgtacaccctgacttccggggattaggactagccaaacgtatcaaacaagcctctttccaattggctcgtttacgatggcccagagctaaaatattcagtctgaccagcggcgcagccgtgatgaaaatgaatacggaattgggatatgtaccggtcacttttaacgagctgaccgacgacgaagccttttggaaaggatgtgaagggtgcataaaccatgaaatactgatggcgaaggaccgtaaattctgcatctgcaccgctatgctatatgatccgacagatccgcataacataaaaaaagaacaagaaagaaataacatttaaaatatacagcactatggaacagaaaaagaaagtagtggttgcattcagcggaggtctcgatacctctttcactgtaatgtacctggccaaggaaaaaggatatgaagtgtatgcagcgtgtgccaacacaggtggcttcagcgaagaacaactgaaacagaatgaagagaatgcctacaaactgggtgctgtgaaatatgtcacactcgacgtcactcaggaatattacgaaaaaagtctgaaatatatgatattcggtaacgtactacgtaacggtacctatcctatttctgtcagctccgaacgtattttccaggcattggccatcgcacgctatgcgaaagagattggcgcggaagccattgcacacggttcgacaggggccggtaacgaccagattcgtttcgacatgacattccttgtcatgactccgggcgtagaaattattacgctgacccgcgatatggcactcagccgtcaggaagaaatcgactacttgaacaaaaatggcttcgaagcagactttacaaaactaaaatactcttataatgtcggactatgggggacttcaatctgcggcggagaaattctggacagtgcacaaggattgcccgaaacggcctacctgaagcaagtaacgaaagagggaagtgaacttctgcgccttgaatttaagaatggtgaacttcacgccgtgaatggagaagtgttcgaagataaaattgccgccatccaaaaagtggaagagataggtgctgcttacggtattggccgtgatatgcatataggtgatactatcatcggtatcaaaggacgtgtaggattcgaagccgccgctccaatgttgatcatcggtgcacaccgtttccttgagaaatacacattgagcaaatggcaacaatattggaaagatcaggtagctaactggtatggtatgttccttcatgaaagccaatacctggaaccggtgatgcgtgatatcgaagcaatgcttcaagaatcacaacgtaatgtgaacggtacagccatccttgagctccgtccgttgtcattctctactgtcggtgtagaatcacaagacgacttggtaaagaccaagtttggtgaatatggagaaatgcaaaagggttggacggccgaagatgcaaaaggcttcatcaaggtgacttctaccccactacgtgtttactatgctaaccataaggacgaagaggtatgataaaagcaggaatcattggtggagcaggatatacagcaggcgaacttatccgcctgcttatcaatcatcccgagactgaaatcgtatttatcaacagtaccagtaacgccggaaacaaaattactgatgtacacgagggactttacggagagtgtgacctgacttttacagacgaacttccgttggaagacatcgatgtactgttcttctgtacagcccatggggatacgaagaaatttatggaaagccataatatcccggaggaactgaaaattatagacctttcaatggattatcgcatagcttcaccggatcatgacttcatatacggtctgccggaactaaatcgtcgtgcaacctgcacagcaaagcatgtggctaatccgggatgtttcgcaacttgcatccagctgggactgctcccactggcaaaacacctgatgctaaatgaggacgtaatggtaaacgccattacaggaagcacgggagcgggagtaaaacccggtgcaaccagtcattttagctggcgtaacaacaatatgagtgtatacaaagctttcgaacaccagcacgttcctgaaatcaagcaatcgctgaaacaactccagaacagttttgatgcggaaattgattttatcccttatcgcggcgatttcccccgcggcatctttgccactttggtagtgaaaacaaaagtagcattggaagagatcgtacgcatgtatgaggaatattatgccaaagattcgtttgtccacatcgttgataaaaacatagatctcaaacaggtagtaaataccaataaatgtctgattcacctggaaaaacacggcgataaattactgatcatttcttgcatcgacaatttattgaaaggtgcatccggacaggctgtccacaacatgaacctgatgtttaacctggaggaaacggtaggcctgcgcctcaagccctctgcattctaagaagaaacaatgaacttatttgatgtatatccacttttcgatataaacataataaaaggaaagggttgtcacgtctgggacgagaatggaaccgaatacctggatctttatggaggccatgccgttatctctatcggacatgctcatccccattatgttgacatgattagcaagcaggtggcaaccctgggcttctattcaaactccgtaatcaacaagctgcaacaacaggtagccgaacgtctcggaaaaatatccgggtatgaagattattccctattcctgataaacagtggtgccgaagcaaatgaaaacgcgttgaaactggcttcgttccataacggacgtaccaaagtgatctcttttgggaaagcttttcacggacgcacttcactagcagtcgaggccacagataatcctaaaattatagctccgatcaatgccaacggacacatcacctaccttccgctaaatgacatagaggctgcgaaagccgaattggcaaaagaagatatttgtgctgtcatcattgaaggtatacagggagttggcggtatcaaaataccgactcccgaattcctgcaagagctccgcaaagcctgtacagaacacggaacaatcctgattctggatgaaatacaaagcggttacggacgtagtggcaaattcttcgctcaccaatatgccggaatcaaaccggatattattacagttgccaaaggaatcggaaacggattcccgatggccggagtactgatcagtcctatgtttacacccgtatatggcatgcttggaacaactttcgggggcaatcatctggcttgctcggctgcattggcagtaatggatgtcatcgaacaggagaatttagtagaaaatgcagccaacatcggctcctatctgctggaagaactgaaaaaattcaaggaaatcaaagaagtgcgcggatgcggattaatgatcggaatggaatttgaccaaccggtaaaggaaatccggagccgcctgatccacgaacaaaaagtatttaccggtgccagcggtacgaacgtaatccgattgttgcctcctctctgcctcagcaaagaggaagccgatgaattcctcgcccggctaagaaaagtactcggttaataatcagcatccttataaggaaagtgaaaaagtgaaaatacctgccacgtttgctcgtattttcactttttacttatacctttgtcagaaacagactaaataattatataatatgaaagtagctatcattggtgcaggaaatatggggggctccattgcctgcggactggcaaaaggtaagctgattccggcttccgatataatagtatccaaccccagcattggaaagctggaagcactaaagaaagaatttccttctattgctatcactcgcaataatgttgaagctgctactggtgctgatatcgtgattctagctgtgaaaccttggctgatcagaggtgtactccgagaaatgaaactaagaagcaaacagattctggtctctgttgctgccggtatcagtttcgaacaattggctcatgatgtagtagaacctgaaatgcctatgttccgtattgtccccaacacagctatcagtgaattacagagcatgacactgattgcttcgcgaaatgccggccaagaattagaagcactgatggtcaatctattcagcgagatgggtatggcaatgattttgcctgaagacaaattggaagcggctaccgccctgacttcctgcggtatcgcttacgtgctgaaatatattcaggctgccatgcaagcgggcatcgaaatgggaatccgaccatcggatgccatggatatgattgcccaatctgtaaaaggtgccgccgaactgatactgaacaatgacacccatccaagcgttgagatcgacaaagtgactacacccggcggaattaccattaaaggcatcaacgaactggaacataatggattcacctctgccatcattaaagcaatgaaagcatcaagatagtggccggacactgtaatcacaaaatataaaacaaataatcactaaacactaaaattgatatggacgaccaaattaaacaaatagcagaacgtctgcgcggattacgtgacgtactcgaactgacggccgaagacatcgcccgtgattgcgagatttcagcggaagaatatcgcctcgcagaaacgggagattacgacatttcagtgagtatgctgcaaaaaatcgcacgtaaatacggaatcgctctcgacgctctgatgtttggcgaagagcccaagatgagtagttacttcctgacccgtgcaggaaaaggaaccagtattgagcgcacaaaggcttataaataccagtcactggcagcaggttttatgaaccggaatgccgacccgttcattgtaactgtcgaacccaaacccgacatcgagccgatacactataacagtcatagcggacaggaattcaacctggtacttgaaggccgcatgatgatcagtatagatggaaaagacttgatattaaacgaaggggacagcctgtacttcaattcaaaactacctcatggaatgaaagcactcgacgggaaaacagtacgtttcctggcagtaatcatgtaattatttaaataaacaagatgatagatagatttttatctcaaacttccttcagttcacaggaagactttgtgaaaaacttaaagatacacgttccggacaacttcaacttcggatatgacatagtggatgcctgggctgccgaacaaccagacaaaccggccttattatggactaatgacaaaggtgaacaccaccagttctcttttgcggatatgaaacaatatactgaccggacagcctcttattttcagagcctgggtatcggacatggtgatatggtcatgctgatattgaaacgacgctatgaattctggttcagcatcattgccctgcacaaactaggggcagtcgttattccggctacacacctgctaaccaagaaagacattgtataccgttgcaatgcagccgacataaaaatgattgtggctgccggagaagaagtggtcaccaaacacataatagatgctatgccggactctcctactgtaaagcatttagttagcgtagggcccgaaatacccgaaggatttgatgacttccatcagggcattgagcatgcggcgcctttcgtaaagccggaacatccgaacaccaacgatgacatttcactgatgtacttcaccagcggaacaaccggagagcctaagatggttgcacacgacttcacttatccattggggcatatcgtaaccggtagtttctggcacaatctgaaagaaaacagcctccatctcaccatcgccgacaccggctggggaaaagcagtgtggggaaagctctacggacaatggattgccggagcaaatgtattcgtgtatgatcatgaaaagttcactcctgccgatatattggaaaagatacaaaattaccatgtcacttcactctgtgcccctcccaccattttccgtttcctcatccacgaagacctgacgaaatatgacctttcgtcattggaatattgcaccattgcaggtgaggccttgaatccggctgttttcgacacattcaaaaagttaacaggcatcaaactgatggaaggcttcgggcagaccgagactacactgacagtagccactttcccatggatggaacccaaaccgggaagtatgggggtgcccaatccacaatacaatgttgatctgatcgattacgaaggacggtcggtagaagccggagagcaaggacagatcgtaatccggactgacaaaggaaagccactgggactgttcaaagaatactatcgggacgcctcgcgtacacacgaagcatggcacgacggaatatactacactggcgacgtagcctggaaagatgaagacggttatctatggttcgtgggacgcgccgatgacgtaatcaaaagttccggttaccgtattggtccgttcgaagtggaaagtgcattgatgacacatcccgccgtagtagaatgtgccataaccggcgttcccgacgaaatacgcggacaggtagtgaaagctaccatcgttctggccaaagagtatcgtgaacgcaaaggggaagacttggtaaaagagctccagaatcatgtgaaaaaagtcacagctccttataaatatccacgcgtcatcgaatttgtcgacgaattgcctaagaccattagcggtaaaatccgacgagtggaaattcggaagaatgacgagaaataatcatgtctcaaaaacaacaaaaaacaatcaaatacgaaattgagcaaacgtttgcaacaaaagtgttataatctgaacagaaattgttcttaaatgaacaaacaacctgctatatttgcatccgtaaccattaaacaattaagagcaaatgatagtaagcagaaagatttctcagattgaagtgttcgcgggcagtccatgggaagtagcaagtgtcaaaagcctcctgaaagccgcatctatcgaagtggctatgaaagacaaaggtataggcagcatattgctttccgttccatgtgaatattacacggcagcgatgcgggtaatcggcggccggacaacttcataaatggtttgttagattaggtttgattaggaaagtaaagccggaatgtatcgtgttgcattccggctttttttttgattgacagcacttatattccattagtaccacttttgttctcacaaaagaatgacgcttcgtaccgttaaagacctactatcgtataagtgcttccttttcgggtaataaatgaacagacattgttttgttctttcacggagacgggttttccattctcggtgacccgaagttttcttcccctccaaggattgctcagtctgcatatacctcctttctcactaaagattttcagaccgcccactgacgttccgtcataatcggcagaaacgagaaaggctccttttgctctaagcctcgtaaacgcagccggtgtttgtgtccaacatggaaaaagatagatgacaccctccaccgtttggagcatcattgagtttaccgtctctataacagcagttttctcagtacaatgatgcccgtcgataatcagaaaattagttccggccgtttttatcaaagtcttcatattttccaataagagatcgggagcaaatctgatacgggcccccatcacaaaagcactcaatcccaattcgttcatcgtattggtaaatcccttttgagaaacctcataataatacaatgtgtttcgggctatctgcaaggctgtagagtccgaatgtaaattcagtatttcacagggataggcagcatgcaactgtatggcatggcttggcaaatcccatccggcctcgttcttcgcatagacaggcaagccttgattaggtgttttggtcggcattatcaccttatactccggaagatgagacaaaatgtcgttccatttcttccgtcgtttttgatctactcccaacaacttactgtacctcactaacaaaccgaacgtctgtttcacaaaagctaaatcggaaggagggttcagatcccacgaatcctcgtgtcctcctgtcgttatggtataacgatatgatttgccgtatgtctccttctgcatatagtcttcataaaaatcgccacaaagacgaatataaggatacgcccgataccgtaaaaagttcaaatcaccggtgtattcataataccaactgaacagaggaacattgaacggagcattcatggtttgttgccaataataattataaaataccccgatacccaaggcccccacaggaaatagtattcccctgcaagactttccttcccatgatggatgcataattcccatttcttcctttgcccgccgtcttccttcgggtatcagcaactctatcgttttatagaaaggcaaggctatttccggacgattggatgaaaaagcactatagaatcccgcctgactgttatagttcaggtggatatcaccatggtacatcattttgtcatccatattccagactccatacatgccaccggataccggtgaatgttcgttataggcagaagccagtaaataaatggacgacaagtagtgacgattcaacaactcgtcattcgtttccacatacgaacgggtccacatatctttccaccatgcttttttcgccattttcaattgagtcacatctgctaaagtcaacagtttgttataggccgttggcagttgcggatcatttccttttccacctcccgaaacatataccacaacgagaagcgtatcggaagctgtcagctgaaaatttgatcggaccatcgactcagacaggcattccggtttagacataactcccactattttagtggatataccggcacaggaaatccatctcaccgcatcagtcttcgtttgccgagtgacttgagctatttgtccattcacctgtgctgtagttgtataagaagcagattgattatcagcataagtatctaccgaaataggaaccggagtttttgaagaggtggtcaactcagttattatcatattttcattcactcccatccaactgaccattttaacctgctgagcagtagcagtagtcattcgtaactcactatttaactggtccatctgataactaaatccggaagggtccgcccggttgactgtgacaaagccggaatataccggagagtttacagtgatattcaccccgccaatgggcaaagcagccggaccactgcctgcccagtctgtccagccatccgtaacaaaatccactttcgatatctttaatgtctgactattgtccgatgtaaatgccactacccctacatctccattccccatataggggcctaaaggagcatgattgctctgaatactgctataactgaaaggtttatgccatgttgccgtaagcagtgcctttttttgttcaaaaaaaagcgaatcttttgacgagtcagcatacaataagttattttgcgaatgtatcgataagctatagcttagaaacagaaagagaaactttaacttcatatttaatgcgtgtgtgtttaacagtcgattatatttctcagtaatacaaatcactgataattagaacatatataaaagtatcaatatcctttttacaaaaagacaaagacttattacaaaagtagtacttttttagggataaaaaagaagaagaatctcaagaaagcccatgcaatagcctaaaagcataaagatccttagaagcattttcaaaagagaatacaataacccgactaaagtaattcacattagaagtgtgatacgtaatcccagtctcaatttatggatcggaattaaaaagaaaatgatcttaaccaatataaccttatcccaactaccatcccgatagagcataacgattcttttcttctttacaaatcataaaccaaacaactgtatttgtccctactcttaagacattgtattcaagtctattataatgaatctcaatatctttatctcagccctggtacgcgagctcatggtctccggtatgcggacctatgggcacagatacgtgggctcatgagcacaggtagcagggacaggataaagaacagagtattttcgactaaacaataaaagaaaacaagatgctttaaacaacgtatttagttaattaacatgcttcttaatattgtaaatcagcatattatcgattataaggttctctaatattcaggtggaagatggaagatacgggtggaagataaacggactaaaaacgcgattttccacccattcatcacattgactattaagggagtaagtataaaaaggaaaagatggaagatcgaaatgtatgtttgtaagagaagctaatatacgcacgtagaacatgaactatttctatatattgcctgtaataaatttaaaaagcctcgtaagcatttggcttacaaggcttctgactagacgctcgtactcgaagcgggacttgaacccgcacagccgcaatggccaaaggattttaagtccttcgtgtctaccattccaccattcgagcatcctttcaaagagagcggaaaacgagactcgaactcgcgaccctaaccttggcaaggttatgctctaccaactgagctatttccgcattttttcaacgggtgcaaagataagtagtttctacctttctgccaaactttttccgatgaaaatatttcaataaaggtggaaaaggatattttataatcaaagaccatgcaaaagagataactctatgcatggtctggatggatcatttacgccccaacaaggtcttctccgcctgttccataccttgaaagttgaaaccctcgatggtacgttgcatcaatgcggaaatctcatcattacacaaattgccaatacttccttcatgggtgtgatgtacttgcttgtcatgcgaaaagtgaccggcttcaatatccagccctactttcttataagcatcccggaatggcataccttcacgtgccagacgattcacctcttctacactaaaaataaaaaggtatttatcatcatcgaggatatgctcgttcaccttaatttcattcatgatataggtagtcatctgcagacaatctttcaactcctgaaaagccggtaaaaagacttcctttataatctgtaaatcacggaaatatccggaaggcagattattggcaatcatcataatctgctgcggcagcgattgtaacttattacatttggcacgtgtcagttcgaacacatccggattctttttatgtggcataatgcttgatccggttgtacattcatccggcaacttcacgaaaccaaaattctggctattgaacatacaagcatcaaaagccaatttagaaatcgttcctgcaagcgtagccaaggcaaaagcgacattgcgttccatctttccacgtcccatctgggcatacactacattatagtttaaagaatcgaatcccagcaattccgtagtcatcgtgcggttcagcgggaatgaagagccatatccggcagcggagcccaaaggattcttattgcacatcttaaaagcagcctgcaggaaaagcatatcatctaccaaactctcagcatacgctccaaaccaaagcccgaacgaagaaggcatcgcaatttgcaaatgagtataacccggcatcagaacattcttgtaacgctcactttgacgaatcagaacatgaaacaattgctctacagcctctgctacttctctgatctgagtacgagtgaaaagtttcagatcaagcaacacctgatcattacgagaacgcccgctatgaatcttcttaccgacatcacccaaacgacgcgtaagcatcagttctacctgcgagtgcacgtcttcaactccttcttctattacaaactcgcctctctccgcagaagcatatatatctttcagttcggtcagcaactgagctaattcttcctttgtgagcaatccgatactttcgagcatcgtgatatgagccatcgaaccaagtacatcatgctttgcaagataaagatccatctcacggtcacgtccaacggtaaatcgctctatatccttatttacctcaactgatttttcccaaagtttctgtgccatagctattaatattgtatcatagataacatatcagccatcttttccaatccttcattcaaaggtttctgtaccatcgctttcataaacggattgatttccagcccaatagttacctttagtttacattcttcttcggatacagccacaagctgaatccacatattaaaaggtagaggcgaattggtagtctcaaacttaatacatttactgggttcccgttcaataattctcagggtcagttgtcctacaggatccacattgaaactaagtgtatcagtatcgaaactcatatttttcactttgtcttcgggcaaacgatctttaatagcttccaggttactaagatcggcaagtttctcgtacacacgttcctggctataaggtatcaccttgacactactttcaaatttagtcatcttatttatcttacttataaagaaaaaagaagaacaatccgaacagattctgtccgaatggctcttctttctatattttaatcatcaaaaaaatcagttttattttccggtttcccaatgagccggatccttgcgccattcgtttaacgttgcaatgtcttcttcttcaatataaccggtacgaagtgcaacatctaacacagcttcataattagtcaatgttaccaaaggcactttagcatctttaaaggcctgttcggcaacaggaaatccgtaagtataagcagctaccataccaataacttcgcaaccatcccgacgaatagcttctacagcttttaaactgcttccaccggtagagattaaatcttccacaacaacgactttcattcccggacgaagttcgccttcgataagattttccagaccatggtctttcggggtagagcgaacatacacaaacggaagattcaatgcatcagccactaaagccccttgagggatagcccccgtcgcaactccggcaatagcatctacctgtccgaaacgttccagaaccaaacgtgtaatctcgaacttaacaaaactacgaagagaaggataagaaagggttttacgattgtcgcagtaaaacggtgatttccatccggaagcccatgtaaacggatttgccggttgaagcttaatagctttaatcttcaacaacttctcggcgaataatctctctaaatttttcataactaaactaactatgataattacaggatgcaaaaatacggaaatggaacgagactaaaaagaagaatccgtattatttttttgttatttgtcacttactcttcttctacctgcacacagcgacggatatcgtccatttcaaatcctctactcatggcaaaacgaatcaatttcccattcagctcgaattcatctttggcatgtatacttttacgttttgctgctatcagatctcctaaaatcgcaagatattcttcccggtcaatgtcattcagatacctgtaagttacctcacgaggaatttttttcatatacagagcttgtgtaatcttcattttaccccatttggcaaaacggaacttatcgttgacaaacgctctgcaataacgttcttcatcaataaacttctcgacaacaagacgatcgatgattcggttaatcacttcataaggtaagccccatttctggagtttttcattcacttcggctttacaatgttcggctgcggaacaataggcagccatgcgatttaacgcttcttcttctgttattgtattcatcgtttggcggttacaattcgatcattacccgatatatcttttatcaaacggagttcttcgtacccttgttcgtgaagcatttggagaacctcttcaccataagcccgattgatctcaaaatagagcctgccgtgcaggcgtaacatttttcttcctaaagatgcgatacgccgataaaagcgcaacggatcattgtccggcacaaaaagggccagtctgggctcccaatctaacacattgggttccatttcgtttttttcgctctctgtaacataaggaggattactgacaatcatatcatattgatcatcaccaacaggttctgcagacagaacatccattttctcaaaatgcactccggccttcaattcccgattattctccccggcaatggcaagagcctcttccgatacgtcccatgcggtgaccacagcctgcggaatatgtttagccagactgatggcaatacacccgctaccggttcctatatccagcaaacgggtaccggttgcagcttctttcactatcagatcaaccagctcctcagtttcaggacgaggaatcaacacacccggagctacccgaaacatagacccataaaaacaggtttcgccctgaatatattggatcggctcgtttttcttcaatcgttcgacaatgctttctaaatcacactgctcgtttacagataatgttatatctttgcccagataataatcaatagcatcctgacccagcagatcacaacaaatgatttttgtaagactcctgagttctcccggtggataaatatcgtgtaaagcctggcggatataagtggtgacgtggttcattctccttattttggggtgcaaaagtacaaataatatagctatcagcctaaaagatgaaagaagaaaaatacatgaggcgttgcatccaactggcaaaaaacggtctttgcaacgtatctcccaatccaatggtaggagctgtcatcgtatgtgagggacaaataatcggtgaaggctatcacatccgttgcggagaagcacatgccgaagtcaatgcgatccgctctgtaaaggatccgtctttactgaaacacagtactatatatgtaagtctcgagccttgctcccaccatggaaaaactcccccatgcgctgatttaatcatagagaaacaaattcccaggattgtaatcggatgccaagacccattttccaaagtagcaggcaaaggaatccaaaagttacgggatgccggatgcgaagtcattgtcggagttctggaaacggaatgtcgcgaacttatacggaaatttatcactttccatacccttcaccgcccttacatcgttttgaaatgggcagaatcagccgatggtttcatcgacctggaacgtacagaaggacaacctgtcatattatcgactcctctcacttccatgctggtacacaaaaaaagagcagagtcggacgctatcatggtcggtacgcgaaccgcactactggacaatccggcactcacggtacgcaactggtacggacacaatccggtgcgaatagtgatggaccgtaatcattcactccctcaaacctcccatttgtcggataacagcgtatctacgctcgtttttacggaacatccccgttccggaaaagaaaacctgaaatacatcacactcaattaccagacagatattctgccacaaatattgtctgccctctatcaacgcaacctacagtcgctgatgatagaaggaggaaggattcttctggagtcatttatccgttccggaatatgggatgaagtcatcatagaaaagagcgataaactgctttattccggtgttaaagcacctgaaataagcaataaaattagttattcggaagaaaaacatttctgtacgaccttcaggcattacttgaagagaaatacctaaattcgctgcattcaaggagttttatatcgacaaaatcgagcagattatctataattttatataaaacttcccttcaatgttcaatatagagaaaaatgttcctatttttgcaacttgtaaataaacacaatctttcaaatgagaataaagtttttatcagtaattgtaagtttcttccttgtatcgtttgccgttacttcgtgccttgacacagaagaaattgaatatagcccggatgctaccatacacgcatttgcacttgacaccatacatggggtaaactataaatttacaattgaccaacttggtcccgatggagtaggacttatttataaccaggattcactacctgtaggctccgatacaattattgaccgtattcttatcaagacactgaccacaacttccggaataatcactgccaaaaacgcagagggtcaggatactctgttcaactattccgattctatcgacttcagaggcactatgcaaaaaccgatgagaataaaagtgtgggctgccgacatgcaatataccaaagagtatactatttcggtacgtgtacatcaacaggacccggattccatgaactggaccaaaatgacagataacttcgcaaactatagcggatatcagaaatcagttaccctgaatgaagatctcttgatctatacatcgaatacgactgcataccaatcatccggagatgttatcagtaaaggaagaagctggacaccagtatccataacagggcttccggacaacatcaagctttcctccattatttctttcggcggaaaactatatgccacaaacggtgaaagtgcatacgtttcatctgatggagcattatggaatgttgcaaccgatttgaataaaaacggtaaagtagagatgctgatcgcccctttcccgaaaaatgaaggtaatctgttgggtatctccggaattgccggtattattaataatggtgatcaatctacatttgccataactaatcctgaagcaacagcgtggaacattggttccgaaacagtaggtgcggacttccccttggagaatttgtctgcaacttcttacctgacagcaacaggaatccagacaatagccgtaatgggtaacaatcgtaatgcaaacgatacgacttccatcgcatggacctcacaagacggtttgctttggatacctttaaaaacttcctcgagtaccgcctattgtccgaaactggacaatccgtctttcttctattatgataatgcttttctggcattcggaggaaattttgaaacgatctatacatcggaagcaggtattgcctggtataaagccaacaagaaaatcttcctgccggccgaattcaaagacagaggaaacaattactcaactgtagtagacaaaaataactttatctgggtaatatggagtaacggtggtgccaacgaagtatggcgcggacgactcaataaatttggttttgaaagacagaacaacaactaacgaaatgtcctataaagaacaaatagatttaaaccggatacctaagcatgtagcaattatcatggatggtaacggacggtgggccaaactacgcggacacgaacggagttttggacatcaggccggagccgagactgtacatatcattactgaagaggcggccaggttaggaatcaaattccttactttatataccttttctacagaaaactggaatcggccttcggatgaagtcgctgcattgatgagcctccttttcgactctatcgaagaggaaacatttatgaaaaacaatatcagtttccgtatcatcggagacatcaacaaactacctgagaatgtacgggagcgcctgaatgcttgtgtagaacatacttccaagaatacaggtatgtgcctgatacttgccctcagttattctgccagatgggaaataaccgaagctacacggcagattgccacattggtacaaaatggagaaatgaaccctgaagaaattacttcagaaagcattcggacacatctgacaaccaactttatgcccgacccggatttgctgatccggacaggcggagaggttcgtttaagcaattatctgctttggcaatgtgcttattcggagctctatttctgtgaaactttctggcccgactttaaggaagaagaattgtgcaaggctatctgtgactaccagaaacgcgaacgcagattcggaaaaaccagcgaacaaatcagttaactcaaaacttaattataacataaatgcattatcgtatttccttcatattcgtaacgtttatcagcctgttttgctttgcattgccgggcgtagcacaagatgctaacactgacgaatcaaaacccgttatcatgtattccgggacaccgaaaaaatatgaaatagccgacatcaaagtcgaaggtgtcaagaactacgaagattatgttcttatcggactgtccggactctctgtaggacaaaccattactgtaccgggagatgaaatcacaggtgcaatcaaacgctactggcgtcatggtctgttctctaatgtatcgattaccgctgaaaaaatagaaggtaataaaatatggttaaagatcactttggcccaacgcccacgtatttccgatatacgctatcacggtgtgaaaaagtcggaacgtgaagacctgcaaaccaaactgggcatgataaagggtagtcagatcactccgaacctggtagaccgtgcgaaagttttaagtaaacgctatttcgacgataagggatttaagaatgctgaaatcactatcacccaaagagatgatcctgccaatgaaaatcaggtattagtcgatatcgacatcgataagaaagaaaaggtaaaagtacatgccatcacttttgccggcaaccacgccatcaagacatctaagctgaaacgcgtgatgaagaagacaaacgaaaaaggaaaactgctgaacttattccgcaccaagaagtttgtcaacgagaaatatgaagaggacaaacagttgattattgataagtataacgaattgggttaccgcgatgcacgcattgtgaaagacagtgtatccaaatttgacgataagaccgtagacgtattcatcgaactggaagaaggcgataaatattacctccgcaacgttacatgggtaggtaatacgctttacccttcagagcaattgaactacatgctccgcatgaagaaaggggatgtatataaccagaaattgttaaatgaacgcttgtcgaccgacgaagatgctatcggtaacctctattataataatggttatctcttctatacactggatccggtggaagtaaacatagataatgactccattgacttggaaatgagaatttttgaaggccggcaagccagtatcaacaagatcaagatcaatggtaacgaccgtttgtacgaaaacgttgtccgccgtgaactccgtacccgtccgggtgagttgttcagccgcgaggacctgatgcgttctatgcgtgaaatccagcaaatgggacacttcgacccggaaaacatcaagccggatatccagccggaccctgtaaacggaacggtagatatcgcttacgatcttgtatcgaaagcaaatgaccaggtagagttctctgccggttggggacaaacaggtgttatcggtaagttaagtctgaagtttacgaacttctctttggcgaacctgttgcatccgggagaaaattatcgcggtatcctgcctcaaggcgacggacagacactgaccatcagtggacaaaccaatgcacaatactatcaacagtatagcatttcgttctttgatccctggttcggaggtaaacgcccgaattcattctctctgtcggcattcttctccgtacagaccgatatcagtagccgttactacaattcaagctactataacaactactacaacagttattacagcggcttgggtggctacggtatgtacaattatggtaactataacaattacgagaactattatgacccggataagtcaatcaaaatgtggggtctgtcagcaggatggggtaaacgtctgaactggccggatgactacttccagctttcagccgaactctcttaccagagatatatcttgaaagactggcaatacttcccggtgaccaacggtaaatgtaatgacctgagtatcggcttgacattggcccgcgcctcttacgataacccgatctatccccgtagtggttctgacttctcgctgtccgtacagttcacaccaccttactcattgttcgatggagtagactacagcaagtacaacgagtacaaccagaacgatatgaacaagatgcataaatgggtagaataccacaagtggaaattcaaagcaaaaacatacatcccattgctgaacccgactgtagtgaaaaagactccggtattaatgacacgtgttgaattcggtatattgggtcactacaacaaatataagaaatcaccgttcggtacattcgatgtcggtggtgacggtatgaccggatattcaagctatgcaaccgagagtgtcgccctccgtggttatgaaaacagttctttaactccgtaccgcggacaagaaggttatgcttatacccgtatcggatttgaattaagatatccgctaatgctggaaacaagtaccaatatttatgcgttaacattcctggaagccggtaatgcttggcacgatgtgaaaaacttcaatccgttcgacctgaaacgttcggcaggtgtgggtgtccgcatcttccttccgatgattggtatgatgggtatcgattgggcatacggtttcgacaaagtacttggcgacaagagcgcaggtggaagcagattccatttcgtattgggccaggaattctaattgtttcactaaaaactaagcgttatgaaaaagtctgttctatttatcatcttgctgtttgccgtaggtatgacagcccaagcacaaaagtttgccctgatcgatatggagtatatcctgaagaacattccggcttacgaacgtgccaacgaacaattgagccaggcaaccaaacagtggcagggtgaagtcgaagtattagccaaagaggcacaaacgatgtttaaggactatcaagctgcatctgctaaactgacggccgcacaaaagacccagaaagaagatgccatcgtagaaaaagaaaaagctgcttcagagctcaaacgtaaatactttggtcctgaaggtgaactttttaagaaaagagaagagttgatgaagcctattcaagacgaaatatacaatgcggtaaaagctgtagcagaggaaaacggttatgcagtagtggtagacagagcatctgcttcaagcattatttttgccactccccgcattgatgtaagcaatgaagtgctggcgaaattaggatattcaaattaatttcatacatttgcacccgataacttaaaagtaatcattcaaataaataataaaactatgcttaaaaaaattgcacttttaatgatgttgatactcccgatgggcgtatttgcacaaaatcttaaattcggtcacatcaatgcgatggaaattgtttcggccatgccggaatataccaaagcacaatctgagttacaagcattgaacaaacaactcggacaagacttacagagatctcaggaagaattcagcaagaaataccaggaattcatgcagcaaaaagactctcttcctgctgtcattgcagaaagaagacaaaaagagttggaagacatgatgcagagacaagaacaattccaggctaaggctcagcaggatatggaaaaagccaacaatgacctgatggctccggtatataagaagctggatgacgctatcaaagcagtaggtgcagcagaaggtgttatctacattttcgatatggcacgtactccgataccttacgtaaacgaagctcaaagcattaacctgactccgaaagtaaaaacccaattgggcatcaaataagagttaagagcaataagttacgagctacaagctacaagtaccatgcaaaatgcgttatgacttgttacttgtagctcgtaactttttaaccatatccccattatgaaacaatcccttccataccaacctggtcctatcggtgtattcgactccggatacggtgggctgaccatcctgagcaaaatcagggaagcgctgccggaatacgattacatctatctgggcgacaatgcacggactccttatgggacccgttcttttgaaatcgtatacgagttcaccttacaggctgtcaacaaattgtttgagatgggctgtcatctggtgatacttgcttgcaacacagcctcggccaaggcactgagaaccatacaaatgaacgatcttccgaatatagatccggaccggagggtgctaggagtcattcgcccaactgcagagtgtatcggcagtatgacccaaacgcgccatgtaggaatattggctacagccggtaccatcaaatcagaatcatatccgcttgaagtgcataagttgtttgaggatatcaaagtaagcggagaagcttgtcccatgtgggttccactggttgaaaacaatgaagccaacggcgaaggagccgacttctttattcgtaaatacatcgacaacctacttgccaaagaccggcagatagacacccttgttttgggatgtacccattacccgatactattgcccaagatacaaaaattcattccccaaggagtgaaagtggtggcacagggagaatatgtggctaccagtctgaaagattaccttcaccgtcatcccgaaatggacatgaagtgcactcgggaaggtaaatgccgcttttacaccacagaggccgaagacaaatttattgaatcagcctccatgttcctcaacgagaacattacagtgcaacgaataactttagaataatctatcggtaaaacaactttatctaagttctttttgttatatttgtaagagataaacacattatatccctaccattatgaaagaagataaagacacccgcgtagtagaagtcttcaccggttcgccttgggaagcagagttcatcaaaggattgctagaaagcaatggaatagaatctatcctgaaagacggaggtgggctcgcagctttggcaccttactacatcggacaggaaatagctgtcctcgtcaatgaagacgattatgaaaatgcaatggaaatagtgagaaaccgcgaaaaggcaaacgaataaattcttccccgatcccctctctgccatacagacattctccttcaagatatccgtatgggagaggtaacatatcgacaaaaatccatatatttgtgctttcaaatcgtcagcataatgaaaaaggagtttacacgaatagccataaaagtgggaagtaacgtactgacccgacaggacggaacactggatgtcacccggatgtctgcgctaaccgatcagatagccgccttgcataaagccggagtagaggtgattcttatctcttcgggagctgttgcctcgggacgaagcgaaatacgtaccctcaggaaactcgacagcgtagatcagcgtcaattattctcggcagtgggtcaagccaaactcattaaccgatattacgagctgttccgcgatcatggcattgctgtaggacaggtactcaccaccaaagagaattttggtacacgccgtcattacctcaaccagaaaaactgcatgacggtgatgcttgagaacggcgtcattcctatcgtcaacgagaacgacaccatctctgtcaccgaactgatgttcacagacaatgacgaactgtcgggcctcatcgcctcaatgatgaatgcacaggcccttatcatcctgagtaacatcgacggcatttataacggttccccttccgatccggactcattagtgatccgggagattggacagggaaaagacctgagtaactacattcagaccagcaaatcgagtttcgggagaggaggcatgctgaccaaaaccaacattgcccgcaaagtggcagatgaaggtattacagtaattattgccaatggcaaacgcgacaacatcctcatcaacctcatagagcatcccgaagagacggtttgcactcgttttatccccgcatcccaacccgtatcgagtatcaagaaatggatagctcacagcgaaggtttcgctaagggagagatacatatcaacgaacaggctaccgaagtgttgaactccgacaaggcagtcagcattcttcccgtcggaatcacccgcattgaaggagaatttgagaaagacgacatcgtgcgcatcatcgattaccaaggtactccggtaggtgtaggcaaagtcaactgtgactccatgcaggcacgggactccatcggaaaacatggaaaaaaagcagtagtccattatgactacctttacattgaataaacgaactgcattatgaatctgaatgatacttttgctgccgtacaggcagccggccgccatctggcactattacccgacgatcggatcaaccaaatactgaatgccgtggcagaagctgctttggaacagacttcctacatcctctctgagaaccggaaagatctggaacggatgtcacccgacaatccgaaatacgaccgactgaggttgaccgaagaacgacttcggggaatcgcttccgatatacgcaacgtggccactctcccctctcctctgggcaggatattgaaagagagcattcgtcccaatggcatgagactcactaagataagtgttcctttcggggtcatcggcatcatttacgaagctcgtcccaatgtcagcttcgacgttttttcgctttgcctgaaaagcggtaacgcctgtatcctgaaagggggaagcgatgctgactattcgaatcgtgccatcgtagaagtgatacaccaagtactccgacagtttaacatagacactcacatggtcgagttgctaccggccgaccgtgaagcaacccgggaactgctgcacgctgccggatacgtagatctgatcattcctcgcggcagtagcgccctgattaactttgtacggcaaaatgctactataccggtaatagaaaccggtgcaggcatctgccatacctactttgacgaatacggagatacggccaagggagctgccatcatccataatgccaagacacgccgcgtgagtgtttgcaatgcactcgattgcgtgattgttcacgaaagcagattgtccgatctgcctctcctttgtgaaaagctcaaagccgacaaggtgattatctatgcagatccgtcagcctatcaggcactcgagggacactatcctgccgggttgctgaaacctgccacccccgagagcttcggaactgaatttctggactacaaaatggcaatcaaaactgtgaatagttttgagaacgcactcggacatatccaggaatacagctcacgacatagcgaaagtatcgtcaccgaaaacccggaacgcgccgcgcttttcacccgcatggtagatgcagcctgtgtatataccaatgtatctaccgctttcaccgacggagcacaattcgggctgggagcagaaatcggcatcagcacacaaaagttgcatgcccgcggaccgatgggattggaagagatcacttcctacaaatggatcatagagggtgacggacagacacgtcagtgatactttcggcgaaagtcaggaaaataatcggttcaaagcttgacttaacctccggattgtactatctttgtagacacaatcataccatagattcaatttaaaatgcgataatggggaaaggctcttgcttctcccctttctttttttacagccggcacccctcgtgaacagagccgggattacgcttcaacagagccggggtttcttgtcggaagagcctgcgttccgacccaaagacggttgatccggcagttggagacggttgatccctctacccttccgactgcatccgggcctacaccaccggacaagattcgaaaagtataaatagtataatccggagagcgcttatgttaaggaagcgtaaacttactcttgacaaaaacggaggcaattatgcaaattattagtaatacgagaacaaaacgccttgctattccttataaaaaacattatatttgtaaatgaactccaaacctatcccattatgaagcaaacagcctatatatacctgctcaccctttcttgccttctctgcgcatgcaatagagaaaacagaacaaatttgccacagccccaagtcaccggtgtagcggattcactggaaacggtgcctccggaagagaagcccaaagccatctccgcagaacagatagagatcaagaaagatttgctctatgataaatatactcttgaagatacgtatccgtacaaagatacgacccgcagttttcaatgggataagatcaaagaacgcctggcactgctcgaaaacattcagcagacaccctcgcaatggggcatcttgcagaactataagaaccggaacggcgaggctccattggtacgccattacaaacggaatgcctataaacgcattgccgacacgctgggcatagagcgctaccagtccgtcccgctctatttgctcaccgatacgcttgtgcccgaacgttatggagaagacggttcgctggtccgcttcctggccgacggagagaatttcgtcaaggtatcccctatctatattggcgaagagtggtatgtacccaagaggtacgtcaaagtgctcccggatacgacacacttcatcaaaacaatcatgatagaccgaagagaccagaacataatgactttggaacaaaccggtgaagcccaatggaccgtacggagtatgaaccccgccactaccggaaggcatcgccctccgtatgcacaagagacaccattagggatattcgtcctacaggaaaaaaagacacgcatgatattcctcaaagacggttccaccgccaccggaggttttgcgccttatgccagccgattctcagacggaggatacattcacggagtcccggtaaacgagccccgtaaagcacttatagagtacagcccgtctctgggcaccacgccccgctcgcacatgtgtgtacggaatgcaacatcacattccaagtttattttcgactgggctcctgtaaatgagacaattatttttgttttggaatagaaatccgtatctttgcgccgttattttctcagtttcctatgcaaaaagtatttctattcctcctattgtttctgctcccactggcagaagtacccaaccatgcaccggccagtgagcctgtttctgtagcctctactccggagacagacgaaatagatcaactgttcgatgatatgcagctggacgggattgtcagctatacagctttccgacaggcagtgaccggctatcagaaaatcgagcagaaaagcaagtccatcatgaccctgatcgatttttcaaaaccatctaccgagaagcgcctttacgtgctcgatatgaaaaacaaaaagttgctatatacttccgtcgtatcacacggcaaaaatagcggaggaaactatgcaacctcattctccaataaaaacggttcgtacaaaagttcgcttggcttttacctgaccgaaaacacttatcagggacgcaacggttactccctggtgctgaacgggctggaaaaaggaattaacgaccaagccaaacaacgcgccatcgtgatgcatggtgccgcatatgccaatcccaacatcaccgcttctgccggacgcttgggacggagcctcggatgccccgccttgccgcaagcactcgccaaaccgattatcgacacaatcaaaaaaggtagtgtgctctttatctacgccaacaacaaggactatctggccaacagcaccttcctgtctccacggcaaacggagtatctttcatgggcgcagcctgccaattgaaaattttatcatacctttgcggaaaaggtatattcattctaacaaagacaattatgaagaaatttacttgcgtacaagacatcggcgacctgaaatcagcccttgccgaatcattcgagatcaagaaagaccggttcaaatatgtggaactgggacgtaataaaactctgttgatgatcttctttaactccagcctccgcacccgtctcagcacccagaaagctgctctcaacctgggtatgaacgtaattgtactggacatcaatcaaggggcctggaaactggaaaccgaacgcggcgtcatcatggacggtgacaaaccggaacatctgctggaagccattccggtgatgggatgttattgtgacatcatcggtgtacgttcatttgcccgcttcgaaaaccgtgagtatgactataatgaagtgatcatcaatcagttcatacaacattccggacgcccggtgttctctatggaagcagctacccgtcatccgttgcagagctttgccgacctgatcaccatcgaagaatacaaaaagacagcccgccctaaagtagtaatgacctgggctccccatccgcggccattgccacaggcagtgcccaactcgtttgccgaatggatgaatgccacagactatgagtttgtcatcacccaccccgaaggttacgaactcgatccgaagtttgtaggaaacgcacgggtagaatatgatcagatgaaagctttcgaaggagccgactttatatatgccaagaactgggcagcttatacaggcgacaactacggacagattctgagtacagaccgtaattggaccgtaggcgaccgtcagatggccgtcaccaataatgcctacttcatgcactgcctccctgtaagacggaatatgattgtgacggatgatgttatcgagagtccgcaatccattgtcatcccggaagccgcaaaccgtgaaatctcggcgacagtggtactgaaaagactgctggaaaatctaccataacgatttttgaacgatccataataaatgatcaacgacgaacgataataatacatagcctgttcatcgttgatcattcattgttcaataatcgttcattcttatttctccactttctcgcctgcttcctgccaggcattgaatcctttatccaattcgtacactttatatcctttctcactgagaatggcagccgccttcttgcttcgcttgccactgcggcaatataaagccaccggtttatctttttgaagtgtggagtctgccataaccgcaaacgaatcatcgagcacattgatattgatcgtccccggaatgtggccttccgaatattcagccatggtacggacatccagccgttgcacacttgcatcctcaatcagcgaagcaaactccttcaccggcactgtcttgaaatcccctttcgactgctggcaagaaaagagagaagacaaaagaaaacatattcccataagcattgaattcattttcgacatataattagtaattaatggttaagtgactgggcacgtattcaaactgataggtctgcacctccccgtcatacgtatgaaaactaaaataaatgatcgctgattccccgatatcggacgtgtactgcctcaacggtaccgagacataagcccgcttggcataagcctccacatctcccccatcgtcatgatagagcattaaatggactttcagctttccggttacagcattccgctccacagactcctgaatgaaatgaaacgtatgccgcgcattctgtgcccggatagagagagtcatattcagataatcacgccccatccagatactgagcatatcaaccggatcgaatttcaagccattccggaactctccggcaggcagcggaaccggagaaaccgtattagctaatgcataaatgcgtatctctttccgccctcctaccgacgaaagcacttcgtaattgctcaccacacggctagaggaattgggtaacagctccgatccagtgcggtcctccgccacgaccagacgttctcccttatccgtaaccaacgtttgcaaccgaccgtctgctcccgactctgcagtcagaaactccaacctcacggaagggtaaggagcaccatcatcttcgttacaggaaaacaggaagacggaaaacaatacagacaggacgatatgtaacgtccatattctcattgacgagcggccaaatagttggtcaacggattggcatacatcaacaacagcttttcacgcaagaaagaaatatctttgttgggaatctctatcttttcaagctgcttttccacataagcctcgaaacgttccttctcggccaacgtatagtgggattcaaaatcattcttaccagtcaacagatcgtgagctacataattgcccggataaagacggtaattgctatgaatgcgctgatcgatccacgtagagatacgtgcaaacaactccggtttcggtaaagagcgatctactgtcgaaagcaggtcattgaggcaagctcccgtctggaaatgcacccggcctttatagccaaacaaaccggtctgcatatttttcaggtcatctgccatcgttttcttatagccctctatatcacgcttcagctggaactcctgtgctttcaggtaatcgcagggatcatattcgtaggaaatagcgagaggagcaatattcatctccatcagacggctgaccacatccccttcgccccccattgccagcatcttgagtacactgtcctgagtacggtcgttagagtctttggcacgtccttcacgttgtgcaatccaaatggactgattcttttctccgattgtatagtgcatataacgggacatgcgggcagacgactcaagcatttgcctcatggtcagtgcacgctgcacgataaatgatttattgacccggacaaacttcttgatccacggataaatcagcagattatcgccaatggcaatctccaccgtatccatcccctggtcgactaacaatacagataagaaaccggaatcaagaatgatgtcacggtgattcgagatgtaggtgtatgctttgctcttgtccggaatagccgtatgatccaatgaaataccatccgtacagtcgcctgcaagtttccatagcaaaccgtagcaaaaggttttctgaaattccagtttcgttctacaggcacgcatcttttgtgccagcatctcaaagggtacatccggtatcaccccggcaaccaccttctgaaaagccggatcggcaatcagttcttcgaaaaccccggagagttcttcgtcgttgtaaggacggatttcatcaaactctgttgtattcatagcttttattcttttataaactacaagtgacgagcaacgagttacaggtaatcaacgataagctacaaagactacaccgctctatcccgtacggaatcggtgcggcttgccgactgtagctcgtggcccgcagcttacagctaaaatttattttctataatatcagtcatcacgtcttttatatccagtccggcggcacgcacctgctggggaataaaactggtagcggtcatacccggtgtggtattcacctccagaagattgatcttctcaccttccgtaatgatatagtccactcgaataatgccggaacatcccaatatatcgtaaatagccgaggttaaagtctggacacgccgggtcagttcttccgatatacgtgccggagtgatctcgtccacctgtccgttgtactttgcatcgtaatcgaagaattcattatgtgtcacgacctcggtcaacggaaagactaccgatttttctttcgtcttataacaaccgcaagtcaattctgttccgcccataaaggcttctatcatcacttcctcagcttcactgaaagccttggcaatggcaggttgaatctgttcgcgcgtcttcaccttagtcacaccaaagctggatcctcccagattgggtttgataaagcaaggcaggccaattttttccaccacatcttcatcggagacagcctgtccctgacgtagcaacaacgattcggagatacgcacaccaaatgctttgagatactggttgcagacaaatttatcgtaagtgatggcagcggccagtacgccacaacatgaatacggaatacgcatcatgtcgaaatagccctgcaaacgtccatcctctcccggtgttccgtgaatggtgatataagcaaagtcgaacacgaccttctccgccccattcataaaactaaagtcgtttctgtccacaggtgttttacttccgtccggcaattgcacttcccaacgccgaccttccatttctacgatgtacaaattatacttctccttgtcgataaaggagtaaatgccctgtgcactacgcagggaaactacgatttcggaggtatcgcctcctgccacaatggcaatgttgcgtttcattctaaatctctgttactaatataacctctccacttctctatcaaccgggtcatgtcgtccggcaactccgaagtaaaatgcatctcttcgccagtgacgggatgcacaaaccccagcgtcatggcgtgcaaagcctgccgcggacaagtgtcgaagcaattgtttacaaattgtttgtatttactaaagtgagtccctttcaggatttcgtgaccgccataccgctcgtcattgaagagtacatgaccgatatgcttcatgtgcacacgtatctgatgcgtacgcccagtttcaagaatacattccaccaaagtgacatatcccagacgttcgagcacccggtagtgggtgacggcatgtttcccttgggtaggatcggccataacggccatttgcatccggtctttcggattgcgggcaatactgcctacgatggtaccttcatcctgatcgacaatgccccataccagtgcgcggtatctacgcttagtagttttattaaagaattggacgcccagattggttttggcatccggtgtcttagcgataaccagtaatccggaagtatctttatcgatgcggtgcaccaatcccacatgtgggtcgttggcatcgtaatcggggttatccttgagatgccaagcgatggcattgaccaacgtaccatgatagtttccgtgtcccggatgcaccaccagtccggccggcttattcaccaccatcaggtatttatcttcatagacaatatgaagtggaatatcctccggaataatctcattgtcataacggggacgatccatcatcaccgtaatcacatccagaggtttcactttatagctgctcttcaccggtttgccattggccatgacaaaaccgtcttcagccgctttctgtatgcgattgcgcgaagcattgacgatgcgttcaaacaaatatttatcgaccctgaccattgcctgccctttatccactaccacgcggaaatgttcatagagctggttttcgtcacctacgggttctatatcatccaattcgtcctgttcaatatcgtcaggcaattcttctatcatgcgttttttctacgtatacgtttcttatattaaaaccaggaatcatcatctgttccggaatcctcaacagacatagcagcattttccaccatatcgacagaatcggttgcggtagactgcactccgtcacctaccatcagagtcagcgtagcgccgatgggagctttatctccaatctgcaattggcgtccctgatagatcacgccatatacccagtccttctctccgctcaccatccggttttcggtaagtttaaagcctgcggcgatcaactttgcctgcgcctgacgcacggaactgttatcggccacatcaggcaccacactcaaaggagtactgagggtatttattgtcagatagattgttcgtccttctttcactttctgcccgaccgacgggttaagatccaggataatgccggaaggtttattttttacgtaactggagtcggacaccacacaagtcagtccatgattccggaacatcttttccgcttcgcttacagacattccttttacgtcgggcactattacagcttcgccatggcgtgtgtatatatccagtcctttaagtgtgccaactactatgagcacagccactacaaccatggctatgatgtttatccagaagaatctattggccttgaaagaaaaaaattcttttatcgtcataattataagctgttaatgcggacaaagatactattttcgttacacagtatcacagactttcaccgagtttttaaaaaagcgtatcaaaaccctctctttgggttttccaccttgcgcctgataccgtaatcaaattggaaccggttctaaaacaaaaagaagcaaaggaatcctccttcacttcttcttattcgtttgcaatggctaatacttatgccttcactccgttgtattcgtcagaaacagtcagtttcttacgacctttagcgcgacgtgcagccaatactctacggccgttagctgtagccattctctcacggaaaccgtgtttgttttttctctttctgttagagggttgaaatgttcttttcattactgtatcttgtttttatgttattacttctacggattcgggctacaaaaataggcactttttttaaataaaccaagagttaagtcatttttagtcaaaacattttgtgttttttgccgatttagattacttttgcacccgaaaaggttcgaagataactcaataacaatctataaaataaagaatatcaagtatgattaatgctcaagacatcaagaacggaacttgtatccgcatggatggcaaactgtatttctgtatcgaattcctccacgttaaaccgggtaaaggtaacaccttcatgcgtacaaaactgaaagatgtagtaagcggctacgttctcgaacgtcgcttcaatatcggtgagaagctggaagacgtacgcgttgaacgtcgtccctatcagtacctgtacaaagaaggtgaagattatatcttcatgaatcaggaaacattcgatcaacacccgatcgctcacgacctgatcaacggtgtagatttcttgctggaaggtgcagtagtagaagttgtatcggatgcatctaccgaaaccgtgctttatgctgatatgcctatcaaagttcagatgaaagttacttatacagaaccgggcttgaaaggcgacactgctaccaacaccctgaaaccggctactgtagaatcaggtgcaaccgttcgtgtcccgctgtttatcagtgaaggcgaaacaatcgagatcgatactcgtgacggttcttacgtaggtcgtgtgaaagcataagtatacacagactcattaacacagcctccctgcattctgccggaatatccggttggaatgcagggagttctattttatcgccacctttcatccccccaaagcacaaagactacagagattggaactatgatatatgcatatctaaaagagagaaaaactctatgacctccctgtcccctacgataagacaaattcaaccattctacagaaatctttaccaaacttccggaaagaagcctgaaaacatcgaaagtggagaagtcgcgttcctatcttcaaaggctgtactcgctacctttaaaaaccaaaggcttcctggttttcaaccaacaccactttgcccccaaaggtattcaagacaaagcataatggacaaaaagagtgcattaaaagagattatcggaaaataataatttatctttgccaatattaaatatgaagattaactatacatatatgatgcgatactccgttattattcccgtttacaaccgtcccgacgaagtggacgaactattgcaaagcctgacagcccaacacttcaaggatttcgaagtcgtggttgtagaagacggatcatctgtcccttgcgaaaagatagtgaaccaataccagggaaaattggatatacattactacaacaaaccgaactccggtcccggacaaacccgtaattacggtgccgaacgtagcaacggcgaatatctcatcatactggattcggactgtatcttgcccgaaggatatctcgatgcagtagagaaagaactgcagaccgccccggccgatgcctttggagggccggaccgggcacatagttctttcaccgatatacaaaaagccattaattactccatgacttctttcttcaccacgggaggcatccgcggaggcaaaaagaaaatggataaattctatccgagaagtttcaacatgggtgtccgccgggaggtttatcaggcattaggaggtttctccaatatgcgtttcggcgaagacatcgatttcagtatccgcatattcaagggaggataccaatgccgtctctttcccgatgcctgggtataccacaaacgacgtacggattttaagaaattcttcaagcaagtgcacaactccggtattgcacgtatcaatctctacaaaaaatatcccgaatcgttgaaagtcgtccatttgctgccggctgtattcacgttaggagttgcacttctactattatgcactcccttttgcttgttcagcctcgtcccgattctgctttatgccttactggtctgcctggattctgcgctgcaaaacaaaagcttacgcatcggcatctattccatcgctgcttctttcatccaacttatcggatacggcacaggattctggcgtgcctggtgggaacgctgtatactgggaaggaacgaatttgaggctttccgcaagaacttctataaataaagatgcttcaacaaaaccttatcccgcaaaacacattaaatcatgaacaaacagaaactaaacatcaagcagtggtccaaagccgatcggccacgcgaaaaaatgatggcaaaaggttccgaagcattgagcgacgctgaactattgggcatcctgataggttcgggcaatacggaagagagtgccgttgaactgatgagaagaatacttgccacttgcgacaacaacctgaatgaactggggaaatgggaagtacggaacttttcttcattcaaaggcatgggaccggccaaaagcctcaccatcatggccgctctggaactaggcaagcggcgtaaactgcaggaaagcaaagaacgggaacagatcagatgttcagaggacatctacaagctgttccatccactgatgtgtgatctgccgcaagaagagttctggattctgcttctgaaccaagcatgtaaagtaatcaacaaattacgtatcagtacaggaggcattgacggaacttatgccgatgtacgcaccatcttacgagaagcactgataggacgtgccacacaaatagccctgattcataatcacccatcgggccatgcgaagcccagccaagaagacaaacgcctgacgggcgccatacaaaaagcgtcgcaaacgatgaacatcaccttggtggatcatgtcattgtctgcgacggttgcttttatagttttgctgacgaagggcttatctgaccggcataacgattggaatccggaaaaattaaagttgggtttctccttcgatatagttctcaagaaacaggttctcaccatcgaacacagcataagagaagaagttgatccagtcccccaagataagtattcgcgccgtagcactcaacatcaagtcaagttcgatatggcgatgaccgtaaataaagaagttaatattaggatgacttttcaagtattccttggtataaagcaccagaaactctttattttctcccatataatccggttcttttccaccctcacgcttcagccggctgtgtttggcccaattcaatcccaagtcaatgctccatcggggatgaatcgcagagaacaaagtctgtaacgtacgactatggaacatagtacgtagcaacttgaactttctatccggatctcccagcccgtcaccatgtgccaggtagaactcttttccataaatctcagtggtaaccggttcacgatgaatcgtcaccccacactccttagtcagatagtcgccgcaccagatatcatgatttcccgtaaagaaatgcacctctactcccatatcagtcagttcggagagtttccctaaaaaacgggtataacctttgggaacaaccaaacggaactcataccaaaagtcgaacatatcgcccagcagatatactgcggcagctttgtgcttaatgctgtcgagaaaattgaccaggcgccgctcctgcgtacgtccatgctctatggcacgtgaccccaagtgggcatcagaaaggaaatatacgtttttcatactgtaagaatggatcgtttaagaatagaggtaaactgacaatggttacaaaaagcccaattccaacttagcctcttcgctcatcatatctttatcccactccggctcaaaaaccagattgattgtggcagagtttaccccgtcaatcgactctactttctgacgtacatcttccataatgaaatctgccgcaggacagttaggagcagtcaaggtcatatcaatagatacttctccatcctcggaaacatctattttgtaaatcagtcccagatcgtatacgtttaccggaatttcgggatcgaatacggttttgagcatatctactatcttttcttctatttcaaacttagtcatatctgtatttctttgaaaattcataagacaaagctaaagaaattctttgaaagatagagaatattgaggataaattaacgggttatttatacccaccggcttttgcgatgcgtttcggtatctccgtattatccattttaccgatgaacagatcggaaccggcaccgatagcaaataccggcacatatcctgcagaatgtccgccgcttgtccagcctaccatagcgatttgatccatcacttctttggctttagcagccatcggctcagtcttggcatacatactttcggcaaattccactttatttcttacaaatgacttttcatattcgttacgcagtttcttctcttgctcccaggtgataggaagtacagaccagaagcccatctcttcggacagcagattcttaatgtcttcccaagctacatgattgttcttagctttgcgcaaatcactgatctttttagagagtacttcggcagatgctttctggttctcaagtgctttgagattcaaggcatactttccagttcccaatgcgatacctcctgtttcatggtcggcagttaccacaatcaaagtttctttcgggtgtttcttgtaaaactcataagcaactttgatggcattatccatatccgccacttcgtggaacaccgtagcggcatcattcccgtgacaagcccagtctatcttgcccccttctaccatcagaaagaaacctttgtttttgcctttagtcaaaaagtcaatagcgctttctgtaatctgtgccagagtcaggtctccttctttactatcgatagcataaggcaaagagcccgtatcggcaccttcttcttgaatcaatatcatcttacctgccgcagcagctttggctttataatcgttatacccacgagcaatggtgtaaccggcttcttcaaacatcgggaaaatgctaggagcttctttcttatcataagtagtggttggtttcaggaaaccggcaccggcataaaaatcaaaacctgctttaggaagatcggtagctatttcataatacatattccgatccggctgatgtgcgtagaaagcagcaggagtagcatgatcgacactgacactggtggtaactcccacccttttaccggctttctttgctttctcggcaactgtctgcaaaggattcttctgatcatccatcccaatggaaccattataagtcttttcgccggtggaaagagcagttcccgcagccgaagaatcagtcacggaattagtggcagagaaagtagtagccattgtccccaccgggaactgtgtaaaaagcaaaggctctacaccaatgcggcccttctggatttcggcacgatacatttccgtaccattcacttgattgacacccattccatcaccaatgaaatagaaaacatattttgcctgagcattggctataactgccacacagacaaaaagaaagaaataaaaaagtcgtttcattcttgtactattttaagtttattcgagttagtgatagcaaagataaaaattttaaaaagaagaaaaggagaaagagatatgaatattctgttaaatagatcaccgagcatcaattacccttcaacccaaactgccatctctaacctgcctcatataaaaaagccggaaaacagagagtagatctccgcctccggcttttatctataattacttatcaacctttatttatccaagatagccattgtatcagaagcaatcagcaattcttcatcagtcgggatcactactaccttcactcttgaatcatcagttgagataatagcctcttcaccgcgaaccttgttcttttccggatcgagtttcacacccaggaattccagtccttcacaaacaccggcacggcaagtcgcctgattttcaccaacaccacctgtgaacagaataacatcgaccccacccaaagcagcggcatacgcaccaatatatttcttaatgcgatagaagtacatctgttcagtcaggatagcctgcggatcacctttggcaacggcagcttccaagtcacgcatatcacttgagccgttcatcataccggctacaccacttttcttattcagcaggttagagatacccgtagtagtcaggccctctttatccatgatgaatgtaacagctccggcatcgatatcaccggaacgagtacccatcatcaatccttccaacggtgtcagtcccatagaagtatcgatacacttaccatctttgatagcagcaatcgaaccaccattaccgatatggcaagtaatcagtttcaaaccttccggtttaattcccaggtattcgcatacgcgctgagaaacataacggtgagaagttccgtggaaaccataacggcgcacaccatacttcttgtacaattcgtaagggatagcatacagatatgcatgctccggcatagtctggtggaatgcagtatcgaatacaccgatttgcggaacattcggcagaatagctgtaatggcgtcaactccttttaggttagcaggattgtggagaggtgccagatcattgcaggcagcaaaagcctcaagcacttccttagtcagcagtactgatttactgaagcgttcacctccgtgcaccatacgatgacctacggcattgatttcttcgagtgattggatagcaccatattcgggacttaccagtgtattcaagataaattccacacctacggtatgttcggggatatccttctccaaaattttcttttcaccattcggcaaagtcaatttcaggaatgaatctttcaaaccgatcttttcgataccaccctgggcaatcacttctttgctgtccatatcgaacagcttgtatttgatagatgaactaccacagttcaatactaaaactttcatatctgattttcgatttaattatttaccattctttgcagcaatcgcctgattagctgtgattgcaatcattctgtatacgtcttcaatagagcatccgcgtgaaaggtcgttcaccggacgtgcaataccttgaagaatcggtcctaccgcgtcggcatgccccaagcgctgaaccagtttataagaaatgttaccaacttccaaactaggaacaatcagtacattagcctcgccggcaaccggagaccccggagctttgcttgcacctaccgaaggcactaatgcagcgtctgcctgcatttcaccgtcgatattcaaatccggtgccatttctttagctaatttcaatgcctctaccaccttatccacgttctcatgttttgccgaacctttagtagagaaactaagcattgccactttcggttcagcaattcctgctacagcctgtgccgtacgtgcagtacaaacagcgatctgtgccaactgcgaagcatccggaaccggagttacggctacgtcacccatcaccagcaaaccattctgaccacattccggagcatgtgtcaacaacaacatagcacccgaaacgcatgtaattcccggagaagtcttaataatctgaagtgccggacgaagtacatcacccgtagtgttgcgggcacctgccaactgaccgtcagcatcgccacttttaatgatcagacaacccaagtacaacggatcgagcaccaacttacgggcttcttcgatagtcataccttttttcttacgaagctcgcacaataactgcgcatattcttctttcttcggatggttctcaggatctataatagtagccctattaatatttccgagtccccatttgacagcagctgcattaatttcttccgggttacccaaaagaatcaaatctgcaacttcatctgtcaaaatctggttagcagcttttaaagtacgttcttccgtaccttcgggaaggacaatgcgctgacgatttgcttgcgcacgcgcaacgatagagttaattaaattaagcatagatatttaatattgtatataaattcagtagggtgtgttatttcacgccgcaaaagtacacaatattgcaatatcaacattgcaattcggggtattttttaccccgaacttgcaattattataatatttaacactagcggattatttccgggggtacactcttgaaacggtccatacacattcctatcggagcaccgatataagtcggatcacaaataagatattttttaccatccaacaggatgtaatcacccgaaatatcttcgttgaaccgtacagccgaagcgatatgattcggatagtcgagcaacacagcatccagtcccaacaaatctttcaccaagttagaaaacaggatggctcgatcctcacaatcacaagccggataataaaaattttcgtccatgaagaaaggcttttcatacccaaattgttcaccatccgtctgatattggaatgaattctgcacaaaatcaatcaggatattcgcagcatctttctccgatttcccctttattgccgcctgcaaaggcgggtaaagagcactcttcaactccttgctcataggggttttgtagtaaacagcaacttcacattgcggatagtccttatagaaatccatcaggttcttattgactgccgtattgactttaaggagagatttttcggatggagacactgtcttgctaaactcctgcatgccgaattgaggcacggcgcccagatccatacataccagattcttcgcattggcaaaatcctgactatatgtataaacagccattgacccacctttatccgcctcaaagacatagtacttcacacctttgaaggtaatataaggtatgccgaaaatagttcctgccggagccaccaataattttaatttatcgtttatcttggacaaacgcaccttatatccacatttattgaggatgaacatctgcagaaaagctacatcgtcttttttggcaacaccacacacctgcactcccaactgcttgatgaacattaaaaatgcccagtcgttcatctgatgctccttctttaaacgaatacaatcgttaatcaactgttcatgatcggctttacacaaacgactccaggcacctgccactttactttcgcttgttccacccaattcaaaaccgtcaatcacgtctgtagccacttcaaaccgtgttccataaaactcaatcgcattgcgatgcgctgaacttccgggcaacggagctgggatatctacctttacaggggtataaggtttgcccggaacataaacacccggagccggtttatcagccactaccggcagatcctgcttcttgacttccacattcacttcgcctcctacacccggtttatcggctatgggtatcttaggcaccgccggcttaatctctaccggagcaggaaccggcttttttttatcaaaaagtgtcggtttcaccggttccggccgagtgggcatcgaatcccccatagaggcattatacttttgccacgcttctttcaggaaagtggcaaactcttcgtctgctttattcttaaattctttatattctttttgctgtttctcttgaaaagtatcaaactccttctgatagttcacgtcctgtgctgtgataacggacggtatcagaaaaagtgaagcaaaaacgaaagaaaagtaatgtttcgttttcatcataataagtgattaatgattaacggtcagtgattcgggaatcactattttatcaataccatatcataaaaagcacaacgctgaaccgccgggatagagtacacccactccaatacattctgataagtgacttctttggtaaatgggatatcttccttggtagccaccatcatcatatttatcttctcgctttccttaccatgctgcttttccatacgatagtcgacagcattactaaaaggaatcgcatattctttaccggctttcaacaatgtattcggttcataactgttaggataaagcagagcccccccattactgtcgaaccagaaaaacttcaagtatgaatccgtaccatgtatagtcagcttacagtgaaacacatccccttcacgatagagtgtttccactcctttcacctcaagggcatacgaactatccgacttgtcctctttccgaacctcggcgtcaatggtcactaccttatacaggctacgggtatccgtgtcccaaacctcttcaacttttttattagtaacattcaccattcccccgatagccagcacattcatttgcgaataagcttcatgaagcccctggccgtcttcctgggtgatctggccaaataccgaccacacattttccatcacacccgctttctgcagagcagctttcttcgcttccatgaaagccctctcttccgcctgcttcaatgtgatgtcatcgctaacttgccaacgcccctgtacgcctttcaccttcacgggtttctgtgcataaagagcgctggcggcagtcagtaaaagtatagctaaaattcctaatagcctgtttacgttcattcagtttgcctatttatattaaaacttactgagcgagtttatccagttccttagccaattccggtgattttttagccaattcttcgctaagtgctttgacagctactttgtttgcagcttccaggctataaccgatggttaccattacctctacatttttgttaggcaacgttctatatacttcaaccaaaggaatagtacgtcccagcgttccactgataatactcttaccggcagctactgcgctcgacagactggcagcttcctcctgccccatatcgtcattggctactttcgattcgatcaactgtgtaacctttgtctgaacctgtccggcgatatcaatcttggccgtgttggtagcctgcatagctgcagccgactgatttccaccaatcactcttgatgtggcaatataccagtatggattgccattcatatcaatttccatctgtttttcccatgaattctccagttgtttgtccaacggtaactttcccaccggagtcttgaatccttctttcgtcagttccttcgcttgtttgcgtgcttctttaatggcttttttctgcaagtctttgttgattactttttcatctttctgaatagctttataagccttacctgtcgctttttcttgtgcaagtgcatttaaagaaatcatcattgcgagtgttgcgaaaacactgattaacaaactctttttcatatcaattctgtttttagtggttaatattcgttatgtatattcgtttttcactttgcaaaaatatataaagtaatccatttcgtttactttttctttatttttttgtagttccccactgttaaataagaatcttcgtgccttattagttgctaccctaactctatttttcataactttgcaacgttttcaaaaatcaataggtaatagtatgatacgtcagtgtgccattttatttggctgtttggctttgggtgaattgattgtttatctcacggggattaagctcccgtccagcatcatcgggatgttgctgctcaccctctttttgaaattaggttggatcaaattgcattgggtgcagggaatgtccgactttctagttgctaatcttggttttttctttattcctccgggagtagccctgatgttatatttcgacatcattgcggcacagttctggccgattgtgatagctactctagtcagtacccttcttgtgcttgtcatcaccggatgggtccatcaattaacacgtaaactcaaatgaattatttagaaaatgaattcttcctgctggcaatcactttcgggatttacttctttgccaagcttttacaaaaaaagacaggaatactcctactcaatcccatcttgttgactattgcagtcatcatcattttccttaaactgacaaatatctccttcgaaacttacaatcagggcggacacttgattgaattctggctaaagcccgcagtcgtagctcttggagttcctctatacctgcaactcgaaacgattaagaagcagctgcttcctatcattctgtcccaattggccggctgcatcgtaggcgttatttcagtcgtactgatagctaagcttatgggagcctcacaggaagtcatcctgtcacttgctcccaaatcagtcaccactccgattgcaatggaggtaaccaagacattgggtggaatcccgtctctgacagcagcagtagttgtttgtgtgggtttactgggtgcagtattaggtttcaaaacgatgaagatcatgcatgtaggcagccctatcgcgcaaggactttcgatgggtacggccgctcatgccgtcggcacctcaacagccatggatatcagcagtaaatacggtgcctatgcaagcctcggtttaaccctcaacggtatttttactgcattgttgaccccaactattctgcgattattaggaattctctaacaaaatagctttatctttgttatatataaacagttaaaaggaaataacaactttatgatcgcattcagagatataacgatccaagacaaggataccatcacagcctacacgatgaatagttgccgtcgcaactgcgacctctctttttccaacttatgcagttggcggttcttgtatcacaccaagtttgccattatcaataactttctggttttcaaattctgggccggcgatgaattggcctatatgatgccggttggtgaaggcaatcttgaagaagtactgaacgaactgattgaagatgcccgacgggagggtgaacctttctgcatgttgggagtctgctcatgtatgcgcgaagatctcgaggccattatgcccggtcagtttggctttacggttgaccgtgattatgccgattatatttatttacgtagtgatctcgcaacactgaaaggaaaaaaattccagtccaaacggaatcacattaacaaattccgcaatacatatcctgactataagtattctccgatcaccaaagaccgaatacaggaatgcctggagttagaggccaaatggtgcaaagccaatgactgcgaccaacaggaagggaccggaaacgagcgacgtgccctgatctacgctctcaatcatttcgaagagttaggactgacgggaggtatcctgcacgtcaatggacagattgtagccttcactttcggcatgccgatcaataaagaaactttcggtgtacatgtagaaaaagcagataccagcatcgatggcgcttatgccatgatcaattacgaatttgccaatcacatccccgaacaatatatttacatcaacagagaagaagatttaggaatagaagggttacgcaaagccaagctttcgtaccacccggaaactattttggagaaatatatggcttgcctgaaagagcagcctgtagaaatgataaaatggtagcataatccaatgataaaggagcaggtaaaatcattatggaaactttgtttcgatgatagcgaggcattcatcgaactttacttccggcttcgttacaataacgaagtcaacttagccattcaaagtggcgaagaagtgattgctgcgctccaaatgctcccttatccaatgacattctgcaataaaatagtacctacttcgtatatctccggtgcgtgtacgcatcccgattaccgtgcgaaaggagtgatgcgggagttattatcacagagttttgcccgcatgctccgtaacggtgttctgtttagtacattgattcctgccgaaccctggctattcggttattacgccaaaacaggctatactcccgctttccgtatctcccacaaagtcttctcactttcagagttgaccattgatccggaaccggataccatgattgaagaaacgacggaatatcaagaagattattatcaatatctgaccggcaagctatccgaacgtgcctgttgtttacaacatacgcctacagattttaaagtagtccttgccgatcttgccttgacacaaaataccgttctcattgcccggaaggataatcgagtaacgggtatagctgttgtctataaacacgatgatagctcgtatatcaacgagttgtttgctgacaatgaggctgtccgggcacaattactctaccgggccggactaagaaacggcactgaacggattattcttcaacttccccctgtagaatccctgccaagtgtcccattaggaatggcacgcatcattgatgcccgggcagttcttcaactctatgcagcaggttgtcccgaagtggaaatgaatatcgaactgactgacgaacagctttcggtcaataacggttattactatctctgcaaaggaaaatgtatgaccagtgaagtccgcttgcccggagtacatacccgaatgaccattgccgaattatcggaaaagatactgggtgaaatgcagccgtatatgagcttgatgatgaattagagttttccgttttttcattatagattacgcaaaacactgacacacaaatatatactttttcggaagaacaattgtcttaatccggtaagttgttataaatcaaatgcaaaatattgtcttccatttttataaataaagacctgctcttcgcgtccctttgtgcgattcctcaaccatagcagagcattttgtggcaccagaaaatcaatttctctttctgtagccaccttgctgcctaacgacttccatccatttattccgtcctgatagaataactcataattatccccaggccaaatgtaattatcatcgttacgcggagaaaaaacaattctttcgatcagcgtactttcccccaaatcataggccagataacaagatgtatcacgtgcctgaaaataagtcagtatattaccatctgtaacatactctaattttgcaatcggttctatactgtttatcctcctcaaccggaccttctccttacagaatgaatccttaaacagtgccagttccgccaactccattctcttccctatcggagcaacataacgaacatatctatacttctttcttagaagcggagtcaacacacaataattagtggtaagcgtatcctcaaattgccataacagatccgcctgcataaatgacaaatcatcagctgcttcaacttttgcccctatgatagctcgataagcccattccgcaatcgtcttttgctgaggcattttccgctttaatatagcttcctccatcaaatcgatattgggtttcaacaaaacaaacccaccccccgttttagatataaacggatatcctgccggatacagttttcctccatctccctgataaagagtctgataaatcacatcgggttctatatcccggaaagtaaccttaccagcattaccaagtgccatatctataggaatccatccgccgggactaaatatccctaagtagatatattgctctccagacatttgtatcggtattgtcgtatcattacttccaaaatattcagatgtcacatctttcacaaatcgattcttaagcacaggagataattgcctgtttcccgaagttccggagtttttatccgcctgcataccgaaacaatagcgatacaccttcccctttttccttccgtcatgccgtaaggtatcacgtgacgcttcaaactcattaaatccgaattgaagaaaagttcccgttgtgtcacgcaacatcgtccaacaatgataatgttgataatcgggtgaataaacaaaatagtcggtcgcaacaggaattccacaagcacgcatagcatatattgtcaggtcgcatgcttcacgacaataaccaatccggttatgataaagaaaaacagcattcaagtgaggtacccgaaaatcagtattgtagatgtaatacagctttctcagtttcccgtcaatgatcttagaagcttcaataacatcactccccttataaagagaatcgagtagagttccataatcttcataatacaatttacgccaatccgataaaggttcatcggctattctgtaaggtaatatcagttcgcaaaaatcatcgaacggcaaatttctattccaaggatatttcctccaaacttcaaaagccaggtctatattatctatcaaatattccgctgttatcacttgggcgtcatatatcttggagagagagtcaaaggaaattctgttccatttattcttctcccttttagatatagaacgcccttcacaaaccccaactaataaatggtgaatagaatcaagttcatttccttcataagaataccatcccggcatattacgaattaaaaaacgagctgcctccaatttttccggatcagttctataatgttctaataccttttcaagctccacgcgattatcgccggcaaattccaaagcatattccaaccgcctatctttctccgattgacaagctgccaaagttaaaactaacaggataaacaatacatatttcatagttaaaacaaatgcttattttctattcagactcattctttctaaaatattcatgttttaggattgaatttgacatcggaggcaatcctattattttagttgatgaattcataagcctgtgttaggaaccaagaaatcatccaggtctaaataaagcacgtcatctatttggggatttgtcacatataatctatttcggataggatctatccacatctgcccaatgctataatccgtctctattttttgtaccagattcccatcccaatcatatacatgaatgatattcatgtgtggagtctcaaaacgttcccaacgctcttttccccaatatactgcatatatgtaattgtcatctgcctgaacccttgtaaaatacgactttattttttcatcacttttaaaaacagaaaagtccggttcaccttccaaacgatagccgctcacatgacctgtttcaagatccagaatattcaattgcgcaagatgaaccatagcttgcaccactttagttccatccggtttaatggcatcattcgagtagaaaaaagactccggcagaatggaagcttcatcattccttatcgacttcttatagcttgaaaagctcttcagcaacttattcgtgtcaagtgtccgtttttgataagcgggcaaagtagcttctttatcattaagcgggaacgactgtaactctgtaattaatgtattttcatccttcagaaacatcaaatagtatggagcacctccattctcctctctccagggataggagatttgcttatccataacagtggtgtcccgcttgatcgactgagttatattccagataaatagcttctcttcattaggagcgaacagtagagttttcagatcccctttttctttaaagaaatgaaaaatcggacccaaagcggcaacttccccaggaccacttcctctataacaaaaagtgcctatttcttttccggtgtctatattaaatatattataaaagcgatccggtaatttaggattcataaaaaacatcagtgagtcgtatgtggataaccatccaaaattcgctccatccaatggaagtattttcaatgtagctttcttcgtgtctttgatactatcttcaatcgtttgaattttaccattgaagtatgcggtgtcatcattttcatgacaactaacgcaaatattcaatattagtgcaagactaaatatcactttaatgatatgcatatttttaatttagtttatattgtgattattatttgaaacaaaataaatcagtagctcttccaactgttttttatctcaaaaatagatgtgattttctcgtgcctctatttgaacgaaatttatagggaagcaagaaaccaatatctacttttgagataattatctaactaaagaccaactttatttagtacaccgatcctgcttattatcatcataccacccagactccattgaagatggacatggatagattgtatttttatcagttttactatcgcaaaaatatttataacctctttttgtactccaagtatcttccaaataacaatagccggcattagttccttcgccatcagccaatgcttctacatttgccatagctacatctgacaactggattgctttttgtgttttatacacattataaccagtaaacgacagaaccatcactgcgacgaacgcaatcgtaattttcattcttgttttcattttattttcttactttagttgattatctttttatttattccgcttatcatttccacggaaaagcaacccaattgccttctaaagcaaactttttccataggctaacgttctccataatttttaagattaactattagttttctttatcaactgcattaccccgaatcttcaaacgtattggagaggtggaagtattacaatatacagtaatggtcttctcaaaatgttcgggatgctctgcacggtaagtaacctgaatatcggcagatttccccgaagacacaggctccttgctataagcaagatgtacacccacacgaagtatttatgtccttgataatcagaagatgattgccaagattccgcaaactaaaagtagcggtctggggagttttccaatcaaaatcgcccatttcatcgataaaagtcggataaaggaatcagcccttcgtcaatcaatgtctatacacatacatcaatacatgagactgcactatccagaggagagaatcaagtttagcattctatttagaaagcgtttgaattcttcttccggtatctctttattgatttttaagtttaaccttttcattggttcccatcttggttctatttcgctaacttactaacaaacaatcatcccttctcatacccctaatactcattttaacctcaaaaggctaagtatcgcagtttgctcatttatctcctgttgctgataagcggacggaaatgcatcatccgggaattcatctgtataaactgtcacaaatgtattagggatattagatgaaaccggacgtcccatttccgaatatccaggaatatccatcttggtcaaatttccttgctctatccgcccatccttcttaaaatagacagaccacattcccttatttgctgaattaaaagaccaaagagagaaaacaagattctttccatccactgtaaaaagactgtatgtgcactcctctttcgtttcgtacaattcccggtccgagcagtgaaaatccgccaacataggcaaattagacttctgcctcatggttcttaccaccgtatcattcacagcatcatattgataatagcttccatctaccggattatagatttttatagttccatcctcttgagcacacagcgtattccaataggagttcttgcaaggagtccctttttcatattctaataagttcttcactcttctccctttctgatccagaatccaaagccctttacagttttcagactgagaaggacgatggcagagaaaacggccatccggcaactcaacaacatcattgaaaacaagagaataagggaagctcaacgaatgaagaaattttccatcaaaactgtaagaataaatagtccgtttactcatatcacagacataaacacaatcctttcccacgaaaaaagagtccatctctctatactctcccggtccctcaccccgctgaccaatcgcattcaaaaaagtaccattcttgctaaatcgaaatgccatttcttgctttctatccgaaatgtaataacaagaatcttttgaaattacattatcgaccataccccaaaaataaggagaaggtaattgcagcctgacagactcaatggtgtccaccaatacagacatcggcagatatggattagaaatagacagatcaacggtcatttcaaatcccttatcaacctgtttccgacaagatgaaacacaatatataaacaatattcccaccacaattaaactgaaatttttcataatataaaaattataaccagtaaataccgccataaccaaacaaacaattctctttttcctcctattctttttttaaccgatagagatataacgaatctttcaccacacataaaacgacaaaagaagtacttttttcactatctgtgaaaacaaatggaaatatatcggcaggaagactaaatccatatatagtgtgaatcattaatctagcgcataacatattattttccatccacttgaactatttttcacagcagcaaacaaactctgttgggtactatccactgcaatataataagcatcagtatctaacgaatattttttaatcggattaccatcccagtcaaaaaccaatacggtatctgattttcggttattttcgtacatttttttatcagaatacaaagcataaacatacttagaggtagcgctaagatctatataacccgtctgagtattttctgttagatcgacataataaataccttcttcattaacgggtttattgattggatctcccaacctcaacgattttatcaactcaattttattgtttactatttcaaaaaagtctatgttggacgagaagttaattgaaccggcaaatgtatgtttctcagggttcattactaaatttccttgattagaaagatatctggtatatgtttgaaaagcgctatccgcagtattatacacatccacaccgtaatccagcacactgtcatttttgttaaataacagatattggaaacgggatttatatgtcccggcacacaaaaaagtcgtatcgtctatcgctatgagctttgaaatctgtgcctccggaattttatattgcgccagacgtaccggtgaaccatccttcttgcgactgttgcgtaaagagtcaagactgtatttcatcacaatgcgtgtttggtcatcaaaaacagtgaaatcgctttccgttaagtagccataacagggtgaaggcagttcagccggcccctgtccgatagtcccaaaacgagcgatatattcacctgattttttgtcaaacagcgtatagcaacatcccgagtgatagtcattaactatgagattctttccgtcacaacttaatccctctattattgctatagaatcttcattaacataaaagtccttctttggagacagagattgggattcagaaaacaattccagaactgtatgggatttctctttttcgcatccctccaagatacacatagataacaagaggagtagggtgaagcttaaatacggtcgtttgatcatgattcaatattattaaatgtttttttataatggaatatatcgaat

SEQ ID NO: 4995 - DNA, 109785 bp, Unknown
  gut microbiota DNA sequence
cgctgttgcttgctttgccgtgtatattccattcggcacgacatacccatgccacaatgatgattactcttggtgccgatctttatacggtatctaaactcttgggacataccaatattcaaacaactcagatttatgccaagatagtggatgaaagtaaagagaaggctatcgatttaattccggatataacttgagaggatgatgtatagtaaggttagatagttgctaaaaaacgaatctcaaaaagatacaagaggctaagaaaatgctacaaaagaatttttgttttgtaatgtgttgaaaatgaatgttctatatattaatatcctgcatttacaaagttaactttaaacctgtgttaaagttaactttgtaaatgcaggatattaacttcgtagatgtatcaagttaacttcgtaaatcgagaaatatgattatctctttggatgattaacattgttaatgcaataatttcaatctttgtgttattatatataagaaatacattattatatgtattgatgttttttatctattttttatttgggtggttaataaatatatatttggttagattagctactgcctgattttaccggaatttagtaaatttgtaatatagtagatatactattgaaaatttgatcttactatataatacgatttgattttattaatttgttagccttataactctctctattagtgattctaaaataggaggtggatattatttaagattacaagtgggttttctggtccatttttaagcaaacaggtatttggatgaaaaaaaactgatacaaatgtgcgaaaaaacatgtaaaattctttggtattattaaaattgtgtctatttttgcaccatattttgcatccataaatttagatgcttaagttataaagcaaacaaatgaatcacaaaggcccttacatgaggaaaaacataacaattggcactactttgcgcagaatttcactcatattattctgtttacttcctttgaaggggatttgtcaaacaggagaggccactgttgacgcacttgttaagatgggatttgaaaatgtagggtggacagaagatactgaagaacgggtttttgtgatacaaaactcagcctatcgccttgagggagttggaataggtaaagcggttgatttgatccagaagatgggtttacccgaaaataagccatgtaggttaatagttttagacaataatgttcctcagatatccctctattatcagccgatgaaaggagatagtattgctgaagtcagtcgggctgattggagtgtaagttatgatttgggagaaggatggaaacaagcgagacggattaagaagcaaaatagctctttgtttaaagtagatatagtggtgtatccggagttgttgtttagaaactatattttatctaaggtctatgaaatagtggttaatgtttctcctgccatagaagtttctttgtggaaaggaatgaaactgactggacaagtaatttttcctatctataatgattatggacaaaggtataagcaaatccgtccaggttttgtgactttgtcgcagacagtacgtttaccacagcgtacattcctgactgcttcggtcggtttttttaataaatttcgttggggaggagatttgaaagcaaagcacttctttaaagatgaacgtttttcggtagatgcgcgtatcggatataccggaagaggatactttgaagattgggctttttatcatggaaccaaatggaccttgacaggttctattggggcgaatttctattggccaaagtataatacgcagtttagtttaaagggggaaagatatttagaaggagagtatggtgcacgttttgatatgattcgtcattttcgatatgcttctattggcttttatggaatgaaggtgcaacatgcgggtaacaaaggactgaatggcggcttcttgttccagatagcattgcctccatataaatataagagaaaaggttatatcccaagagtgatacccaataatttcggattccaatataatgcgggtaatgagcgtatatatggtaaaggatatagtcctcaggcaagtgataacgtgatggaaaataatagttttaatccatattttataaaatcagaattattaaatttttaattttattgagatgaaaatgaaaagtaaatttttcggtaatggcgctaagttagcgttagccgttttggcagtttgcggtacactgtttacaagctgctatgagaaagcagaagttgatcaagcaacaaaaccagctgaagcaaagtattatattgctggtacgattactgatgcgactacaggccaggaattgactactgctaaagttacattgggtgataaatctgtcactagctcttttaacgagcaagttaattacaaggcagaaggttatgctttagtcgtttcagcagacggatactatcctgttaaaagacaagtttatctgaatcaggtaagtgatggtcagacaagtgttgctactgttaatgttgcattggtttcagttgaagccgcagttattcctccggtagttcctccgacagatcctgagactgacatcaatgaaggagaagcaactaaggttgcggacaaggcggtagaagtagctaaaccttctgaatcaactgtaaccgatatgcttgctggtactacagctacacccgaagagaaaaaagcattggatgagactcttgaaatggcaggaggaatgaaagttggtgaaactactcctgaagttcttgctgatggttctattcttgctattactccggtgaaatttacgaatcctattcaggatgctccggctatggttccttatttctataatgaaggttgtgaactaacaggtgatgtaaaagaagttgctgctcctgtaacaagagctgatggtgctgttgcagctgatattcagaaagcattcttatcaaacgctgctaaggctctgaacatgaatgcagggtttgttcagaagatcggttatactcggattagtgtattgaatggttatagcatcttgggttatacaattaaaggacaattggtttctaagaaactgacattcttgatctctggcaaatattatgaaggtatcgtttcttatcagaagagcgtaatgatctatcctaactattacagccacgattctcatgattctcatgattctcacggtttcaacccgaatgccggtggtggatctaacgactaatcagagtaaagtaattgttgagaattgaaaagtacgagttgaaccgaaagtatagaaattgcagataatgatgaaaaagatatttcttataggcttgttcctttgctgtcatttggcactttcggctcagttgacgtacggaactaccggtctgcttcatgccccgtcagcagagatgcaacgggataagacggtaatgatcggtggaaattttttaaataaggagataactcctcctacatgggattaccatacgtataattactttttgaacgtaactatctttccctggctggaaatagcttatacatgtacgttgtttcagtcgcagacgatagggattgattggaaggtcggaaagaagaagtttacgaatcaggacaggtatttttctgcccgtttgcgagttttgaaagaaggacaattgtggaagtacatgccggctgttgtagtgggaacttcggatccctataccgagtctggcgatggccaagtaggttctgctgatggtaatggctatttctgccgtttttatgtcgcagccaccaagcatatcccgattggaaaggagaagataggtgtacatctgtcatatctgtacaatcgaagagtggattaccacttgaatggattagccggaggtcttacttacgctccatcttttgcccccgatctgacagtaatcgcggaatatgatgcgaaagactttgcgtttggtgctacctatttgcttttcaaccatttgcatgcgcaggtagaattgcaaagaatgaagtattttaccggcggacttacttataaaatctatttgaagtaagagagtgggtcggagcaaataagaaactaaaagagttgaaaatatttaaaaacaaaaaacaatgaaaagtaaattagtaatattatctttattgttggccggtgctactgcagctactgctcagactaaagagacgttctacagcgaaagcttcaaggacaatatctttgtgagtgtaggtgttggcgctcagggttgtgtaaacccggacaactttgattatggctttggtaaagccataactccgctgatcaatgtgtcagttggtaaactgttcaatccggtttggggtatccgtggtcaggtagccggtgcatggactactttgtattctaactatggacagcctgccgatacttatattaagagcaagaataaacattacttcactatgcgtgcagacggtatgtttaacttgtccaatgctattggcggttacaacccggatcgtttgttcaccgtttctgtttttgcaggtcccggtttgacatttgccaaagcttatggcgatcaggataaagtaaatgcgttgattaacggttctgttggtttggctggacagttcaatatcaacaaatacttggatatcaacattgaagcaagaggagaagtttctccgtctccgtttggtaatatcagctctgcccataccgatggtgctgtttctctgactgccggtgtgacttacactttcggtggcaagagatttgtttcttgtggctctcaggtagatcagaacgctatcaacgaagagttgaatcgttacagaagcgagttggctaaagctcagtctgacctggctgatgctaagaacgcactggctaacgtgaaacctgtaaccaaagaagtggtgaaggaaatcgaagtagccggacctcgcgctatcttcttccagattggtaaatctaagatcgatgactatggtatggttaacatccagctggctgccaagatcttgaaggctaatccggataagaaatacaaggtggcaggttatgcagataaggctaccggtagcgctaagtggaaccagaaactgtctgaagctcgtgcacaggctgtttatgatgcacttatcaaagaaggtgtaagtaaggatcagcttgaactcgtcggcttcggtggtactgccaatatgtttggcaagaacttcctgaaccgcgttgtgattctggaataatacaactttataaggacgatagtccgataaattttagaaagggtatccgaacaacggataccctttttgttgcttaaataggcgataatccaaattttaatcgtatttttgcaatccaaatatgagtagaatagtagcaatagattacggacggaaacgtacaggtatagctgtgagtgatacgatgcagatcatcgctaacggtttgacaactgtgcctacacacgagcttctggatttcattactaattatgtgaaacaggaatcggtggaacgtattattataggtctgcccaagcagatgaataatgagctctctgagaatatgaagaatatagagccttttgtgcgttcgctaaaaaaacgtttgcccgatatgcctgtggagtatgtagatgaacgtttcacttctgtcctcgcacatcgcacgatgcttgaagccggactgaagaaaaaagacaggcaaaacaaggcattggttgatgagattagtgcaactattattttgcaatcttatttggaaactaagcgtttgtaaaaagagagaataattaaaaagaataattttaagatatgattttacctatttatgtatatggtcaaccggttctcagacaggtagcggaagatataactgtggactatccgaatctgaaggaactgattgaaaatatgtttgaaacgatggatcatgctgacggggtaggacttgccgctcctcagattggtttgcctattcgtgtcgttgttattaatctggatgtgctttctgaggattatcccgaatataaagattttcgcaaggcttatataaatgcccatattgatgtggtagagggtgaggaagtatctatggaggaaggttgtctcagtttgccgggtattcacgagtctgtgaagagaggcagcaagatacacgtaagatatatggatgagaattttgtagaacataatgaggtggtagaaggatttctggcacgggttatgcaacacgagtttgaccatttggatggaaaaatgttcatagaccatatctctcctctgcgtaagcaaatgataaaaggaaaattgaacacgatgctgaaaggtaaagcacgcagttcttataaaatgaagcaggtgaagtgatatgcctgactctttgaaacatttgaaataaaagtaacgggtaaagttgatcgacacgatcaactttacccgttacttttttaggaaatatcctgagtatctgtcctgctcggaagtgttatggttgttttaaatatactatcatcattaccgggttatcgtcttccttcaatccttttaatggttcgatttggaggatggaaggagttttttcagccttttcaagaagttcaggagcttcccatacatataacagcgtatggctgtcaagtgctgttatcgggcgtaatggcagacctggagtcaagtcattctttatatggcctgtggatactttaaaacagtttttggcctttttatcgtaaatagccatttgtttttcttgcgctttctctcctgcccaattagagtaaggcatgaatatgtaagagtcagtctctatggtattgtattggatgtaaggagcagctacttcctgaaagcgcttcccatcgccgttcagatattcaaatctgcactctatcggtaaagagtacttacccatttggaatatatatcgaggctccaaagtttcttgggtaatagtaaatagagtatcgttataatattctttataacaggtatggcttttgtaatggaacatataacgatctatgtcactgctgatcatccagcgatatttactgtttaagtcaaataggtcccaacgattgaaaattttcaatgtgtcacctttcagattagaaaggtaaatacgttctttacgttttccgttattattgcgcatgaatgttgcagcaattgtatcctgaacacgtaacatcgcaaactcacttacttctatattaggaactttcattgcacggatgaatttacctgtttccatagaatagatattgattttccccgtagttgttaacatgtagaccaatccttttttttcatccacatcgatctgcatgatccagttaaactcacccggtccgccgcctttgcgccccagtgtccgtatgaatttaccatcttttgtgtactgaaataatttatcgatccatggtaggaagaaatattcttttgtccggatgatattgcttccctttaaccctcttatcaggcatttattgttcgtttccaacgggatgtaccgaatcgaatcggcaatctcactcaatagtatctcttgttctgtttcgatgcctgtttcaaaaggtacaatttgtggaaattcgggtttaacgatttggactgcggtgtcagacaactgtccgctgttcttttttcctccgcaagatagtagcagaaagggtagcagtaaaagaagtgatttttgtctcatgttgattataattaggtgtataaaagtataattcgcaattagtcttttttattcagtgttttccatcttcgtatgatctgattcgtttctcaatttatggctatgttacaaacgtacgtaataatcgtaattaaataaggaataggtcgttaattcatgttaaggatggttgggaggtactgaattttttttatcaaacggacttataaaaaaatcaaaaaatataaaaagttgcccgtaataccggtttaatagatgaaaagcattacttttgctctacttaaaaagtaatcaaaagccgatgattaaaaagatattagcagcattattgttgtttcctacatttgcatatgctcagataaacacagacagggtgatgatgattgcccgaaacgcgttatactttgaggactatgtcctttccattcagtattttaatcaggtgattaatgcgaaaccctatttgtatgaaccctattttttcaggggacttgccaaaatcaatctggatgattaccagggggctgaagccgactgcgatgcggctatcgacagaaatccttttgtagtgggggcttatcagattcgtgggttggcaagaattaagcagaataaatacgatggtgcaattgaggattataaaaaagcgctccactttgatccggagaatattactctttggcacaatctgaccttatgccatatacaaaaagaggattacaaagctgctgaagatgatttaggcaaattgcttgcagtcgctccgaagtatacaagggcttatctgatgcgtggagaagtcgctttgaaacagcaggatacgttgcgtgctctgaatgactttaatacggccattgagatggataaatatgatcctgatgcctgggcttcccgggccatcgtcaggttgcagcaagggaagtatgccgaggctgaatcggatttaaatcacgcgacacatttgaatgctaaaaatgccggaaactatattaaccgtgctttggcacgcttccaccagaacaatctgcgcggtgctatgagtgactatgacctggctctcgatattgatccgaacaactttatcggacactataaccggggcttgctccgggcgcaggtaggggacgacaaccgtgctatcgaggactttgattttgtacttcagattgaaccggacaatatgatggctacatttaatcgcggattgcttcgtgcccagacaggtgactaccggggcgccatcaaggattatacaaaagtgatcgatgtatatccaaacttcctggcagggtattatcagcgtgccgaggcacggagaaagattggcgaccgcaaaggtgctgaaatggatgaatttaaagttatgaaagcgcaactcgataaacagaatggcgtaagcaatgctgataaatcggtggcagacaataaaaacggtaataacaaagacgagaataaaactcgtaaaaagtctgataaggatatgaataattatcggaaaatcgttattgcagataattctgaggtggaacaaaaatataagagtgacattcggggccgggtacaggatcgtaatgtgaatattaaaatggaaccgatgtacgctctcacttactacgaaaagatgagtgatgtgaagcgggccgtgcattattataaatacattgatgatttaaatcgtgccggtgttttacccaaacgtctgtatatcactaatatggaatcgccacttaccgaagaacaggtaaagttccattttgcactgatcgatacacatacatcggctattgttgaaaatcccaaagatgcgcgcacacggttttctcgtgctctcgacttttatctggtgcaggactttgccagctctattgaggacttgactcaagccattttattggatgacagtttcttccccgcttattttatgcgttctttggtgcgttgcaagcaattggaatatcaaaaagcggaagaagctaatgccgcttcggcaacaccggccacattgccgggtatttccgctccgcaaaaatcggaagtcagtgcattggattacgacattgtgaaaagtgacttggatcatgtgatcactttggctcctgattttgtttatgcttattataatcgggcaaatgtgttggctatgctgaaagattatcgtgcggcgattgccgactatgataaagctattgaattgaacaaggagtttgcggaagcttattttaatcgtggattgacacatattttcttgggtaacaataaaaacggaatagctgacttaagtaaggccggagagttaggtattgtttcagcatataatattctgaaacgatttacagaggtgccggaataacattttttagacaaaaaatagtaaactcaaaaagaaatccttatttttgcgtgcaataacgaaaaatataacataacattatgataaaaataacatttcctgatggctctgttcgtgagtataacgaaggagtaaacggactgcaaattgcagaaagtatcagttcgcgtttggcgcaagacgtactggcgtgcggagtgaacggtgagatttatgatttaggacgtcccatcaatgaagatgcttcggtagtactctataagtgggaagatgaacagggaaagcatgctttctggcacacgagtgcccacttgctggctgaagctttacaggaactgtatccgggcattcagtttggtatcggtccggctattgaaaacggtttctactatgatgttgatccgggagaggctgtcatcaaagaggctgatctgcctgccattgaagcgaagatggctgagttggttgcaaagaaagaggctgtcgtgcgtcgggatattgcaaaaggcgatgctttaaagatgtttggcgaccgtggagaaacatataaatgtgagctgatttccgaattggaagacggacatataactacatatacacaaggtgattttacggatctttgccgtggtcctcacttgatgacaactgctcctattaaggcgataaagctgacttctgtggcaggagcttactggcgtggccatgaagatcgtaagatgctgacccgtatatatggtatcactttcccgaaaaagaagatgctggatgagtatctggctttaatggaagaagctaaaaaacgcgaccatcgtaaaattggtaaggagatgcagttgttcatgttctctgatacggtgggtaaaggattgcctatgtggttgccgaaaggtactgctttgcgtttgcgcttacaggacttcttgcgccgtatacagactcgttatgactatcaggaggtgattactccgcctatcggtaacaagctgctgtatgtgacttcgggacattatgcgaaatatggtaaagatgcattccagcccattcatacaccggaagagggtgaagaatacttcctgaagccgatgaactgtcctcatcattgtgaaatttataagaatttcccgcgttcgtataaggatttgcctttacgtattgccgaattcggaactgtttgtcggtacgagcagagtggtgagcttcacgggttgactcgtgtgcgtagttttactcaggatgatgcacatattttctgtcgtccggatcaggtgaagggagaattcctccgtgtaatggacattatttcgattgtgttccgttctatggatttcgataacttcgaagcacagatttctttacgcgataaagtgaatcgtgaaaaatatatcggtagtgatgaaaactgggaaaaagcagagcaggccattattgaagcatgtgaggaaaaaggattgaaggcaaagatagaatatggtgaagctgctttctatggccctaaattggattttatggtgaaagatgccatcggtcgccgctggcagttaggtactatccaggtcgactataatttgccggagcgcttcgaactggaatatatgggatcggataatcagaaacaccgtccggtaatgattcaccgtgctccgtttggatctatggaacgctttgtcgctgtattgattgagcatactgccggtaaattcccgttgtggttgactccggaacaggtagttattctcccgattagtgaaaaattcaacgaatatgcagagaaagtgaaaacttatctgaagatgaaggaaattcgtgctattgtagatgatcgtaatgaaaaaatcgggcgtaagatacgcgacaatgagatgaaacgtattccgtatatgctgattgtcggtgagaaagaagccgaaaatggggaagtttctgttcgtcgacagggcgaaggggacaaaggaaccatgaaatttgaagaatttggtgaaattttgaacgaagaagttcagaatatgataaataaatggtaactttgcgcccaattgtaaaagcacagcattttggtaatgttctaaagacagcttttactttaatacataattaaatttggtagacaataaaaaacaaactggaagtaaacgttatttaatgaagaatgacagcatgaaatcgcaataccggatcaatgaacagatccgtgcgaaagaagtccgcattgtaggtgatgatgtagaacctaaagtatatcccatttttcaggctttaaaattggctgaagaaaaagaactggatctcgtggagatttctcccaatgcccaaccacctgtttgtcgtattattgactactctaagtttctgtatcagttaaagaagcgtcaaaaagaacaaaaggctaagcaggtaaaagtaaacgtaaaagagatacgttttggtccgcaaacagatgaccatgactataactttaagttgaaacatgccaaaggatttttggaagatggtgacaaggtgaaagcttatgttttctttaaaggtcgttccattctttttaaagaacagggtgaggtgcttttgttacgctttgccaatgatctggaagattatgcaaaagtagaccagttgccggtgttggaaggcaaacgtatgaccattcaactttctccgaaaaagaaagaaagtgcaacgaaaaagcctgcaactcccaaaccagctactccggctgcagtaaaagctgaaaaaacggctggagataatgaagagtaagaaaaatgcgtaacgcgcaggtatagtgcgttgccatatcatttaataatttaaaaacaattaagatgccaaagatgaagactaactccggttctaaaaaaaggtttgcccttaccggaacaggtaaaatcaaaagaaagcacgcttttcacagtcacattttgactaaaaagtctaagaaaagaaaaagaaacctgtgctactctacaactgttgatacaacaaatgtaagccaggttaaggaactcttagctatgaagtaatcaaaagcgtacaaagtattattaaagttattaaccgaatgctttagctttaagttcgttacgtgaagtaacggcgctaacattcaaaaaagagaaaactatgccaagatcagtaaatcatgttgcttcaaaagcaagaagaaagaaaattttgaaattgaccagaggttactttggtgcaagaaaaaatgtatggaccgtagctaaaaacacttgggaaaagggtttgacttatgcgttccgtgaccgtagaaacaagaagagaaacttccgtgctctttggatacagcgtatcaacgctgctgcacgtctggaaggaatgtcatattctaaactgatgggtggtctgcacaaagccggtattgaaattaaccgtaaggttttggctgacttagctgttaaccatccggaggctttcaaggctgtggttgctaaggctaaagttgcttaagtttcaacagttttaagatttagaaaatgccgggtacaataatgtatccggcatttttcgtcttaaagactaagtttacatttcaaaaaatagtctaagaaagaaacaaaatttcgcttttccttgtttatctcacaaaaactatctatatttgttgtagtaaaatattagccgcattgattggatcgggaaactcatcaattaaactgaaaaccgagacaagcttcgcttctcaatggcgggccacatccttcgggataactttatagtcggtggattacaaagaggacgggcactcaaatcatgtcattcggagtttcatcacatcatcggtgcggctttttaaataaaaggaagagggcggtaatcatctaaagactaccgtcctttttttatgctgttttctttaatacatatacattatagttatgatattctatttttcaggaactggaaattctaaatggattgcggagcagatcgctaaggcacaaaacgaagtgcttgtttttatgccgaatgccatcagagacggaatagaagagtttgtgttggcggatgatgaaaaagtaggttttgttttccctgtttattcatggggacctccgttgagcgtattgcggttcttggattggattactttatctaattatcattctcaatacgtcttttttgtctgttcctgcggagatgatacagggctgacggaagaattctttcgccgggcattgtctcgtaaaggaatggagtgtaatgccggtttttcagtggctatgcctaataattatgttttgcttcccggatttgatgtggataagaaggaactggagaaaaagaagttggatgaagcagttggcagggtagaagagattaatgattcgataaccggaaagaaaataggttttcattgtaatgagggaagttttccatggtttaaaaccaaagtactcaatccgctctttaatcgttttatgacctcggcaaaaccattttacgccactgatgattgtatcgggtgtaaacgttgtgaaaggatatgtccggttgggaacgtggtgatgatagggtggaggcctgtgtggggaatggattgtacatcctgcctggcttgctatcatgtttgtccgaagcatgctgtgcagtacggaagaaggactaaacgtaaaggacagtatttaaatcccaatgtgagtatttcacatgaggcggccgcccaatagtaataagcgtattgataagtgaaaaaacctttgtatgatctgtttagagaaaatacaaaggtttctttggatagttaatcttttattgtaatccggcaattggataaatcttcgatgatggcaagagactctactcttactcctctttcttcaagtgttttacgcccattttgaaatgctttttcaatgatgaatcccattccaaccagatttgcaccggactgtttgatcaaatcaatgacacctaaagcggcgtttccataagctaaaaaatcatcgacgaataatacgttatctttcggagtgaggaagtcggaactgatgactacttcataatcacggtctttggtgaaagagtgtactgtggtacttagcgcattctgaattgttctgggcgatttttttttggcaaaaacgaccggcaagtccattaaatatcccgtcattatggccggagctattccgctggcttcaatggtcatgatcttattgacgtttgtccctgcaaagagacgtacgaattctacgccaattgacttcattagcactgggtccatctggtggttgatgaaactgtctactttgagaattcccccctcataacattttccgtcctgtaggattcttttttttaataattgcatgatttataatgataaatttaatgtgcctaatataccaatgtatttatgaatggtgtacattggtatatttaggttcattgaatgattatttattgtttctcagatcttttactctgacagctttgccttcgctctgaggtaaagagcctttttttaccaacttgagtttaggcgtaacaagtatctcgtcttttagctggcgggtaatgtctttgcgtatcttttccagttcgatataattgtcggtagaaagatcactcagttctacttctacaatcatctcgtcttgattgttcacagtttcgagcgtaatgagataattgcttcctagttcggggaattgtaccaatatcttttctacttgcatggggaatatatttactcccttgataatgaacatatcatcactacggcctttaatacggtctatccggatatgggtacggccacaaggacagtttcccggtaaaatgcgggtaaggtcacgtgtgcgatagcgtatcagtggcatcatttcacgatcaagagtagtgagtacaagttcaccgatttctccttcgggtacaggttcacctgtctcgggattaatgatttccacataatagcaatcttcccaaaaatgcatgccattctgctcggtacattcaaatgcaacacccggaccattcatctcagtcatgccaaagctattgtatgctttcacgccaagcatgcgttcgatctttttccgctgttcgtctgtatgcggttcagcaccgattacgagcgttttaagggtggtactgcgcggatcgataccttcctcctgaaaaacttcggccaggcggatggcgtagctggggatcgcatgcagagctgttgtcttaaagtcggtgataaacttgatctgacgcttactgttgcctgcagcagcgggtacggtcaatgctcccagtcgttcggctccgtattggaatcccagtccgccggtaaacataccataacctgaactgttttgaaaaacatccgtattacgtatacctacacaatataagcatcgcgcaaccagattggcccatgaatctaagtcatgctgtgaatggacaatgactgtcggtgttcccgttgtgccgcttgaagagtggatgcgtactccgtcttctttcatatttcctgcaacaagtccgaaaggataatttgcccgcatatccgcctttgtgataaaaggcaatttacggatgtcgtctagagactggatactctccggagtaatgccatgctcttgaaatactttcttataataaggggcattggctgctatatttattgtttttttaagccgttggagttgtaattcctgtagcttcttgcgactcatggtctctatctcttcttcccaatattttgtattcatggcttctgatatttatttagataggggggataatatatcaaggtgataatgcgacgattgtttcaatcacattatcaccttttcccatattcaattatctctggttatttcatcgttttttctgcgatctcttttccggcggccaaagcttttaaattcaattcgactattgcatcgcctttccgctggaatatttcacggatactatcttgtatcttttcataatcaatgcctaaaaacgggatagtggcacccaataggacgatgttggcaactcgtgtagaccctaattctttagctactttatctacgttcaatacgactttgtgtggcagtttattaatttctgccataacatctgattcagccggataattggggatattaacgaacggagtttcattcgtgaccaaccaaccctcatgaccgaggtagggcagatatctgagtccttccatgggttcgagtgaaatgattaaatcgcatttacccgaaggaatcaagtcggaagcaatgggctgatcgcttattcggagatttgactgtacatctccacctctctggctcatgccgtgtacttctgcctgtttcatatacagaccatctttaagagcggcctttccgattactgtggcgatagacaggatgccttgtccgcctacacctgataatatgatatcttttttcatggcttacttacttctttttttacgtgctaatgtttgtatacactctctgcgcgggatgataacggatactcctttataattaatttcttcgcgtatgatttgcttcatctcttcatagttctttttcaatggaactactacgcgaatgtgagccggatctacacctaatccggcgcaaatggcttcaaggcgacctgtgccggcagaatcttgtccaccggtcattgctgttgtttcgttgtccgaaatgacgatggtaacattggcattttcgttgacacagtccaatagtccggtcatgcccgaatgagtaaaagttgagtctccgattacggcaacagcaggatggagtcctccatcggaggcacccttggccatggtaatagaggctcccatgtccacacatgaattgattgcgttgaatggggcgtttgctcctaaagtatagcaaccgatatcgctgaaaactttgtgagtggggtattcttcttttagcacttgagtcagtgtaatatacatgtctctgtgcccgcacccttcacacaatgccggcggacgcatttctacaatattcggaacattgaattccgagctgttctctttgccgagcgcacgtgcaaccgtgtccggattcaattcaccgtcttgtgataatgtaccgtcaagacggccttttacttttaatccgatacccagatatcctttcaattgtttttcaacaaatggttgtccgtcttctaaaacaaggatttcgtcgcaagcgtcgattaattgcatcaattgtttcttgggaagcggatattgtccaacttttaataccggatattcgcaaccttccggataattctccattagataattgtaaccgattccacaagctacaataccagttttcttattggggccatcgatatatctgttatatggtgactcttctgatgctttgatgaattcttcctggcgtgtgagtagtactttataacgtttgcgtgcgttgcccgggagcaggataaattggcgcgggtcttcgctgaacgaaatttcgttttgtggcttttgtgctttgttttctacacctgaacgagagtgagccagacgtgtcaccatacgcattagtatcggttcacctatcttttcagaaaactcaaaaccgttgtacaccatgtcataagcttcctgctggttgctcggttcgtacatcgggatcaaagagaaatcgccataaaaacggctatcctgttcgttttgcgatgaatgcatgctggggtcatctgctgctactacaattagtccgccttttacacctgtgatggccgaattgataaaacagtcggcggctacgttcattcctacatgtttcatgcagactaatgcacgtttgccaacaaaagacatacctaaggcagcttccattgccgtcttttcgttggcacaccaacggttgtgtatgttacgctcgctcgtaataggagccatttgaatatattcggtaatttcagtagatggagtgccgggataagcgtaaacgcctgaaagtccggcatccaatgctgcttgcgcaatggcttcgtcgccaagtaagagttgtttgctcatatcttattttcttttggtgttaatcacgtattttgttataatatcgggcaaagatacatttttaagatcattttatcacgggattacttaaaaatctttctttcattcagcgctttccagtattttcttgcattaaccatgtgatctgcatagttggaggcaaaattatgcgtaccggagaaatcttcttttgcgcacatatagatatagttatgctttacataattcaagacactgtccagccccttgggtgatggtatccggataggacccggaggcagtcccgcattcaggtaagtgttatagggagactgtacgtctaagtgttgattggtgattctgcgtaacccgaaatcttgtagtgcgaatttgatagtcgggtcggcttgcaggggcatgccggcatgtaatcggttgatgtacaatcctgcaaccataggcttttctgcattgttgttggtttcttcttctacgatggaggccagcgtgcaaatttcttcaggagtcatccctattgcttgggcctttgagagtcggtctttgttccaaaatttatcatgctctttcttcattcgggctaaaaagtctgctgcactgacatcccaatatacctgatatgtttcgggaataaataagcaggggatggtggcttctgtgtatcccattttttccagaaaaatagagtcgtatagtgccatggcaatttcagcggaatctatcattaactgtttccctacgctgcggactaatctgtcaagtgttcggacacttccaattgtcaggttgacaggagtttgatagcctcttgataatctactgtataattgataagtgttatctccgggtttgatggcataacgtccggtatggatatttttactatattcacggaaatgggacatccatttgaagccattaaagctatgagggtttccttgcttttttattttattgaagatggagtctgtagtatcatcgcggtctatatagatataagttgtcttacttggatgaaactgggggtaaaataggtagtaatagactgttcctgcaccggcgatacaaatgaagaaaaaagtagccagtatgctgagaaatattttctttcttttcttattcatatagaatatctaatggttataaaatcgtgccaaagttaagaagatttcaatgatgattgctctcggataataaatgttttctatctgtttagttattatttgcttttggggactgttggttttttcaattcttatctttcaattgatgtgtttgggtttagatgctccataaggtggtatctatccgactttctatttcattttctaaagaatcggggagtgaagaaaagaaatccagtccggtgagttgttcaatgctgtcaatagagacggcataatttcgtaaaggtgctattgcgcgttcattcttaaaaataaatccgatagctttgggagtggagccgtgaagagagaggatgaccttaaagaactttgatggaacagtcacccggcttttgccgattaccggagattttttattcgtgaccgggccgcaaataataaggattgcactatcggctacagcccattcgcggaccttgtcctccagtgttttccatttccgacggttaagttcgggatgttgcggacatacattgctgaaataaaaggattctttcatggcttcattactccatttcatgtcggcagcaggtgccatatgacctttgtcaaatccggaacgggaataatcagaattgtttgccatacctcctttcacgacaggatcggcgatgaatcgttcgtttctttttatattcccttgtgtcttttgcttggtgagttcgtaagctacccaattggggatctttttatccttattataagacacagtataacctttgtgatgaattatctgctctgttaatgggaattgggaaaccggaatcttcagattttcatcgtgagaataattgggacgtgcaacattcggtcttgatactttggttgcctgaaagaatacagcttgaatttccggtgtacagagatagactccgtagattaatggtgaaatcgcaaatagagctattatccaaaagctcttaaacgaattgtggtgttgttttttagatggtctttttcgcttatttttcatgatattgaaaatttaaagccgggcgtttcgaataatatattgagcgagtcattgttgacactctcagaataactattggggatgatttttgtcgcatcaaaattaatcaatcgatcaagaagtaacaaattaaacaggtagaattatgaaagcggccattgattacaaaaaagcaaatagtgaactaaccggggttgacacattcgagagtatattgagctatattgtagcgacagttatttcaaataagaatattcaagctcatgaaaggagccggaagatatatgaatgaatttgattatatggaagtatagcataaaacgaggaactaatagaatatgcctgcaaatgataccgcctttgtaaaacttttacgcagacggtttatgcattagcggatattatgactctgtttgaactttttttgaataaacttttatataggttttatcgatctgttttgagttccttttcgatttattccctcgtttttattcgtcacataacccgctatgcagctcacaaaacggaaaaatatcttcgaaaacaaatctcaaaacagtttcgagcgaaatttaaacagacctcaaagggcaacgattttttcagcgaatggcttccaggctttgttctgcttgtatgtttcgacaaggttttggggaactcttatcttttgaattcctggcggtacggggtaatagtcggcagtaaccatcgtaggcgacattaatgaaatttcgtccagtgaaacagcatttccgaaagcattgaagtctaatgccttcacacttacgggcaaaataagagtttttacttgacacttgttcagagcacttattcctattttagctatgcttgcgggaattttaagaacagtgagtttaggagaatggttaaaacattcgctcactattgctgccgtcctgtcaacaggcgaaggtgttgtccgggttccgtaagtttcgatggtagtaagttcgggacagttgtagaaagagcggtcaatgtggtaaatagtattcggaagggttactttctgaatggaactgccggaaaaagcctctaggtcaatcacttcacttccttcgggcagagtcaattctttcaagttctttgtctctatgaaagccgatgtacctacaatcttaaaagtggaaggcaaagatatagaagatataccggatttcccgaaagctccgttctgtagctctttgacggaagtatggcttatgtcgataacattcagatcagtacacccgtaaaatgcctcctttccaacaatttccaaagaagcaggcagtgctattttttttattccggaaaataaaaaggcctcttccggcaattccttaatcgatgtgtggcttaaatcgacgattttcagatttctgcaataagcaaatgctgcctgctcaatcgtactcaaagaggcagggaacagaagttcactcgctttgatattcttattttcgaaggcctttgatcctattgtgcgaataccatccgggaaggttattgatgtaaagtcggaattaatgacacttacaactttatctccgtctacttttacaggtaatatttgcacatcaaaagatacttgtttaccatccaattcaagtgtcactatttgaagttgtgccggtacggaagaattgaaaccttgtacccaatcagcagatggagctgaattttcttttatcgtaccatcggcatagtttatttcaagtaccatattactgagggagagaggctctcccaatgtatatacggtttttgaaggtaaagtcttaattgaaatcgcttgaatatcattaatcagcacttgtattttaaaagtaacggtaaaactgcctttgtgtacctctaaaatctgatcgttttcgggtaccgtactgttgaatccagtgacttcgtctttttttacaggaactatttcagacgtttcgtttgaataaaatactttcaatgtcatatcggatacatccaattcttctcctatgaaatatattctttttccaggtagtttatcaatctcgatttttactattgtattaggaattaattcgtttggagagtctttggaacatgcacccaagaaagtcattgacagaaggaaaacataaataaagtaaaactgcttttgcttcatctttttctatttttttttaatgcggacataattatccttaaactaaagaacaagaacaagggaggaaatgttcttgatgccattgagcacaaaatgttttttatgtaatagtaatattggtaatgttttggttaccagtgaatttttcttctactggaagttactctatacgattgcatataaagttattaaaaaagaatacataggatggatgtttttttgttgagatacacaacaagataggaaaatatttcctgctgttggttttgcctttagaatagtaaaggataatattgccataagctatacttttgtgacactccatcagacacttccaatgatttagatgtagttcggtttcacttttttatagctttgtaaactgccctatatatgatgacccttttatatctcttataaaagagccgctagccagacttgaactggcgacctacgcgttacgaatgcgttgctctaccgactgagctatagcggcgtgacactttaccgtttacggcgtgcaaaattacagctttatttttaaaaacaaaatgaatctatacttttttcgtgataatttctctgaaatgtttataaaataaaaaggttagggattaaattagaaaatagttgtagattcaaatatttaaactcatatttgcatatttactgataaatctacttttatattactatgaatatacgattttattataagtatctttcatcgcgagttgcttcaaaatggctgatacttgctgtcgatgttcttttagtgatcttttcaatgtttctggcaagccttttgcaaataggtctgtcggcattagtctttgagttttcgttgtgggtgtggacaacactgttttgtgtaatattcaatgtgtgcttctttcatctgaatcgtacttatgtaggggtcattcgatattcttcctttattgatatttctcgtattttcatttccttaactttgggatatttggttacctgtgtaggcaatttgctttggatggggtggagtggacgagaagtattgccgattagtgttattcttacagcttatatcgtcaatttctccttgatggtctgtttgcgtattttggtgaaaatgatccatgagttgatgactttcgatcgtagacatagtattcgggtgtttgtttatggttcgaagggatctggtattaatattgctaaatcattacgagttagtagaagtaatcattttagattaaaaggatttatttcagacgatacaggctttatagggaagcagacgatggggtgtagggtatatgcgaataatgaatctctgtttgatattttagaagaagagagaattgaagctattattgtttcttctgagaaagtgcaccgacttgaaacctccggtatgattgaccggttgatagccgaggatattcgtattcttacagttcctccattcaatgatctgggaaaggaaggtatgcaaataaaggatattcagatagaagatttgttacagagagaccctattcatgtagatattcgaaaaatatcttcccatatagaaggaaagagaataatgattacgggagctgccggttcaattgggcgtgaaatggtgaggcagatagccggattgaatccatataaattaattttggttgatcaggcagaatcacctttgcataatgtacaattggaactgttggataattggcgggatattgatgctaaaatgctggttgccgatgtgactaaccaaacgcgaatggaatcaatctttaaagactatcgtccgcagtatgttttccatgctgctgcctataaacatgtgcccatgatggaagataatgtatctgaagccatacaggtgaatgtgttgggtactcgtattatggctgacttagctgtaaaatatggtgtggaaaagtttgtgatggtctctacggataaggctgtcaatccgactaacgtaatggggtgtagtaaaagacttgctgagatttatgttcagtctctcgcacatcaattatctaaatatgccaatgatggggcattagtgaaatttatcacaactcgttttgggaatgtgcttggctcgaacggatctgtgatacctagatttaaacaacagatagagaaaggagggccggttactgtaacgcatcctcaggttatacgttattttatgactattccggaagcgtgccaattggtattggaagcgggaagtatgggtaatgggggtgaaatctatatttttgatatgggcaatcctgtgaagattgttgatctagccagaagaatgatctatttgagtgggcagaaaaatataaaaatagagtttaccgggttacggcatggtgagaagctatacgaagagttattgaatgtgaaagagttcacttgtcctacctaccatgaaaaaataatgatagccaaagttcgtgaatatgattatgaagaggttaagcaagaaattcaaaagttaatagatttgagctatacttctgacaccatgggaattgtcgcttctatgaaaaagatagttcctgaatttgtaagcaagaattcggagtttgagatattagataaagcctctttttaatctattttcgaaaacttaggaatgaaataaatgtatattatgaaaataatatattacctttgtggccgatttataatttattagaggaacactaaagattaatcagaatatcttatgcgtagatttattacactattcttcttgatttttaccttgtccggagtggctgtagctcagcaaatgtccgatgatcaggtcgtgcagtatgtaaaagatgctcaaaagatgggtaaaactcagaagcagattacaacagagttgatgagaaggggcgttacgaaagaacaagtcgaacgcattcaggaaaaatatgaaaatggaagtggcagtaccggtacacagaacaaccagaactcaacaaggtcgcgtacgcgtactcagcaaaatgatgaaagtgattactctaatcgctctcaaaaaaatctgaaagatcagaaaaatcaaaagaaccagaagaaccagaagaatataaaagggcttcgtcagtcgaacaaccagaaaaacaagcgtggaatgggagatgagaatctggaaatgacagatgaagacatgatgaatgaggaagactggtctgacgagtacaccgtgaagccggaagaggatccgactcaacaaattttcggacataatatttttacgaacgagaaccttacatttgaacccaatctgaatatagcaactcctgtaagctatcgtttgggacctggagacgaggtgattatagatgtgtggggagcttctcagactacaatcagacaaaccatttctccggagggtagtattttagtcgataatcttggtcctatttacctaagtggaatgactgttcgtgaggctaataatgcggtacgtcgtgaatttgcgaaaatctacgcaggtatatccggcccgaatcctaatacttcagttgatctgacgttaggcaatatccgtactattcaaattagtattatgggagaagttgctgttccgggtacttatgcgctctcggcattctcttctgtattccatgctctctatcgtgccggtggtgttaataagataggtagtttacgtagtattaaagttgtgcgtaacggcaaaaaaatagcagatctggatgtttacgatttcataatgaaggggaaactgaatgacgatgttcgtttgcaagacggtgatgtggtcattgttgatccatatgaatctttagtgcagattaccggtaaggtaaaacgtccgatgttttatgagatgaagccttctgagacaatggctactattttaaaatattcaggtggtttcactggggatgcttataaaaaagctatacgtttaattcgtaaaacaggccgtgagcatcaggtttataatgtagatgaaatggattattcggtatttaaactggatgatggagatgtgctggctgtggattcggtattggagcgttttgaaaaccgtgttgaagtccgtggtgctgtttatcgtgccggtatgtaccaaatcgatggaactgtaaacacagtaaaacaattaataaagaaagctgaaggagtgagaggggatgctttcttaaaccgtgctatcatcgatcgtgagaatgatgatcttactcatgagatgattcaaattgatttaaagggattgttgaatggtactgtagctgatattcctcttcagaaaaatgatatcctttatattccgagtattgaagatttgaaggaggaagcaacccttacgattcatggtgaagtagccaatccgggtacttatttgtattcatccaatatgtcggttgaagaccttgttctacaagccggaggattattagaggcagcttcgacagcccgtgtggatgtgtcccgacgaataaaaaattcaaaaagtactgaattgagtaatgtagttggtaagactttctcttttgaattgaaagatggttttcttgtaggaggtgatcaggatttccatttggaaccttttgacgaagtatatattcgtcgtagccctgcttatcatcaacaacaaaatgttacggttggaggcgaggttttatttggtggacgttatgcgctatcaaagaagaacgaacgtcttagtgatttgatttctaaagcgggcggtattactcaagatgcttatgtgaaaggtgcccgtttgattcgtaaaatgacagaagaagagttgcgccgcaaggaggatgcacttcgtatggctaataagggtggagctgattccatttctgttaagacccttgatgtctctgatacttattctgtcggtattgagttggaaaaggctttggctaatccggggtcagactttgatatggtattacgtgaaggcgatattttgtttgtgccggagtatgtaagtactgtcaaaatcaatggtgctgtgatgtatcccaatacagtattatataagaaaggcgaaagtttgaaatactatattaatcaggccggtggttttgcaagtcttgcaaagaaaaaaagagcttttgtggtttatatgaatggaacagtgtctcgtttacgtacgggaaattctaaagcgatagaaccgggctgtgagattatcgtgccaagtaaagatccgaagaagagaatgtcggcagccgaaattataggaatgggtacttctgctgcttcattagcaactatgattgcaacgatggttaacctctttaagtagtaataactatgactgaagataagaatataaataaaacgactccgcaatctgaggaacaagaaattgatctgatagagttggctcagaaagtttgggccggtcgtaaattagtattaaaggtttgtggtgttgccgtgttagtaggacttgtagtggcttttagtattcctaaagagtattctacaagtgtaacactggcaccggaaacaggtagcaagtcttctactggaggcatgggggcattagccgctatggccggtattaatcttggcagttcaaccggagaagatgcactttctcccgaattgtatcctgatattgttagttccacaccttttctattggaaatgttcgatgtgaaggttgctgatcagaaaggcaagattaatacaactctgtatgagtacttggataaatatcaacgggctccttggtggggagcggttgcatcagctcctttcaaagcattaggttgggttgtatctttgtttaaagatgcaccggaggaacagggagatgcaaagatagatcctttctatttgactgcagatcaagctggaatagcggatgctttgagtcatcgtatatctgtttcggtagataagaaaacaggagtgactacacttactgtgacaatgcaggatccattaatttctgcagcattaacagatacggtaatgcattgtttgcaaaattatatcacagattatcgtaccaataaagcgcgtcatgatttggcttttactgagaaactatttaatgaagctcaggagaactactatgaagcgcagcagaaatatgctcgttttatggatggtaatcaaaatatcattatgcaaagttttcgtacagagcaagagcgtttgcagaatgagatgaatttagcttatggagtattcactcaagtgtcgcaacaattgcaattggcgaaagctaaagtacaggaaataactcctgtttatactgtagtacaacctgctacagttcctttgagaccggctaaacctaataaaatcatgattttaattggttttgtattcttagcgggtgtaggtagtataggatggattctctttgttaaagatttattgaacggatggaagaaacagccagaaaaataaaagaaaatacttcttgctggtatgctgtatatacagcaccgagagcagagaagaaagtgaaggaacagctggataagataggcgttgaaaactatttgcctcttcaaccggtagttcgtttgtggaacaatcgcaagaaaaagattttcattcctgttgttccgggatgtctatttgtgcacatctcctctgaggagattgctcatgtagccggtattcatggagtagcttttttactgaaggaaaagggacaatatgtttctataccggaagttcaaatggagactttcaagactatgatagagcactcttgcgaactggtcgagtttgcgccaaatgagtttgttcctggaaccatagtgcgagtaataagtggacagttacaaggattggaggctgagctagttgattgccaaggaaataataagttgttactgcgagttgaagggttgggatgcgctttggttacagtctcaacggattgtgtagcttcaaaagaggaataatgaaactgattaccgaagggcttcttgataaagtgactgatcgggcaaaagagaattcacgcctgcggatgaattacaatttccatgactccatggatgctcctattcacaggatgttgaatgctttggagccgggaacttacttgtcgccacatcgtcataagaatccggataaggaagaagtttatcttgtattgagaggtagcttgttggctatcctgtttgatgatgagggtaatgtaacggaaaaggttcatttgaatccagctgagggacattatggaattgagattcctccctgtgtatggcatactatcgttgtcttagaatctggaaccgttatttatgaaataaagcaagggccttttgctcctcttattcctgaaaatttagcatcttgggcacctcctgcaactgatgaggaggcggcccgagtatttatacagcgaatgcttgagctttaacactcaaacattctgctccttgcaagcatgcaagctccgacaataccggctctgtcttttagttttgaagtgacgattgccgagtctttattgaccagattaagtgagtacttgcggacagctgtttttattggttgagtaatgtagtctcctgtcagcgaaattgttcctccgataatgacaagttccggattaaaaagattgataagtccggcaatttgtttgcctaatttctgcccgatttcttccactatttcaatacataaaagatcttccttgtttacagaagcaatgatttcatccaaggttataggattgttaatgtctcctatacgattggataagattgagttttcaccattttgtatacgttccagcaagatgcggtgtagcgcagatccggaagcttctgtttcgagacagccttttttgccgcagtggcaaataatttcattgtcaaaggtactggtgtggccgaattctccggaaaatccggattttcctgtataaattttgccatcgatgatgattccaacacctagcccccaactgatatttacgaagataatatctttttcgccatttacacacccctttaggtattctccataggtcatggcgcgcgtatcattatctattgttaccttataccctaatttttcagctaaaacttcagataatgggcgttcttcaaaattgaattgactaaaactatatccggattccggattaacgcgtccggaaacatttacattgatatttaatattttgtctttagctattgtcaacttcttgataaaatttgaaatgagtttgcataactcattcaatccttctattgaattttcaaatttataaggaatattcattttaagttccatcatatcacctttgaagttgatcaagccgatattaatggcaaatcttttgatatcgactcctataaagtagccggattcaggatttaagccatataggttagggtgccgtcctccacttgtttccaatttaccatagtcgttgatataaccttcttcgcacatttcactgataaacttagtgactgtagggacactaagatccaattctttagacaggtcggtaattgttgaactgccattatatatataatgtgtaataattttctttttgagaagagcgcttttggtacctagttctatttcttttaaaagatgttgtttcatatagattaataattttggtaatatctacaaagatagttaatttgtttattaatttagggtttataaggtgaaaagatgtttctctattgtttttaattaataataatagtgaatgaattttattaagtagatctttggaatctctttttattaataaaatattttattatatgatgattgtttaataaatatgcgtatatttgtagcgatatactaaggatatcaagagtgtattatgaaaaactgttcccaatctatattaaaaatctatatcattaatataaaaacgaaattatcatggaaaagattattggattgatcaatgccccttttactccgttttatgaaaatggagaggttaattatgaaccaattgaagcgtatgctaagatgttagtaaagaacggactgcaaggagtatttattaatggatcttccggtgaaggatatatgttgaccgatgaagaacgtatgaagcttgctgaacgttgggtagaagtttcacctaaaggatttaaggtgattgtacatgtaggtagttgctgtgtaaaatcaagtcgcaagcttgccgaacacgctcaaaaaatcggtgcatggggaattggtgccatggctcctccttttcctaaagtaggtcgtgtcgaagagctggtgaagtattgtgaagaaatcgcttgcggtgctcccgatcttcctttctattattatcatattcctgcatttaatggagcattcttgtcaatggttgctttcttggaagcagtagacggtcgtattcctaactttgccggaataaaatatacttttgaaagtatgtatgaatacaatcagtgtcgtctgtataaagggggtaagtttgatatgcttcacggacaagatgaaacgatccttccatgcctagctatgggaggtgcccagggaggtattggcggaactaccaactacaatggtgtaaatctggttggtattatagaagcatggaaagcaggtgatcttgagaaagcacgtgaattacagaatttctctcaggaagttattaatgtcatttgtcatttccgtggaaatatcgtaggtggaaaacgaatcatgaagttgataggattggatttgggtaaaaatcgtactcctttccagaatatgacggacgatgaagaagtacgtatgaaggctgaactggaagctattcatttcttcgatcgttgcaataagttttaagataaactaatactgcgattgttatgaatactacagaatatttacagacttggtctgactcttataaaaatgacatgataagcaatatcatgcccttttggatgaaatatggttgggatcgcaagaacggaggtgtttatacctgcgtcgaccgtgatggtcagttgatggataccaccaaatctgtttggttccaagggagatttgcttttacatgttcatatgcatataatcacattgagcgtaatactgaatggttggcagctgcgaaaagcactctcgatttcatagaagcatattgttttgatacggatggacgtatgttttttgaagtaaccgagaccggattacctattcgtaaacgtcgttatgtcttttctgaaacatttgctgctattgcaatgtccgaatatgccattgcatcaggagatcatagttatgctgtaaaagctttgaaattgttcaatgatatccgtcacttcctttcgactccgggaatcctggagcccaaatattgtgaacgtgtacagatgaagggacattctattattatgattcttatcaatgtagcttcccgcattcgcgccgctattaacgatccggttttggatcggcaaatagaggagtctatagcgattctgcgcaaagactttatgcatccggagtttaaagctctgcttgagactgtaggtcccaatggagagtttatagatacgaacgccactcgtaccattaatcccggccattgtatcgagacctcatggtttattttggaagaagccaagaaccgcaattgggataaggaaatggttgatacagcacttacgattctggattggtcgtgggagtggggctgggacaaagaatacgggggtattataaatttccgtgattgtcgaaacctgccttcacaggattatgcccatgacatgaagttctggtggccacagaccgaagcgattatcgcaactctatatgcgtatcaagctactaaaaatgaaaaatatctggctatgcataaacagatcagtgactggacttatgcccattttcctgacgcagagtttggtgaatggtatgggtatctccatcgtgacggaacgatttctcagcctgcgaaaggaaatctgtttaagggaccattccacattcctagaatgatgacgaaaggctacgcactttgtcaggaattactgtcagaaaaataacctcttatttttatcatgaaaaactcaaaaatttatccttggatagtggttgccctcctttggggggtagccctactcaattatatggaccgacaaatgcttagcacaatgaaagatgctatgcaggtagatattgtggaacttcagtcggcaaccaattttggccgtttaatggctgttttcctttggatttatggccttatgagcccgatttccggtatgattgccgatagattgaatcgcaagtggctgattgtcggcagtctttttgtctggtcttttgtaacctatttgatgggtattgcagaaacatttaatcaggttttttggctgcgtgcattaatgggagtgagcgaagctctttatattccggccggtctttctcttattgccgattatcatactgaaaagtcacgttctttagcggtcggtatccacatgactggtctttataccggacaagctattggtggatttggagctactgttgccgctgctttctcatggcataccacattccattggtttggtattattggtattgcctatgctttggttttggtattatttctgaaagataagaaagaacacgttaaaacagaacgtttgaaaccttcatcaaagaatggtgaaaaagctggcttgtttaaaggtttgtcgttgctgttcagtaacatagctttctgggtgatattactttattttgcagcacctagtttgccgggttgggctactaagaattggttgcctactctgttcgctgaaaatcttgatattccaatgtcacaggccggacctatgtcgactatcacgattgcattatcttcatttattggcgtgattctaggtggtaccctttctgacaaatgggtacaaaagaacatccgtgggcgtgtatataccggtgcaataggcttgggattgactattccttctttattgttattgggattcgggcatagttttgttgctgttgtgggagccggattattattcggtatcggttatggtatttttgatgctaataatatgcctattctttgtcagtttgtctcttcaaagtaccgtgcgacagcatatggtatcatgaatatgaccggagtatttgcaggagcgtttatcacggatttgttgggtaagtggaccgatggaggaaatttaggtttaggttttgccatgttagctatcattgtatttattgctttggcagtgcaactctacttcctgcgtccgaagacagataatatggaataaaaaaataaaaggaaatgattgtatctaatttgcaaaacagtcaacgggtggaaggactccacccactgtttaaaactctgtttgattacgtaaaaacacatgatttatttcatgccgaattaggacgaattgagatagatggtgataatttatttatcaataacgtgaatcctgagtgtgttgcacgtgacaagcaagttttggaactacatcgcgattatattgatgtacatattttgttggaaggtactgagactattggttggaaggctatcgaagatctgaaagatgaagtgaaaccttatgaggcgaacggtgattgtgctctttactctgatgcacctaccacctttgttgatttgcttcctgggcaattcatgatagtatatccggaggatcctcatgctcctcttataggacaaggtaagattcgtaaattgatagcaaaagttaaattgtagttagttaaaacatatagttgagttatataattaccatcctaattattaaatattaataattagggtggttttttattgtcactcatgttgtaaacttatatcatcattactggagttgtaatcttatatctgtataagggggaggggaggaggaaatgttttggtgttgcaaaatactactttgatgttatatatgacttataatcagcattatcctgcttttacagtgttcgtgttttaagtgggggaatgactattatgatactgttctaaatgaattaaattcgtacatcatacattgataataaatgtgttgatatggggttaagtggatgatttataggcatataatgctattgcttatttagtaatttgagggtgataatttgatgtggttccgatagaacttagtttaaataaccaaaaacacatataaacatctttattattaactcaaaaagcaatacttatgaagaaaaccatcttcttgattttgtgcattttatgttctcttggagccatggcacaaaagaaatcaatcacaggtgtggttacggatgctagcggtgaatcagtcatcggagcgagtgttgtcgaggtcggtaccaccaatggtgtgattactgacattgacggtaagtttacattaatggtcgatcctaacggaaagatcaaagtttcttttgttgggtatcaacctcagacaatcgatgtgaaaggtaaaggttctttcaatattcagctgaaagaagattctgaaatgttggaggaagttgttgtaacggggtatggtggcaaacagctgcgtacgaaagtgacaaactctatcgctaaagtaaaagaagagaccttgaaacaaggtatgtttactaatccggctcaagctctttcgggtgccgtagcgggtttgtcagtaagccaaacttccggtaatccgggcagtgctccaaccttagtacttcgtggtggtacaaactttgacggttctggttctccacttattttaattgatggtcaggtacgttcttctttaagcgatattaatcctgatgacattgaatctatggaagttttgaaagatgccggtgcaacagctatctacggtgcacgtgcaaatgacggtgtagtacttgtaacaaccaaacgtggtaaatctggtagagcagaggtgaatctgaaagctaagtttggtttaaactatttcaaagattcctataactttatgaatgccggcgattatctttattggatgcgtacaggttatatgaatgcttacgttggagatatgaaacatccggacggtgccggcataaaaggatggtcttctttaagtggactaacgactgcaactccttacggaacaggtaacctgtattttgacaaagatggtgtaacgccattagacggaaataagacaagctccgctatatggagtccgatgctatattcggataatttatcattcctgcttgatcagggatggcaaaccatgatagatccgatatatggtgataaaattatctataaaaacaccaatattgccgacttcaatatcaataccccatcattctctcaagattataacttgagtgtcagtggtggtaatgataaaggtaactattatgcaggtttaggttacaataaaagtgaaggtacggcagtgggaaactggtaccaacgaatcacctttacttttaacgcagattataaacttaaagaatggttgacttctaattcaagtttcaattttgcggatgcgacttggaatggacttcctgcatcacaaacagctgaagcaaactatttctcacgctgtctttcattacctcctacgttccgaggctacaatgcagatggtgatatgttgttaggcccgaactccggtgatggtaatcagcaatacaatttcaagcagtttgtccgtgataataatacggataagtttacaatgaatcagtctttcacaatcgatttcatgaaaggtctatcattgaaattaggggctatttggtattattctgaagaaaaaacagaagctttcaataaagattatttgagttctcccggtaatttgattacatctcattctacttctgcttcatacgcacgcactcttgaccaaacatataatgcagtgttgaactataattatcagatcaacaaagataacttcttggatgcaatggttggttttgagtactatgattcatacagtaaaggatttagcgcttctggttccggggctcccactgatgactttatggatttggaatacacttccaaagaggaaggtaagcgttccatagactcttcacattctcgtcaacgcattatgtcattctttggacgcgttaattatgactaccaatccaagtacctactttctttggttttgagacgtgacggatattcaaaactggccgaagagaaccgctggggagtgttcccgggggtatcagccggttgggtattcagtaaagaagaatttatgaagaatacagcatctattctttcatttggtaaattacgcgccagttttggtttaaatggtaatgtaaacaagaactttgttggtaactatacagtgcaaggtgcttatggaagtaatcgttataatggttcaaccggtttcttattgagtagtattcctaatccctatttgatgtgggaaaaatcgagaacttttgaagtaggtctggatatgggcttcttagaaaatcgaatcaatgccaatttaacttattacaatcgtctgaccagtgataaatatgctaatatcacagttccttccacttcaggtgtaagttcggttacttcaaacaatggtgagttccagaatcaaggttttgagtttgaattaggtttccggattattgatgctaaggactggaaatggaatttaaactggaatggtgctttgaacaaaaacaaggttgtttctttgccggataacggacttgaaagaaatcgtcagagtgcttatcaagtttatacaggaaacggagatgaaaagaaatgggtcggaggataccaggagggccaacgtccgggtgatctctacatgtttgttgcagaaggactgtacaaatctcaagatgaaatacccgctaatctgattgatttgacaacaggtaacaatggttctagcggccgtcctctgtatggtggcgctgaaggttacaataaactgacagattctcagaagtcgaatgctcttcccattcagccgggtgacgtaaaatggaaagatgttaataacgatggagtcattgacaattatgacatggtaaaggttggaaatactgttcctaaatggaccggtggtatcaatacaactgtaagttggaaggaccttaccttgtcggcacgtttcgactatgcattgggattcactgctgtagattggaaaacgatgtggatcatgtcatgtgctcaaggtacatacaatactattgaggagaccaaaaacacatggactccggaaaatccgaatgctaaatatccgacttatgtatgggccgatcaattgggtaaacgtaattattgccgtagttcatccatgtttgcctataatggaaactatatagcattacgcgaattatcactgtcatataaattgccttcaatattggttcagaaagctaagttatctaatgtagaactttcaataacaggtcagaatttaggttatttgacagaagcaaagcacttattctcacccgaaaaagctgataataatggaggatatccattgcctcgcacagtgatttttggtattaatgtttctttctaaatataaaaatataaattatgaaaaaaataatatatatcatttccttatttgtatcatctgttctttatacgtcatgtgatgcgttggaccttgctcccgaagattatttcggaagtggtaattactggaataatgaagcccaggtagaaggattcatgtacggaatgcattctcaattgagaggaaactatgacatgttttattgcttgggagaactgcgtggtggtacacaacgcgttggtagctcttctcaaaatacgagtttggactacgctatactgcgtaccaataccttaagtcaagataatccgggattcactaactggtttagactatacagtcctattatgcaagtgaatcactttattcaaaaagttgaaaatgagtgtgctttcctaagtgaagcagatagaaaaacttacttaggacaggcatacggtttgagagcactttattattttatgctttataaaacttatggtggtgtacctatagttacaactgtagagttgttggatggtaaagttactgcggacaaattctacgttgaacgtgctaccccggaagctactttatctttcataaaagaagatatcggaaaatcagaaagttattttggcacaacggaaataaataacaagcatgataaaacaatgtggtccaaagctgcaaccttaatgttaaaagccgaaatctatatgtgggctgcaaaagtttccattaatggttatactgcttccggaaaatctgatttggagatcgccaaaaacgccttaaatgggataattggtaaattccagctattgaataagtttagtgatgtgttcagtacttccaatagaaacaatgctgaggttattttcactttacattttgcagatggtgaggcaaccaattggggaggtatgtttctttatcaggatgcagtgttcattggacaggtttacggtcgcgatgacaagaaaatcgaaacagatacattaaatctgaaaggcacaggtggcgttttccgccatgaatacacagaagatttctggaaaagttacgatgaaaaagatactcgccgtgatgcgacattcttagagtattatactaaaaagaacaaggaaggttttggctgcgtcatgcagaaagctatcggttctatcaattcaaataataaccgtatttacgataccgatttcattgtctatcgttatgctgatgctctgttaatgatggctgaagtcgaaaatggtcttggaaatccatgtgccggctatatcaacgaagtacgtaaacgtgcatatggctccgattatgaagctaataaatatactgaaggaaattatgcggaaaacgaattagccattctccatgaacgtgataaagagtttgtttgggaaggtaaacgttggtttgatgtggttcgtatgcatgatgccaacggtaagtctctggcattttctgctacggctaattatccggcagacaaatcgattttggatccgagtgaagaatacaagctgttatggcctattgatgtagatgtcatgagtgtcaatcccttgctgaaacagacccccggatatgaaaaataaaacttagtcaataggttttaaatacgattatttattacatgtagaagctgccccaatactcttggaggcagcttcttttttcagtcatatctgataagttgatatgcttgataatcaattctgatatcccggagtttgttttaatgccggattatctgtcaatacactttcgttgatcggccataataagcgggtagcaacggctgaagtacgtttagtcacatagtctgcaccaagcaatcttaagtcataccaacgttttccctcaaacataaactcacgcatacgttctttcaaaatagcttccaaaggatcttcgtcgccggacatatatttattatctgtatagaagtctcctttatcattgggataagccaatgtagctttgttggtttcaaagaattcttttccataagcacgttcacggacctgattaatttcggcagtcggatcctcacccaacaatgctttagcttcagcaagcaataacaggcagtcggcatatcggtagattggataatcattcaagaagctacgttgtgaagctccatcaagtagaactccctggtatttattacaaaatggagcaatatatttaactgtaccatcctgctgtttctggtagactgccgtcatagaagcatctttacgggtgtctccatcgcggaatgctttattgtacaaatcatatcttatctgtagacgaatcaaaccgttcaattgtccttcgggcaaatctttaaatgacactccctctttattgcaataagtagaggtcatatatgcttgttggggcaccaggttctgtctgaatttatcgtcccacatattatactcgtctttagcgttgcgtattgagaaaatgatttcagagttgtctttattgttataagcaaatacttttgagaaatcatcttgcaaactaacatttgcattgctgacaattgattgcaaagcagttttggctgtagtatagtcggctgtaccgccacccatttggcgaccactccataaataaacctcaccttttaacatctgtgtagcagccatcgaccagtaatatctgccatatttgaaagaataatcgctgccaaatcctttttcggacgctgtaatgtcttctttgatttgtttcatcacctcctccgcaggagaagctgcttttgatagattgcttaaatccaaagaagccccattcgtatagtcaagatagaggataacatctccccaagagcgtagcaaatggaaataaagataagcacgcattccataagcttcgcctaagtaatagtttttaccagcttcggagagtactgtcgtttcctttgttttggctatcatcagattgatctgattgatcactttgtacattcctgcgaagttgcttattcctgtattctctttattgattgtattgaaaggcagacgctccataccttgagttgcttctcctccgaaaggaacatctccgtaaatatctgcacgaggctcacctaacaagaaaaagttaaagctgcattctctaagcaatgcgtgcaaccccacattaaaagtgctgaactgggcctctgtcttccagtaattactatctgcaatagaactggtaggatcaatatccagcgcatcacatcttgaaaacagcaggagagaaagccctgctaacatatatgtaaatattttcttcataatgctatttgtattagtcatatataattagaatgtcattgacaaaccgaataaaactgttctcggagtaggataacggccgttatctattccacggccataagtcgtatctacagccggttcaggtgaaacgcctgtgtatccggtgatatagaatagattctgacctgttacataaactgaggcatctgtcatgcctactttactaatccatgttttaggcagattatagttcaatgtcagttcacgaagggccaaatagtcacctttttcatagaaacgtgaactgttattgtcaatagccgtaagaccattatttgaacgtgttatattcttcttacttaactggtcggcataatagaatgcaggcagatcagtatcggtatttgtttcactccatgtttttttaacttctttaatgatgttgaacgaaccttgatattgccccaatgaacgtgctgcaaggtcattataaatcgtatgtcctaaagcataatcgaaacgggcatataaagagaggtttttataacccaatgtagtagagaatccaccggtaacttttgggaatatatttcctactacttgacggtcgtatccattaataacaccatcgccattaatgtcttcccagcaaacatcacccggttcgataggttgccatccctcttttccggcatattgggctgcaagtcccggaccatataagttggctacctcatcgatacgattattggcatattttttcacatcatcccaatctttgaatatgtggttttgtttataggcaactagttctcccagtttaccaccttcctgacgaccggcgatccatttggtttcatctgttccatcggcttttttacgtccggttgctacttcataaccaccaacacgattattgggattaccattgtagggcaattttacgatcttatttgcaacagaagacaggttggctgttacatcccatgttaaccctttcggattattcagaatattagctctgacttccatttcaaaaccataattacgcagagttcccatattggtcatgatttccgtgaaaccggtatatcccggaagagcttgtttggttaacaaatcctttgtagtacggttataatagtcgaggataaagctcaaacgattatttaagaatccgatgtcaagtcctgcttcaaatgactgactttgttcccaacgtaatccagtgtttaccaaacctgaattgtagaatgcggttgaacctccgtatgtttttgcgcctacttgtgaatatgcgccatatacatcaaaatttccgattccattcacatttccattgacaccatagctcaaacggggtttcaagttagaaataactcctgatatcttagagtctttccagaatctttcttccataatattccaaccgacagacacacccgggaagaatccccaacgattatctttcagtttcgaaataccgtcataacgagcaacaaacgaaattaaatatctcatatcgtagttatagttaatacgtccgaatccggaaagaatacgatatgctgttttggttgttgaagtataggttcttgtagagcctgcgtttaaggtaggaatatcatcagtcggagaattttgagttttagcttcaaaatcgaactgatcataagtgaaatattcggttcctaacattgcttccagattatgcttttctgcaaaagtatctgtgtatgtcagtgttccgttcaactgaatttgattgtatttctgaacataagcctcagcctggcgtgtattgtcaggagttgcggaagattgagcttgataagatttattaaacttctctctctgccagtcataacgataaagtgaagcattgccatttaacactaattttttaggtaaaatgtcaagggcaaatccaacactgtaggttgatttattagtgctgttctcgctcgtcaacttatctctgtaataatcgggattaccgtctcctgtaccgaaaccggaggccggagttccatcttcattccaagggttccatgtcggacgttgagagcgtgtacggtagaaaaattcatattgaccgatccagagttccggttgagttgaccaagagtaagtcgcatttgcctttaccgtcaaaaaagggaatactttatacgaaccgttcaatgctccattgaaacgttcgtatccggtacctctaatctgaccatcttctttgtaatagcctaggctggcagagaaggttcctttatcgttaccgcctgtaatgtttacataatggtcttgtgtcaaagcgctattattgaaaacaacatcatccaactcacctgagtagtctttatatagaattgtttttccatcataaaatgggtctgccatagaagcccaaccttcattctttaagttagcgttttcatctgtcaaataacggatgtcaaatagattgttaccaataccatatcccatttgtgtatctacattggtacgtccggttcttttgtaacctaaacgattgtagtagatgtagtcgtgcgcatcgcaaaagtcataacctttacgagcgaaattcacacccattttgaatttatagttaacagatgctttaccttctttaccacttttagtctcaaccaaaataacaccgccattggcacgcgctccataaatagcggttgaagcagcatctttaaggacttgaatcgactcaatatcggaaggattgatatcgctcatgctattgcggacaataccatcaactacgataagtgctttactattatcacctgtaatagtggcaccaccacgtaatgtaatatccggttcactaccgggttgacctgttttgttaacaacacggagtcctgttacagagccttgtaaggattgtcctgcgttgctgaaagccgcatttttgagtaccgaattatccaatttagagatagcagtagtcaaagtagcacgcttttgtgaacctccatatcctgttatcactacttcatccaacacttctgtgtcttccttcagtactatcttataggtattttcagcaccaacagtaatcgtctgagatttatacccaatatagctaactgtaaatttagcaccagtagctatcgttaaagagaactcgccgtcaaagttagttatggtaccattagttgtaccgacttcaacgacacttgcaccaatgattgactcaccggcaccatctgtaatcacacccgtgatagatttcttttgcgccatggccccaagagaacataaaatgcacaaaatcaagaagatggttttcttcataagtattgctttttagttaataataaagaaaattataattgtttttactaagttctatcggtacttggtattttcattacctaaataataaatgaaaaaggttaaatttattatttcttttcatttatatactattaaaccgttgcaaatatatatattatattaaaaactcacaagcatattttaaatatattttttatatagacgaaataatattgaaaaactaagataatccacttggggatttcacaaaagattgtttatggggtatcctctctcatataatattgatttcttatattatatatatagcgattcaccttagaataggtatatgtaatatattattgttttaaaatactattggactgacttgaaaagggcgaaaggatatattcaaaaaccttattatatgttataaggtgtttctttgtgttgaaatatagataactctttttggcttattgaaaagtagattttagaggaattgggacgagaaaaaaatatttattgcttcactacttttcaccattattaattcataagtgtttttttactaaaaataccctgttgttttgattcactattaagatgtaatgacttgtattatagccaattatattttatcttgattctgtatttactatttaaaaagctaagtaccgataggactgtactcattttcaggtatttatatttatggagtttagaagagataattttccttttttattaactaaaaatcaatttatgaaaaaagtcctttttattttgttgggctgtttgctatcgtttaatgtgatggcacaggtaaaggcgatttcgggactggtaacagatgttactggggagcccgttattggggcaagtgttgtagaagtgggaaccactaatggagtaattactgatttaaacggtaagttctcgttaaaggtggcacctaattcacaattcttggtgagctatattggctacaagcaacaaacaattaaagttggctctgaaagcacttataatattgtgctgaaagaggatgcggaggttttggatgaagttgttgtagtcggttatggttcgcaaaagaaggtgaacgttacaggggctgtaggaatggttggtgctgaagcgttggaagcgcgtccggtagcaaatgcttcacaagcattgcagggtgttgttcccggcttgaaccttactgttggtaataacggtggcgcccttgatggaacgttaaacatgaatattcgtggagccggaacgattggtgatggatcgggttcatccccactggttttgattgatggcattgagggggatttgaatactgtcaatcccaatgatatcgaatctgtttcggtattgaaggatgctgcatccgcttctatttatggtgcaagagcttcattcggtgtaattcttgtaacaacgaagagtggtaagagcggtaagaccaatgtgtcatatagcggtagtgctcgtttctcagacgctattggtgtaccggatattatggattcttacacttttgctcagtacttcaatcgtgcttctgccaataagggtggtggtgacatttttgcccctgctgtaatggagcgtatcaaagcttatcaagagggaacgctgaaagctactactgttgataatggagcaggcatttggcaaaaatgggctaacgcgaatggagatacggattggtttgaagaattctatgatcattgggcaccatctcaggagcataatcttagtattaatggtggtacggataagactcaatacctgatcagcggaagtttcctggatcagaaaggtttgatgcgtcatggaaaagacaaatttcaacgctacacgctgaacggtaagattacaacggctgtcactgattggtttaaggtgacatattctactaaatggacccgtgaggattttgagcgtccttcttatctgaccggaaactttttccataacttagctcgtaaatggcctgtacatccggcttatgatccgaatggattccctatggatgagggcgaagtggagcagatggaaaatggtggaaagcaaaacagtcagaaagatttttatacgaatcagttgcaactggttttcgaacctattaaaaactggaaaatcaatcttgacggtagtgtacgtaccactactcaatatcagcattgggaagtattgcctgtttatgcttataatgtagccggagatccttattatacagtgtgggatatgggatatggttcttatgcggcaggttcttctcgagtgaatgaatatagttggaaggaaaattattatactacaaatatttattcggattatttcaagcagttcgataacggacattattttaaagtgatggccggttttaatgcagagttatataaaaccagaaacattacggctgaaaaaaatactttgattaccccgggggtacctactattaatacggcaactgatgatccgcaggcttatggtggttatgctgacaactcagtagccggtttctttgcgcgtgttaactggagttataaagaccgttatatgtttgaggctaatggtcgatatgatggttcttcccgcttcgtaggaaaagaacgttggggattcttcccatcattctctgccggttggaatattgctcgcgaaccatttatggaaagttttgctgaaaagatcaatatgggaagtttaaagttgagagcttcttgggggcagctgggtaatacgaataccaatgatgcatggtatccattttatcaaacgatgcctgtagggtctaattacggctggctagtaaatggcgaacgtcctaactatgctacaaatccgggtattgtcagctctaagaaaacttgggagacagtggagacttgggatgtcggtttggattggtctttcttcaataaccgtttatccggttcattcgactatttcgtacgttatacttatgatatgatcggcccggctcccgaactttcaagtttgttgggaacttcagttccgaagattaacaactcggacatgaaatcgtatggttttgagttggaggtaaattggagagatcggatcggtgaagtttcttatggagcaaaatttgtactttctgatgaccaacagaagattctgcgctatccgaatgactcgtatgatgtaggttcgtattataaaggtgaacatttgaacgatatttggggattgacaacaatcggtattgctaaatcacaggaagagatggatgctcatttggcaaaagtcgatcaatcttctgttgggaccaattggggtgtcggtgatattatgtatgccgatttggatggtgacggaaaaatcagtaacggaaccaataaattaggagatacgggcgattatcgtattatcggtaattcgactcctcgttttaaatatggtattacactggatgctgcctggaaaggattcgatttcagcatttttatgcaggggatcggaaaacgtgacctgtggctggacggatgttatttctggggagccaacggacaaggaaatgagtggcagtctaccggctttgccgaacattgggatttcttccgtccggagggtgacccgttaggtgctaatttgaattcatattatccgcgcgtcaactttagtggggatcgtaataccaaggttcagacgcgttatttacagaatggggcatatctgcgtttgaagaatgttcagttgggttatacattgcctcgggtatggacagagaaagccggaatatcttctgtacgtgtatatgtttcaggtgataacctggcaactataaccagtctttctaagattttcgatccggaagctaccggaagtttggccggaacaggatccggtaagttgtatcctttgcaaagagtgatatctgttggtgttaacgttaatttttaaattgaagtattatgaagcttaaaataaaaaatctgtttgtacaagcatgttttgttgcgggaggggtaatggcgctcacgtcctgtaatgactttcttgatagagaacctctttcttctgtcacaccggaagtctactttcaaacggtggatcactttgccgcttattccatagcgaggtatcaaaactattttccttcgcatggtggttatggagcaggtatagcgaataacgatggtggaacggataatatggtggccggagggcgtagtagtcgctatgtaaaagggctttggaaagttccttccagtgatggtaactggagtttcagcaatatccgttattgcaactacttctttgagaatgctgtgcctaaatatgaagcgggtgaggttgccggagcagatgccgatattcgtcattatattggcgaaatgcatctgatgcgtgctcttgtgtactataatttattgcgtacttacggtgactttccgatcgtaacagaggttttgcccgatgacaaaacggtgctgatggaaaaaggtgtccgccaacctcgtaatctggttgcccgctttatcctgaaagatttggatgatgctgccaatatgatgtacagtaagggatttaaaaataatacccgtttgaatcgtgagacagctttgctgattaaatcccgggtggcactgtatgaagcctcttttgaaagataccacaagggtacaggacgtgtaccgggagatgataactggccgggaaagaaagtacattctaatttctcattggatgtagaagctgaggttgacttcttcttgacagaagccatgaaagcagcggaagaagttgcagataaaataactttgacccctaatacaaaggttgaagatcctgctagtccttctattacatccggatggaatccttattttgaaatgtatgccaatgttgatttaagcggctatgacgaagtgttgttctggcgtcagtatgcaaaaaccggtagtttctctatcatgcatggtactccggcatggattgcgtccggttctaatcatggcttgttgaaaagctatgttgaaagcttcttgatgcaggatggtctgccttggtatgcggccagtagcgcagcaccttataagggggatgctacattggatgatgtgaaggccaatcgcgataaccgtcttcagttgtttatgtttggtgaaagcaattttgtaccagtatattcgaccgaggaaccgggcactgtgaaaatgtttgctccgcatcctgtatctaaccgtgaagagatgagagaccagacaggatatcgtattcgtaaatatgccagctttgatatggcacagaatgtatggggaaaagctgagtcgactaccggatgtattatttatcgtggcgtagaggcttatctgaattatctggaagcttattatatgaagaatggtaacgttacaggtaaagcagctcaatattggagagccgttcgtgaacgtgcaggcgtagatcctgattttacaaaaacaatcaatgcgaccgatttgagtcaggaaacagattggggtaaatattcgggcggacaagttgtagacgccaccttattaaatattcgccgtgaacgtcgttgcgaatttattggtgaagggatgcgttgggatgatttggtacgttggcgttcaatggatcatctgctgacaaaaaattatatccctgaaggatgtaatttctgggatgaaatgtacaaatcggctaataaagatgagaatggtgctgaggttacatttaaagattctggtgaagaaggttctaatatctcttcacgctcctttaaatacctgcgtccgtatgccattttgaaaaccaataatgatgtatacgatgggtacacctggcagaaggcacattatctcaatcctgtgccggttcgtgagatggaattgctgtctccggatgaaaaagcagagacatctgtattgtatcagaatccttattggtcaactaagattggggaagtggctgaagaataattgagttttcaatagatcaccgaaataagataaaggagagggatgttgcttgagataacatccctctctttgtttttaaatacaatccaaatcctgattgatgggatagtcttcaatgaccgctttgaatatgtttatttccgatggtttagtgctttgcgtcgaatagtgtcttgtttattaaatcgaccgtatataataaaatatttaattaacataaccgttatataataaaaaatactatctttgctcccgataacataaatattaattagtcgataccatgaaaaaagccgtaattctattttcgcttttctgttttctgtgtgctataccggtagttcaagcagcagataccatttttgttcgtgaaacacgtattcctattttgatagaaaggcaggataatgtcttattctatctccgtttggatgctaaagagagccagaccctgaacgatgtagtgttaaacttgggtgaaggagtgaatctttctgaaattcagtccataaagctttattatggaggtactgaagcattgcaggatagtggtaaaaaacgttttgctcctgttggatatatttccagtaacactccggggaaaacacttgccgccaatccgtcttattcaatcaaaaaatcggaggtaactaatcccggtaatcaggttgttctgaaaggagatcagaaactgtttcccggaatcaattatttctggattagtttgcaaatgaagccgggcacttcgcttaccagcaaggtgaccgcggatatcgcttcaattactttggatggcaaaaaagccctgttggatgtagtttcagaaaatgggatagaacaccgtatgggagtaggagtgcgccatgccggagacgataattctgccgcattccgtattccgggattggtgactactaataaaggtacgttactgggagtttatgatgtacgttataacagtagtgttgacttgcaggagcatgttgatgttggtttaagccgcagtacagatggtggaaaaacttgggaaaaaatgcgtttgcctttggcttttggagaattcggtggtttgcctgccggtcagaatggggtaggagacccttctatccttgttgatacaaaaacaaataatgtttgggtggttgctgcctggacacatggtatgggtaatcagcgggcatggtggagttcacatccgggtatggatatgaaccatacagcacaacttgttttagctaaaagtacagatgatggtaaaacatggtctgcacctattaatattacagagcaggtgaaagatccttcttggtatttcttgttgcagggaccgggtaggggtatcactatgagtgacggtactttggtattcccaactcagtttatcgattcgacacgtgtgcccaatgccggtattatgtacagtaaagatggtggcaagaactggaagatgcacaattatgcacgtacgaacactacagaagcccaggtagctgaggtcgaacccggagtgttgatgttgaatatgcgtgataatcgtggaggaagccgcgctgtggctattacaaaagatttgggtaaaacatggacggaacatgaatcttctcgtaaggcattgccggaatctgtttgtatggctagtttgatcagtgtgaaagcaaaagataatgtgttgggcaaggatttattgattttctctaatcctaatacgacaaaaggacgctataatactactattaaaataagtttggatggcggtgtgacttggtcacccgaacatcagctgttgttggatgaaggcaataactggggttattcttgcctctctatgattgataaagagacgattggtattctttatgaaagtagtgtggcgcacatgacattccaggctgtgaagttgaaagacattattaaatgagagatttcccccataaactaaataaataccgatgagaaacaaacaaattttcttaatcagtttcattatttacttatgcacaatttcttcggttcgggcaggtgaatatcacctgctcccggaaccgcaaaagtttacccctttaggttccagttttgtgctgggcagaacaaagctttctactccggtgcttcggcaagagtgggaagcttttgttgttgataggggtggagtgattgatgacaaagctcgtgcaagtattgaagtgaaactggtaccttcgttagaagaggtacctttgaacgcagacgaagcttatcgcctggtggtaaataatggcaaagttacggttgaggctgtgacggagcatggtgtgtattgggctatgcagactttggcccagctacaggatgtacaaaagaaaaaggcaacattcaacggttgttcaattgttgactggcctgctttccgaatacgcggctttatgcaggatgtagggcgtacgtatatgtcgattgaagaattgaaacgtgaaattgctgttctttcacgatttaaaattaatgtttttcattggcatctgactgaaaatcaatcgtggagattgcaaagtaaaatttttccgatgttgaatgacagtgtgaacacgactcgtatgccgggtaaatactatacattggaagaagcgaaagatttagtcgctttttgtaaagcgcataatatacttttaattccggaatttgatatgccggggcatagtgaggcttttgtccgtacattccgtcatgatatgcagagcccggaaggaatgaaaattcttaaattgctggtagatgaagtttgcgagacttttgatgtaccttatcttcatattggtacggatgaagttcggtttaccaatccaaagtttgttccggaaatggtcgaatatgtccgtgccaaaggaaagaaagtcatttcgtggaatccgggatggcattataaacctggcgagattgatatgacgcatttgtggagttatcgtggaaaagcccaaaaaggtattcccgcaattgattctaagtttcattatctcaatcattttgatacttttggcgatatcattgcattgtataacagccgtatttataatgttgagcaaggaagtgacgatattgcagggacaattcttgccatctggaatgaccgttacgtagctaacgaacgcaatattatacttgagaataatttctatcctaatatgctggctattgctgaacgtgcatggaaaggcggaggtacagaatattttgataagaatggtactatcttaccttctgaagactctccggagtttaaagaatttgctgattttgagaatcgtatgctttggcataaagagcatacatttaagggatatccgttcgcctatgtaaaacagacgaatgtaaaatggaatattactgatgcatttcctaatggtggagatttgaataaagtctttcctccggaacaggaattgaaggattcttatttatatgaaggaaaagagtatggggtacaccctgccattggtgcgggtatctatcttcgtcatgtatgggggaaaatggtacctactttctataaagatccgcaagagaatcatacggcttatgcctatacatgggtttactctccgaaagatcaggaagtagggctgtgggctgaattccagaattatggtcgttcggaaatggacctggctccattgcaaggtaaatgggactataaaggcagccgtatctggatcaataatgaagaaatacagccacctgtatggacagctactcatcgtacaaagagtaatgaaatagcgttgggaaatgaaaattgtgtggcacgtccacctatcgccgtacatctgaataaaggctggaataaagttttcctgaaattgccggttggcaaattcaatatgcccgaggtgcggttggtgaagtggatgtttactacagtttttgtaactcctgacggagaaaatgcagtggacggacttatctattcgcccgacaaaacgaagtaattgagaaaaaataaaaacgaatgaagaaaattttattaatgatgttgttgctcgcctcaatggcgggcaacgcacaggaacgcaaatattctacgttctattatcaacgtgcaactctgtttgaggagttgcctgtgacttcaaaagatatcatttttctgggtaatagcattaccaacgggggagaatggagtgaattattgaataataagcatgtcaagaaccgaggaatcagtggtgatatctgtatgggtgtttatgatcggctggatgcgattttgaaaggaaaacccgccaaaatattcttgttgatcggcataaatgatgtaagccggggcacttctgcagatacaattgtgaaccgtattggtatgattactcaaaaaattaaacaagattctccaaaaacaaagctatatttgcaaagtgtacttccggtaaccgatcattataagatgtttggcggacatacgtcacgctggcaggaagtgaaaaagatcaatgaaggactgatgtatcttgctgataaagagaatgtgacctatatcgatctttattctcattttgttgatgagaagaccgggaaaatgaatattgagtatactaatgatggtttacatttactgggaaaaggctacttaaaatgggttgatattgttaaaccttatataaataagaaatgaaaaagatactattcttatctctgttcttgatggcatgcaccattttatccgcacagaagcgggtgaaagtggcttgtgtagggaatagtattacatacggatatactcttccgaatcctgcaacggactcttacccatcacagttgcaacaactcctaggggagacttacgaagttggaaatttcgggaaatcaggagctaccttattgaataagggacatcgtccttacatgcagcaagaagaatttaaaaaggcaattgcttttgccggtgatattgttgttatccatttgggtattaatgatacggatccacgtgattggccgaactatcgtgacagtttcgtgaaagattatctggcgttgattgattctttcagagttgctaatcctaaatgtcatattattattgcccgtttgacaccgatcgctgaccgtcatcctcgttttgagtcaggtacccgtgattggcatggagaaattcaacaaagtattgagacgatagctaaatatgcaggagttcagttaatggatttccatgaaccgctttatccttacccctatcttcttccggatgctgtacatcctaatgtagagggagccggtattcttgcaaaaacggtatattcggcgattacaggagattttggagggttacatctatctgagttgtatactgataacatggtacttcaacacggagagccgttggctatccggggcaaagcaaatgcgggtgaaaaagtgactgtttcaatagctaaacagaagttgactgcaaaggctgcttccaatggagactgggctgtcaccattcagccgttaaaggccggtggtccatatacactgactgtctctgccggaaaacagaaacaaacattcaataatgttttggctggagaagtgtggctttgttccggacaatctaacatggaattttatttgagttggagtaaaacggctaaaagagatattccgcaggctgctaatgatcagattcgtttgttcgatatgaaggcacgctggcgtacggatgcagtggagtgggatacatccgtattggattcgttgaatcatttgcagtattataaagataccgaatggacggtttgttcacctgcaacagcaggttcattttctgctgtggcctattattttggcaaaatgctgcaggatagcctgaaagtgcctgtaggattgatttgtaatgcgatcggtggttcgcctactgaagcatgggttgatcgcagtacattggagtataagttccctgctatattacgtaactggactcaaaatgactttattcaggattgggtgcgcggtcgcgctgctcttaatgtgaaaaaggctgttaataagcagcaacgccatccttacgaaccttgttatttatatgaggcaggtattcgtcctttggagcaatatcctattaaaggcatcatctggtatcagggtgaatcgaatgcacataatcgtgaggcacacgagaaattgtttaagctcttggttgagagctggcgtaaaaactgggaaaatgagaatttacctttttattatgtacagttgtcaagtatcaaccgtccgtcatggccttggttccgtgatagccagcgtagaatgatgtatgaaatacctcatacgggtatggcggtatcgagtgacctgggtgattcacttgatgtgcatcccaaacataagcagccggtaggcgagcgtttggctcattgggctttgaatcaaacttatggaaagaagaatgttacaccttcgggaccaatgttccgtaatgtagagtttcgtgatggcgctgcttatgtatcattcgattgtgccgagggtatgcatgcatcggacggaaagccgttacagacattcgaagtggcagaaacagaagatatttattatccggccacagccgaaatcgtaggaaatcaaattaaagtatatagtaaagaagtgaaaaatcctcttcacgtgcgttacggttggcaaccttttacccgtgccaatctagtcaacggtgacggtttaccggcgtctacgttccgtacggactggggaaaataaacttgaaaaagtgagcagtttatgatgaaaaagttattgtatggacttgtatgttgttgcagtttagcctatgggcaaaaccaagacacttcggatgtgttaatgctgaatgacgattggtcgttttcacaggtaggaacagaaaaatggctgccagctactgttccgggcacagttcatcaggatttgattcatcataaactgctacctgatccgttctatgggaccaatgaaaaaaagattcagtgggtggaggacgaagattgggaatataaaacttgttttgtcgttacagaggaacaattaaagagagatgccgcccagcttttcttcgagggattggatacctatgctgacgtttatctgaacggttctttggttttgaaatcagataatatgtttgtgggttatgcggttcctgtaaaacaggtgttacgtaaaggtgagaatttgctgcatgtctattttcattctcctataaaacaaactcttccacaatggtcatctaatggatttaattatccggctgataatgatcatcacgaaaagcgtcttagtgtatttactagaaaagcaccttatagttatggatgggactggggaatccgcatggttacaagcggtatctggcgtcctgtgactcttcgtttttatgatgttgccactattgccgattatcatgtgaaacagttgagcctgacagatcaagtcgcaaaactttctaatgaattggaaattaatagcatttcagagaaggaaaaatctgctgaggttttgatctcttattcattgcaaggagggaaagaagtaacagtaaaggagaacgtgacgttaaaaccgggtttaaataagattcatattccgttggatattcagaaccctgtgcgttggatgcccaatggatggggagaacctcatttatatgatttctcagcacaagtgatatgtgacggtaaaacaattgcctcgcgccagcatcgcatcggacttcgtacgatacgggtggtaaacgaaaaagataaagagggagaatctttttattttgaagtgaatggtatcccgatgtttgccaaaggagccaattatatccctgatgatgcattgcttccctgtataaccactgagcgttataagaccctgttccgggacatgaaagaggccaatatgaatatggtacgtatatggggcggaggaacttatgaggatgatcgtttctatgatctggcagatgaaaatggtattcttgtttggcaggattttatgtttgcctgtactgcttatcccagcgatcctactttcttgaagcgggtagaagaagaggctgaatataatatcaaacgtctgcgcaaccatgcttcattggccatgtggtgtggaaataatgagattctggaaggattgaaatattggggatggcagaaaaactatactccggaagtatatgaaaatatgctccgggggtatgataagttgttccggggattgcttcctgccaaagtacaggaactcgatgaaggccgtttttacaagcattcttctccttattttgcaaattggggacgtccggagtcgtggggcataggtgacagtcataattggggagtgtggtacggcaaaaaaacattcgaatcattagacacggatttaccgcgatttatgagtgaatttggtttccagtcgttcccggaaatgaagacgattgctacatttgctgctccggaagactatcagattgagtcggaagtgatgaatgggcatcagaaaagcagtattggtaatgacttgatacgtacctatatggaacgtgattatatcgttcctgagaaatttgaagactttgtgtatatcggacttgtgcttcagggacacggcatgcgtcatgggatggaagcacatcgtcgtaaccgcccttattgtatggggacattatattggcagcttaatgatagctggccggtagtttcctggtccagtatagactattatggcaattggaaagcgttgcattatcaggcaaagcgtgcttttgcgccgttactggtcaatgcaatacaggaaggcgatagcttgaatatttatctgatatccgatatgttggaaaagcagagtcagcttacacttgaaatgaaagtcattgattttaatggcaagacattagacaaagaagtcatcaagacagttgaggtaccgatgaatacttcttcttgtatcgtgcgtaaaccgttggacacttgggtgaatccggaacagcgaaagagcagttttctactacttagcctgaaagataaatcgggtaggaaagtggctgaagaagtttatttctttgataaaaccaagaatttggagctgcctcagacagctatttccatgaaagtgaaacaactcgatgggaagtgtgaactgaccttgtcatctcctaaactggcaaaagatgtctttgtccggattcctgttcaaggagcccgtttcactgataatttcttcgatctgttgccgggtgaaaacaaaaaaataacgataacgtctccggagattaagaagggagaaagcttgaatatcacagtgaaacatgtacgagatacctataactaacacctattaaataatttgtatgagaaatctttttaaaattgccggtttactggcgctcacgggatttatttcttcgtgtaacgacaaagaaactacagctaattaccaggtaattcctttacctcaggaaattacgactgctcaaagccaaccatttacattaaatggtagtgtaaaaatcatctatccggaaggaaatgaaaagatgcaacgcaatgcccaattcctggctgattatctgaagaaagccacaggtaaggattatgccgttgaagcaggtactgagggcaaaggtgctattctgcttaagttgggtatggaatcagaaaaccccgaagcttatcagttgagtgtgaacgcagatggtgtaactattgctgctcctactgaagctggtgtattctatggtatccagactttacgtaagtctattccggtagctatcggcacaactccttcattgccggctgtcgagattagcgattatcctcgttttagttatcgtggtgcccattttgatgtaggtcgccatttcttcacagtagacgaagtaaagacatacatcgatatgatggctttgcataacatgaaccgtttacactggcacttaaccgaagatcagggatggagacttgaaatcaagaagtatcctaaactgactgagatcggttcaaaaagatcggaaactgtaatcggacgtaattccggtgaatatgacggaaaaccttacggtggtttctatactcaggaagaagccagagaaatcgtagcgtatgctgcagatcgttatatcactgttattcctgaaattgaccttccgggacatatgcagggagcattggccgcttatccgcatttgggatgtacaggtggaccgtatgaggtttggaaaatatggggagtatctgatcaggtgctttgtgccggaaacgacagtgtactgacttttattgatgatgtcctgacagaagtaatggatatcttcccttctgaatatatccatgtcggaggtgacgaatgtccgaagactgaatgggcgaaatgtccgaagtgccaggctcgtatcaaggccttgggaatcaagagtgacgctaaacattcaaaagaagaatatttgcagagttttgttatcaatcatgcagaaaaattcctgaacgaacatggacgtcagattattggctgggacgaaatcctggaaggtggactggctccgaatgctacagtgatgtcatggcgcggcgaaggtggcggtatcgaagctgccaagcagaaacatgatgttatcatgaccccgaacacttatctttactttgactactatcagaccaaggatacagagaatgaacctttggctatcggtggttatgtgcctttggaaagagtttatggttacgaaccgatgccttcttcattgacaccggaagaacaaaaacatattattggcgtacaggctaatctttggacggaatacattcctactttctctcaggctcagtatatggtgttgccgcgttgggctgctttagcagaggttcaatggtctaatcctgaaaagaagaattatgaaaacttcctgagccgtttgccgcagttgattaatatttatgatgctgaaggatataattatgccaaacatgtatttgatgtgaaatctgagtttgtagctaattcggccacaggagcagtagacgtagtgatgactactattgacggtgctcccattcattatacattagatggaactgagcctacggcagcttctcctgtgtgtgatagtattcttacaatcaaggaaagttgtactctgaaagcggttgctgtccgtcctaccggaaacagcaaaatgctgactgaacagattgctttcagtaaatctacttcaaaacctattaaagccaatcagcctgtaaacaagcaatatgaatttggtggtgtttctacattagtagacggactgaaaggaaatggcaattataaaacaggtcgttggatcgctttttataaaaatgatatggatgtaacgattgacttgcaacaacctaccgagatctccagtgtagctatcactacttgtgttgaaaagggcgactgggtatttgatgcacgttctttctcaattgaagtatcagatgacgataagacttttacaaaggtagcttctgaagcatatcctgaaatgaaagagacagatcgtaatggcctttacgagcacaaattgacttttgatccggtaaaaacccgttatgtgaaagtgattgcaacatcggaacactcgattccggcatggcatggtggtaaaggtaatccgggcttcttatttgtagatgaaattacgttgaattgaaaaaatagaaatgacagaaattaaaacgattcgttttctttctatcattggatgtttacttgccgggatggctgcttcgtgcagctcccggcaagttgcgcctaatgaagaagggattagcgtgcagaaaatgaccggattccccgaaggagaacccggtttttctttgggtgtatcggcatgttacgccggcatctatcagggagaattattgattgccggcggatgtaattttccggaaactccggcagctgaaggaggaaagaagaaattctaccaaggtatttatgctgctgacgcttctgcagattcagttttcgtgtggcgaaaagtaggtcagctgcccgttgctgctgcttatggagtctcagtatcgactcctcgagggatagtgtgtgtgggtggatcgaatgaaaatggatccttatctgccgtttaccgcctttctttgagtgatgataaacaagctgtgattgtagatacgctgccatctttaccttgtacgatggataacatgagtggttcggttgttgattataccctttttgtagccggaggcaatgtgaatggcaagccttcgaatgggctttattgcctcaatctgggcaaccctgagaccggctggcaacaacttcccgattttccgggtgctccccgtgtacagcctgtatgtgtggggcagcgtaaagagaatgagacacttttatatctgtggggaggtttttccggggcattcgatgggcggtctgcaactctttctactgacggatactgttattccccctctttgcaacaatggcaacccgtctctactccgatagggagtgattctgtgcctgtagctttaggtggaggtgcaggtatagctctgacagacagtctgatactttgcaccggtggggttaataaagatattttcttgtctgccctgcaacgcgaggagatgatgaaagcagcagtgaccggcggtaatcaggcagctgtagacagtttgaaatctgaagcaaaaacatatatgttgcatccggctgaatggtatcgtttcaatgaccgtatcctgatttacaacacacgtcgggataaatgggaagaggctgttcggagccaagatatcgctcgtgccggtgctgcattgacaggacagggacagaccttctttaacatcaatggtgagttgaagccggggatccgtactccggaaatagctaagataatgattgactaattgcagataatctgacattttacttatatttgtgcattgaaaacaaaaaactaaaaccaatcatatcatgataaaacctacaatgagaatttgtactttcttgcttgcagccggtttgatgatagcaacagctggtatgaaagcgcagtctgtcattcccatacctctccggatggaacaaggaagcggaacttttcagttttccggtgaaaccctgttgtataccaatctgaagggtaaggagaagaaaatgatgatggattatctggagacattacccattcactttaaaagttccaaaaaacaagccaaagagaatgtagtctcgttgctgataacaaaagataactctcagttaccctctcccgagagctataccttagaagttactccccgtaaaataacagtgcaggctacttccggagccggattattctatggcgtacagacccttttgcaaatggcacagcctgcaatgggagatacttggtcagttcaggctacgacgattcaagattcaccacgatttgaataccgggggctgatgctcgatgtttcaaggcattttcgctccaaggagtttgtaaaaaagcagatagatgcattagcttattataaactcaatcgtttacatttacacctaacagatgctgcggggtggcgtatcgagattaagaaatatcctttattgacagaatttgccgcctggcgtccggaagctaactggaaaaaatggtggaatgaaggtggacgtaaatattgtcgtttcgatgctccggaggcttcaggcggctattatacacaggatgatattcgtgaattggtcaattatgcacgcgagcgccatgttaccattattcctgagatcgaaatgccggctcattcagaagaggttctgaccgcttatccggaactgtcctgttcgggagagccttacaagaatgccgacttttgtgtcggaaacgagaaaacctttacgtttcttgaggatgtgttgacggaggtcatggagcttttcccttctcaatatattcatgttggaggcgacgaagcgggtaaggtagcttggaaaacctgtcctaaatgccaaaagcgcatgcaggatgagcatttggctaatgtggatgaattacagagttacctgatccatcgcgtagaagtgtttctcaatgctcatggacgtaaactgttaggatgggatgagattttgcaaggaggactggcgcccaatgctactgtgatgtcatggcgtggtgaacaaggaggtatcgatgccgtaaaatccggtcatcaggcgattatgactcccgggtcacattgttatatagatggttatcaagatgcaccttattcccaacctgaggctattggcggatatctgcccttggaaaaggtatactcttataatccgatccctgcctcacttacacctgatgaagcgaagctgatttatggtgtccaagccaatctttgggcggaatacatccagactgacgagcattgtgaatacatgatttatcctcgtattcttgcgttggccgaagtggcttggtctgctcccgaacgaaaatcatggactgattttcgcccgcgtgctctaaaagccgtagcatatctacaatccaagggatatcatccgtttgatttgaaaaaggagatcggtaatcggcctgaagcgtcaaaaccggttcagcatcttgccttgggcaaaacggttaaatataatgctccttacaatgcgtcttatccggcgcaaggcgataaaaccctgactgacggaatccggggtagctggacttacagtgatggggtatggcagggctttatttcccgtgatcgtttggatgtaactatcgatatgggtgagtcgactgctttgcattcgattggcgcagattttatgcaggtagtaggtccggaagtctttttgcctaccgaagtgataatttctgtttcggaggatggcaagaacttcactgaattgagtcgtcagacacataaagtagtgaagtcggatgctgtggtctttaaaaactacgcatggaatggggaagccaaaggacgatacatccgctatcaggctcgtgccggagaagagtttggaggctgggtgtttaccgacgaaatcgttgtagaataaccttcctcacagagcgggtgaaaccaaacgtatatattaataaataatagtattgaaagaatgaagaaactaccttattttgtatcatttgcagctgcctggctatttatagcagtggcttctgcgcaagagaatccggtagattatgtaaatccgttcgtcggaacgacgaattacggaacaacgaatcccggagctatctgtccgcagggaatgatgtcggttgttccttttaatgtgatgggggacaaatccgttggtaataaaatagataaagacagccagtggtggtctacaccttatgaacataccaatacctatttcaccggattctcacatgttaatctgagtggagtaggatgtccggagctgggctccttacttttgatgcccacaaccggaaaattgaacgttgattatttacaatacggaagtgcctataaagacgagaaagccactccgggttattactcaaatgttctgactaaatatgggattaagaatgaggtttcggctactttgcgtaccggaatcagccgttttacttttcccaaaggagaaagtaatatccttttgaatctgggtgaaggattgaccaatgaaaccggggctaccgttcgttttgtcagtgacaccgagatagaggggagtaagctgctcggtacattctgttataatccgcaggccgtatttcccatttattttgtgatgcgtattaacaaaactcctcgtgcacgtggctattggaagaagatgcgtccgatgacggtggaagcgcagtgggataatacttccggtaaaaataagctgtatactgcttataccaaagagatgagtggtgatgatatcggtacttggtttacgtttgataccgacgaaggtgaaacgatcgaagtcagtatgggagtgtcgtttgtcagcatagccaatgcccgtctgaatttagagaaagagcaggccggaaagggatttgatcagattcgtgccgaagcgcgtgccatgtggcagaatgatctttcacggattcttgtagaaggtggtaccgaagagcagaaaagagtattctataccgccatgtatcatttgttgattcatccgaatattttgcaggacgtgaacggacaatacccggctatggaaggtagcgagattcttacgacaaaaggcaaccgttatactgtattctcgctttgggatacctaccgtaatgtacatcagttgatgacactgcttttccccgatcggcagttggatatggttcgtacaatggtagatatgtacaaggagcacggatggttgcccaaatgggagctttacgggcgtgagacacttaccatggagggtgatccgagtattcccgttatcgtggatacctggatgaaagggttgcgtgactttgatgtacaagcagcctatgaagctatgtataagtctgctacgacacctggcaaagataatttaatgcgtcccgacatagatgattacattgcgaaaggatatgtgcccctgacagagcagtatgataattctgtatcgcatgcactggaatattatatagccgattatgcgctctcacgttttgcccaggcgctgggaaagaaagaagatgcgaagttattctacgaccgttcgctgggatataaacattactactgcaaggagttcggtacattacgtcccattttacccgacggaacattctactctccattcgatccgatggaaggagccaattttgctccgagtcccggttttcatgaggggaactcctggaattatacattttatgttccccatgatattgcaggcttgacccgattgatgggaggtaagaagaagtttgtggataaactgcagaaagtatttgatgaaggcttgtatgatcctgccaacgaaccggatattgcctatccttatttattcagttacttcaaaggagaagaatggcgtacccagaaacaggtgaagcgtttgcttgccgaatatttcactgaccggcctgacggtattcccggtaatgatgataccggtacgatgtcagcatgggctattttcagtatgatcggtttgtatcctgattgtccgggaatgcctgattatacgctgactacacctacgtttgacaaagtaaccattcagttggatccgaaatattataaagaaaaagagctggtcattactgctgtccgtccgggagataatgccgatctgattaaggaggtaaaattgaatggaaagaaacatgcaggttatcgtatcagtcatgaggagttggtacatgccgggaagatagaatttatattaaaataaaaacaaatcaatcatgaacaagaaaatcaaaattgcatttgcttcgatgctcgctgtgccgctgttggcgtgtgcgcaagtccgtacggaacaaacctttgagaagggatggaagttcactcgtgaggatagtaaagactttagtaattctacgtatgatgatgcgaagtggcaatctgtgaccgttccgcatgattgggctatttacggaccattcagtattaataatgataaacagaacgtagccatttctcaggatggacagaaagaggcgatggagcatgccggacgtaccgggggacttccttttgtcggtgtgggatggtataggctcaattttgatgctccttcattcagtaagggcaaaaaggctactctggttttcgatggagccatgagtcatgcacatgtctatatcaacggacaagaggccggttattggccttacggttacaatagtttttatgtggatgccactccttatttgaaaccgggtgaaaagaacacattggcggttcgtcttgaaaacgagaacgaatcttcacgttggtatcccggtgctggattgtatcgcaatgtacatctggtagtgaacgaagatgcccatattcctacttggggtactcagctgactactcctgtagtgaaagatgaatttgcaaaggtaaacctgaaaacaaaactcgatgtaccagccggaaaagcattcgaaggatatcgtattgttaccgaactgaaggataaggatggtaaagtggtggcagccaacgaaaagaagggaggtccgttcgatgacaatgttttcgaacaagatttcgtagtgacttctccggctttgtggactccggatactccgcatctttatagtgccgtttctaaagtatatgaggggaatactctgaaggatgaatatactacttcattcggtattcgttccattgagattattccgaataaaggtttcttcctgaatggaaagaaaaccatgttcaaaggtgtgtgcaatcaccatgatctcggaccgttgggaggtattgccaatgatgccggtattcgccgtcagattcgtatcctgaaagacatgggctgcaatgccatccgtacttcacataatatgcctgctcccgaattgattaaagcttgtgatgaaatgggcatgatgataatggccgagtcatttgacgagtggaaagcagccaaagtacagaatggttatcacaaagtgtttgatgaatgggtagagaaagatctggtgaatctgattcatcagtatcgcaataatccgagcgtggttatgtggtgtatcggtaatgaggtgcccgaccagtggaacggtgaccgtggaccgaaactgtcacgcttcttgcaggatatctgccatcgtgaagatcctacacgtcctgttactcagggtatggatgctcccgatgcagtagtcaataataatatggcggctgtgatggacgtagccggttttaattaccgtcctcacaaatatcaggaaaactataagaaacttccgcaacagatcatcctgggtagcgagacagcttctaccgttagttcacgtggcgtttataaattccctgttgtccgtcgtgcgatgcagaagtatgacgatcatcagtcttcatcatatgatgtagagcattgcggttggtccaatcttccggaagacgattttatccagcatgaggatttgccttattgcattggtgagttcgtatggaccggattcgattatttaggcgaaccgactccgtactataccgattggcccagccactcttcgttgtttggaattatagaccttgccggacttccgaaagaccgttattatctctatcgcagtcattggaataaagataaggaaacgctgcatatcttgcctcactggaattgggaaggacgtgagggtgaagttaccccggtatttgtatataccaattatccttcggctgaactgtttattaacggcaaaagtcagggtaagcgtacaaaggatctctccgttacggtaaacaatagcggtgactctacttctgtggccaacttcaaacgtcagcaacgttatcgcctgatgtggatggatacgaaatacgagccgggtactgtaaaagtggttgcttacgataaagatggcaaagccgttgctgagaaggaaattcatacagccggaaagcccgatcacattgagttggtggcagaccgtagcgtgattgacgccaatggtaaagacctctcatttgtgacagtgaaggtagtcgataaagagggtaatctttgtccgctggcagacaatgagatcagtttcaaggtgaagggagcaggtacttatcgtgcaggagccaatggtaatccggcttctcttgagtcattccagaccccgaaaatgaaagtattcagcggtatgatgacagcgattgtgcagtctactgaaaaagcaggaaagatcacacttgaagcaacaggaaaaggcctgaaaaaaggtacattgctgatcgaaagcaaataatctgttcagatagagtaagaaaggagggcatccgggcaaccagatgctctctttttttgttatattttatatgcgaacccttcaaatgttaatagtatgaaacaacaccggatcatctgtataccgacattgacttttgccctgcttctgatgtttactccctctatcttgcaggcgcaggataagcccgtttttcccattgattcacttataacagtaggatatgctaccggaaataagaaaaacatttccggttcagtagaaaaaattacggagttgggcatgaataaagatcagataaccaatccgctggaggcgattcgcggacgtgttcccggacttaccatacaaaaaggaaccaacggaccggcagctttggatgccgtacgtttgcggggaactacttcattgaccagtggtaacgaccctttgatcattgtcgatggtgtatttggtgacctcagtatgctcacttctatttatcctaccgatatagagagtttcactattctcaaagatgcttccgagacagctcaatatggttcccgcggtgcttccggtgttattgaaatcacgacaaagaaaggaatccggggtaaaaccagggttagctacaatgggagttttggtatctcttctgtctacaaaaatctggaaatgctctccggaaatgaatttcgcaatctggcccggcagcaaggtgttgccatactcgacaaaggaaatgaaacggattttctgaaagagatagagcagactggtttacagcagaatcatcatgttgcattttatggcgggacggatgcttccagttatcgtgtttcgttgggctttatggatcgtcaaggtatcattctgaatgaagatatgaaaaacttcacttcgaatatgaacatgacccaacatgtgtttgacgattttttagtctgtgaactgggtatgtttggctctattcaaaagaatcataatttgtttgaccttcaaaaaacgttctattcggctgctacttttaatcctacttatcccaatcaccgaaatccggagactgattcctgggatcagattaccaatgccagccagatcactaatccactggcttggatggaagtgaaagatcatgatgctacatcacatatcagtacccatgcccggctgacttttaatttatttcgtgaactgaaactgattcttttcggttcttatacctataatattgtagaaaactcccaatatctgcctacggctgtgtgggctcatggacaagcatacaaagggaccagaaaaatggagtcactgcttggcaatctgatgctgacttacaaaaagaaatggaacaagcattattttgatgtactggcactggccgaactgcaaaaagaaacttatagcggcttttatactactgtgaccaatttcaataccgatcagtttggttacaataatcttcaggcaggtgccatacgactttgggaaggaacaaattcttattttgaacagccccgactggcatcttttctcggacgtttcaactatacgtttgccgaccggtatatcttcacggtgaatgcacgtaccgatgcttcttctaaatttggtgccaatcataaatggggattttttccatccgtatcgggcgcttgggttgtcagtgaggaaaagttcatgaagcgtattccgttggtcgataatttgaaacttcgcattggctacggtttagccggcaatcagagtggcattgactcctatacgacacttaatttggtgaaacccaatggagtggtacctgtcggtagttcacaagtggtgactttgggtaatatgcgtaataccaatcccgatttgaagtgggaagtaaaacgcactttcaatgcgggagtagatcttggtatgtttggcaaccggcttcttttctctcttaattattataattccaaaacctctgatatgctctatctgtacaacgtcagtgtaccgcctttcacctataacactcttttggccaatattggttccatgcgtaatagcggtacggagatagctgtcggcctcacccccttgaagactcaggatatggaactgaatgttaatgtcaatgttacttttcagcaaaacaagttactctctttaagtgggatgtacggtggagaaaatatctcggcgcctgaatacaaaagtttggcaagtctcgacggagccggatttcatggtggatacaaccatattgtctatcaaatggtaggtcaacctttaggtgttttctatctgccccattgcaagggacttattgccgatggaaatggcggatatacctatgacattgccgacctgaatgggggaggggtaagtcttgaagatggtgaggatcgttatgtagcaggacaggctgtccctaaaactttactcggttccaatatcagtttccgctataagcgtttcgatctgtcggtacaggtgaacggcgcattcggtcataaaatctataacggcacttcactgacctatatgaatatgaatatttttcccgattacaatgtgatgaagaaagctcccggacgcaatatcaaagatcagactgctacagactactggctggaaaagggagactacatcaattttgattacgttactgtcggatggaatgttccggtaacgaagtggaaaaagtatgtgcaatctttccgtctcgcgttcactgtcaacaatctggctactatcacaggctactccggtctgtcacccatgatcaacagttctacagtcaattctaccttgggtgtggatgataaacgggcttatcctttggcgcgtacctatactctcggtttaagtattaatttttaatgggaggatgagttatgaaaagtcgttatatatgtatgttcgcctgtctttggggactcggttttctgttttcatgtgatggttttctgaatgagaatcctaaagataagattcctgaggaagatgcttataagaatctaacagatttatattataatgcagtggcctccttgtacaataacatcggaggttacagtgatagccagggtttgcaggggaccggcagaggaatttacgatctgaatacttttaccactgatgaggctattatgcctacacgtggcggtgactggtacgatggcgggttctggcaaggacttttcctgcatcggtggggagtggataatgatgccattcaagccacgtgggaatatttatataaggtggtcagtctttgcaatcagtcactcgaacggatcgatacgtaccagcagacccataacgatgaagaactgcctgtctatcgggcggaggtccgcgctttccgtgctttgtattattatcatttaatggatttgtttgcccgtgtccctttggttctttcatcatccactcctttgaaagaagtgaagcagaacagtcgcaaagaagttttcgattttgtagtgaaagagctgcaggagtctgaacccttgctggaaacggcatatagcaatcgttccggcaattattacggacgcattacacgtcccgtagcctgttttttacttgctaaacttgccttgaatgctgaaatatatacggataataattggaccgacggtcaatttcccgatggaaaagatatttattttgaagtagatggcgagcggctcaatgcctggcagacggtagaggcttattgtgatgccatcactgcaatgggatatcggctggaagataattatgaagcgaactttgctgtttacaatgaatcctctgttgagaatattttcaccatcccgatgagcaagactctgtataccaatcagatgcaatatctttttcgctcccgtcactacaatcatgccaaggcctatgggttgggaggagagaatggttcaagtgccactgtggaagtccttcgtacgtttggatacgatacagaggcagtcgatcctcgttttgacaaatgttattttgccggtattgtatatgacctcaaaggaaaagtcgtcacactcgatgacggtacccagctggaatatttcccctggaaggtggatgtcgatatatctaatactccttatgaaaagactgccggagcgcggatgaaaaagtatgcgattgatgaaactgccaccaaagacggtaaactgatggaaaatgatattgtactctatcgttatgccgatgtattactcatgaaaagcgaagccaaggtgcgtaatggagaaaatggagatgaagaattgaaccttgtccgctctcgtgtgaatgctcctttccggacggctacattagctaatctattggccgaacgtcagttggagtttgcatgggaagggtggcgcaggcaagatttgatccggtttcgtcaatatacccgcacttatacgggcagacctcaactttcgggtgagaagaatggttatactacggtatttcccattccggaaaaggttcggttaatgaaccccaatctgacacagaatccggggtattgagctaacaaggacgggaagttggaagcggttgtctctaaatcgtaagataatccatcattatagcagaaaagtctatttatcaggtaaatcgttcttttgttcagatataaaattgcccgggcaacatcaggagatgtaagtccgggcaacattttatagggtactctctgtataaatcagagtaattggcaacggagccgattagtcaaagaggcttctgaacttcttgaatatcttttctttgattgaagtactcggtttaaagttctttgattcctccagtttctccagagtgcttttttcctctttactcaacgtttcgggcacatatacactaacgttgaccaataaatctcctgtaccgtagccgtttacgcttggcagacctttgccacgcaggcggagcactttacccggttgtgtacctgcttctattttcacttttactttgccgtcaatggtcggtatttctaccgcacctccgatagctgctgtggggaagcttagcaataggttgtacaccaggtcattttcatcacggatcagttccggatgtggttcttcttctaccagaatcagcagatcacccggtataccgttgtgcttcccggcatttcctttaccccccatagagagttgcataccttctgctactccggcaggaatctttacggttactacttcttcgccatattcgatgccttctcctccacaaaccttacacttgtctttaatgatcttaccttcaccattacaagtcggacatgtggtacgcgtctgcatagttcccaagatcgtctgttggttgcggatgaccgatccgcttcctttgcaggtcgggcaagtctcagaaccgctgtttccttccgccccggttccatggcaatgcgaacaaggcacatattttttcagcttaaatttcttttcaactcctgtagagatttctttcaaattcagctttactttcactctgaggtccgagccacggaattttctctgttgagaacctccgcctccaaatccgccaaagcctccgaaaccaccaccgaatccgccgccgctatggccgccaaaaatatcaccgaacatagagaaaatgtcatccatagacattccgccgctgaatccgccgaatggtccaccgtttccggctgctccgctcattcctgcatgaccaaactggtcgtagcgggcacgtttatccgggttgctcagtacgtcgtaagcttcggctgcttctttaaacttttcttccgcttccttgtcacccggatttttgtccggatgatattggatggcttttttccggtatgctttctttatttcttcgactgttgactctttcgtgacttccagcacttcgtaataatctcttttttctgccatattttagtttcgttgattttagttatgttagcaagttcgttcatgttccggttattctcccacaactacttttgcatggcggattactttaccgttcagtgtatatccggtctgtacacaatccaatattttacctttctgttcttctgtcggggcaggaatcacagcaatggcttcgtggtagtctgtatccaacggctggtctttggtttcaatcaccttcactccatcctgtgacaggatagacaggaatttattgtatatcagctcaacaccctctttcacggcatttacgtctgtggctgtttccatagttgtcagcgcacgttccatatcgtcgattaccggcagaatgcttttgatacttttctcaccaccattcagaattaattcggctttttctttgacggtacgtttgcggtagttgtcaaattcagccgagagccggaggtatttgtctttttgatcttcgatttgagcctgagcttcttttagctctttttccaacttttcctctgcggtcagcggttcggttgcttcagttgcttcttcgttttgcgactgtccttcaacggtatcctgaatatcgtctactttcaactcttcttcttgcttggttttcttttctttcggatccatatctattctgtttttattcttgttaaacggatttagtttcatgtcaatacggcattttgatgtactggctttgcagcaaaaactttgccagtttgtttgttttgccaaaaaacgcagcaaaggtaatacttttatgtcagattgacacattcctgatagttcgttattcactaaaaatgtctacctttgtcaccgcgttattttgataataaataaattaaggaataataatagaatgattacagtttctaacgtttcggtacagtttggtaaaagagttttgtttaatgatgtaaatctgaagtttacaagtggaaattgttatggtatcatcggtgctaacggtgccggtaaatctacttttctgcgcacgatttacggtgacctcgatcctacaaccggaaacattacattaggtccgggcgaacgcctttcagtgttgagtcaggaccactttaaatgggacgcttttacggttatggataccgtaatgatggggcacacagtgttgtgggacatcatgaaacagcgcgaagccctttatgctaaagaagattttacggacgaagacggtttgaaagtttccgaactggaagagaagtttgccgaactcgacggatggaatgccgaaagcgatgcggcgatgttgctgagcggtttaggtgtgaaagaagacaaacattatacattgatgggtgaattgagcggtaaagagaaagtgcgtgtgatgttggcacaggcattatacggaaatcccgataacctgctgctcgacgagcctaccaatgacttggatatggagaccgttacctggttggaggagtatctctccaacttcgaacataccgtgttggttgtgagccacgaccgtcacttcctcgattctgtatgtacacataccgtcgatatagattacggaaaaatcaatctttttgccggtaattacagtttctggtacgaatccagccagttggctcttcgtcaacagcagaaccagaaggccaaagctgaagagaaaaagaaagagttggaagagttcatccgtcgtttcagtgccaatgttgccaagagtaagcagactaccagccgtaagaagatgctcgaaaagttgaatgtcgaggaaattaaaccgtcatcccgcaaatatccgggtatcatctttactccggaacgtgagccgggcaatcagattctggaagtttccggtttgagtaagaagaccgaagatggagttgtgctgttcaacgacgtgaacttcaacgtggagaaaggagataagattgtatttatttcacgtaatccgcgtgcgatgaccgctttctttgagatcatcaacgggcatatgaaacccgatgccgggcatttcaactggggagtgacgattactaccgcttatcttcctttggacaataccgaatatttcaataccgatctgaatctggtcgactggctgagccaatatggcgaaggcaacgaggtgtatatgaaaggttttctggggcgtatgcttttctccggtgaggaagtactgaaaaaagttagtgttctttcgggaggcgagaagatgcgttgtatgattgcccgtatgcagttgcgcaatgccaactgtctgattctcgatactccgaccaatcatctcgacttggagtctattcaggcattcaataacaatctgaagacttacaaaggtaatatcctcttctcttcgcatgaccacgaatttattcagaccgttgctaatcgtgtgattgaattgactccgaatggtattatcgacaagatgatggaatatgacgagtacataacttccgaccacatcaaagagctgagagccaagatgtataagtaacgatgaacgttttttgaacgataaacgatgaacaggctgcacataaatgggtgcctgttcatcgtttttttgtttgcatttactgtagtttatcatccatcgttattttacctttcttcatttattgcgtatcatatataaacaacatatacagtgtgagctatggaacagaatgagatacaggtattggttgaaaagagcaggaggcaagatgcaagtgcatttgctttgcttgtggcggagtatcagactttcgtttttcgcttggctttccgtctattgtgcgatgaagaagaagcccgggatatggtgcaggagacttttttacgtgtctggctttcattggataagtaccggccggagttccgtttttccacctggctttacagggtatcatgtaatatctgttatgatcgtctgcgggctttgcagcattctccggccggtgcgctctctgatattacatttgccgaactacctgtctgttccgatgataatattgaagccacgttagtcaaccgggagctgaaagcccatatcctgtacttcatgcaacaactgacccctaagcaaaagcttgtatttacattgcgggatatcgaggagttggaaatcaaggaaattgagaagatcaccggatttacatctgtccagatcaaggccaatctctatcttgcacgaaaaagtatccgtaagaagttgaacgaaataaataaagaaagatgaaaaaggaagaaatgaattacgaaaaatggttggagcaattaaagaagactccacctgttttagaaaatccggacgcactgaccgaggatattatgcgtactgtcaaagcagcgcctttcaggaacaggcccgtccgcagattgaactttgctgcctggtgttctgctattgctgcaaccctgcttctcggtttatgggtggcagaggcagttgctgtcgatccgattctatcctcagaggtgactcgtataccgaaaccctatcaagagcaaacactcaccgatgagcgaaactatgagagattgatgacaggagagaagcgggagatcttcttttccgcgtcccgaagccggaaaaagaagatgcttaaacgggaacggctttatacccggtacgaacagataatgaagaatgaataacctttaaaaacagatgcatatgaaaacgaatagacttttatcgatattgctgctggcggtttcaatggtgtcttgcaccacttattatcaggtgaagacccggattcatcctgacggttcggcccatagggaagtatatgcttttgccgattctgcattcatggccggagatccgatgaaaaacccctttatgttttctttggattccggttgggtagtgacacgtttcgattctgtccgtactcacaattattttggagaagaggggaagattaacgtatgtgccggcagggaagagccttctgtcagcatgtttgcggagcaggttcatcctaaagatccgatgtaccgtcctttggtgactcctcaggagacactgaccaaacattttcgttggttctacacctattatacctatactggcatctatccggaattggcagataaaggccccgtacctctaaagaactacctgaatgaattggaacagaagctttggttccagggtgacgacacagcctatcgcggaatgaacggattggagatgaaagaattgctcgatcggttggaaaagaaattttacgactggtacaaccgaagtctttatgaattaagtttcgaagttgtccggccttttatcgctgagatagatcgggggaagtatatgtcccgtctggatgaagttaaggattcattgtatctcggctatcaacctaaagatgatgatccggatcctgatccggaactcatttgccaattgctcgatacgcattatcataccgactgtttttctctgctttataaggaaaagcaacaggaagtagataaacgctttgatgaagagacacgtccgattgaattgttcggagccgtgattcaatatgaacttaaaatgcccggacaaatgatctcagccaatacaactttcagagatcgcgaatatctggtttggaaagtggatgcttaccgtcttttggcgggtgaatattccttgacggcccgatcacgggtacccaatgtctgggcctttattcttaccggtgtactgattcttttgggaataggcttttggataaaaaagcgatgaataggagaggagtgagataatgtcagaactcactacagattacgcagttcttcacagattattcatgtggtcatccatgatttaaattcactctgtgttactctgtgtgctctgtggtgagttctgacagctcttgtttttatcgtttataaatcaacttattttttccttctccaaaaaggttatctcctatcgttgtgattttgtctccatgagcaactacgtaccgcaacctgtcgcatcccatgaaagctccatattcgatagcagtaatgctttccggtagttctaccgttccacagagacggccgcaattgctgaaagcccgttgtccgatgctttttagtccatgtggcagacggatgcggagcagatattttttttgtgagaaagtaaagtcggggatggccgttgcattggttttttcaatgtctacagctaccagattcggcatataatcccgtatcaacttgaagtcggctgcatccagcttgccttcgatggtcaggaagttgatttctttcggctgtagtcctgctttctgaatttcattttccagtgtgctcagtgctcctacctctattttagcttccagtggttcgccttcgatgaatgcaaagttatcccaacggtttttcagccggtattcatcgcttgctcccagtggtacaaagatagcagtgatgctgtctgccaatgcttccggcagtaggttaggaggagttttctttttaatctggcatatattcagattttcgcagcccataaaagccgcatcttcaatgtttttgatcttttccgaaagaatgatctttttcagagtggattttcctttggcagtgccgttttccatcttacagaaagcgtatgccggaacaaaattcggcatataaatatagaacttatccggataggtaccttctttacccgagtacatgctgatgctcgcattagctatgtcgagcacttgtaagtttttaaattcatcgcgcagatgtctgaagtccactgcattgatctttccggtcagggtcaggtgggtgacctggttcgcttcctcttccgtcatcatcgaaatcaatgttcccggtttgctgacgaaatacgttttcttaacttcttgtgccgtagctgcaaatagattggcagtaagggctattcctataaacagatgttttattttcatatttatgataaatgtttagacaaatatagcgaatcatactttatctcgtccagagttttagaaaaatatagttatttttgtccttcaaccaataaattaacaaaatggaacaacaggatcacgaatcattcttttctccgaaagggattccggcatttgcaagtattattatctttttggtaagcttctttatcgtcatgtccctattccgttccgttctgaatcttttttcggtagtaagagggtacggaatgggttatttctttattggagaggggattatgttgttgagcgtatttattgtaacctttctgatgatgcgatttctggatcgccgtcccttctccgatttaggattcaacctgaaagggcgtggcaaagatattctctacggtttcctgatggcagtgctcatttatgccattggttttggtgtttgcctgctgaccgggcagattgaggttgtcggtgtccatttgcattggagcgatttgctcttaagcgggttgtttttcgccatggttgccattgtcgaagaaactatgatgcgcggatatgttctgggacgtttgttgcgtacgcgtctcaataaatttatttctcttctcatctcttcccttttgtttgcgttgcttcatctgatgaatcccaatgtggcttttttacccatgctcaatctggtgttgggaggtttgttactgggagcttcctatctttacacccgtaatctttggtttcctatttcgcttcatttcttttggaactggattcaagggcccgtacttggctatgaagtcagtggcaatcgtttctgtgaaaccttgttttcacttcgcctgtctgcaaataatctgattaatggaggggcatttggttttgaaggttcgttggtttgtaccgtattggcaacactttttacactattcattatctggtggttcgaacattcatcacaggggatgcggaggtattaaggttattgcttggatacttttctttttccgcatttggaaatacgaaatgagaattgttaaatttcagctctctgtcttgtacggattggcatcggcaaatgatattttgaaagagttattgcatatttgcgcaaaatgaagaactaaatgcgtaattaaggataaaaaaggaatttgaatcctttatttttgccatatcaaacttttagaataatctactatgggacggaagtatttgcaatccttttatgtattggccttgattatatcggcattgttctttcctgctttttctggagataataatattaaaactgccggtgccaatatgagctatggcaatagacttgtaatgcagacaggacataaatctgcaaatcttgtttccggtgtagaaaaagttgagtggatgaaggtacttcaagatacgcttcctgtctgtaagatatctattcccggcacgcatgatagtggttctaccaagggaggatgtatgctgaagacgcaaactgcggatattcccgctcagttacagaaagggattcgggcatttgacatccgtttgaaggagaagaatggtaaattaggagtattccatagtcatgcttttcaggatatatattgggaagaagatgtattgttggctttcatcagtttcttgcaagcgcatccttctgagactttaattgtgtcactgaaaaaagagggaggggagataaaggattatgcctctttattatctgcgtctttgaatacgcctgcatatcagcgttattttattgcggatttccatccggaactgacattgaaaagttgccgtggtaagatactttttttgcatagagatcatgcgatggataattacccgggagccgcctgcatcggttgggatgataatactacttgcctgttgacccttcgtaataaagatggtaaagaagctactgtttttcttcaggatgaataccaatacaactcgggcaaagaagcgggtaaaaagattgcggcttgtattcgtaattttgatagaatatgtgaagaacaaactttttcacgccggtgggggatctcttttgtgagtgctaccggactgcattcgggaataccgctggttttcgcgaataaggttaataaaccagtggcggattatctgaaggagaaccgtaaacgaaattgtggcattgtattcattgattttatagaaagttcgggaggacaaaaattagtggaatatctcattggaggtaatatctattgatgctattctcctgacattatcagttagaatcagataataagttttcttttattagttactatgcatatttgcgtaaaatgaagattaaaatgcgcgaatagtaacatgatagaaaattgctatttgtagtttgtatatattaaaaacctttaaatggatatgctatgaaactgtcaattgatttaggaggaacaaatgttcgaattgcccaagtggagaatggtatctgtttgaacaagatgtctgtaccttgtcttgcgcaacaagatgcttcagcggtacttgatcagctttttcaacttattacgggtatgatgaacgtccaggtggatggtattggtatcggtgtcccttcaattgtagatgtggaaaaaggtatcgtgtataatgtggcgaatatatcttcttggaaaaaaatacatttgaaagatatattggaaaagcgatttatggtgccggttgctattaacaatgactctaattgtttcactttaggcgaaagtatgttcggcgaggggaagccttatgcccatatggtgggagttactattgggacaggtataggtgcgggtgttatcattaatcatcggttgtattgtggtcaatatatgggggccggtgaaataggctcgcttccttatctggattctgattttgaacattattgcagtagttctttctttaagcgacatgacacgacaggtgtagtggtagccgaaaaagcagaacggggagatggggctgcgctggaaatctggagggaatttgggacgcatctgggtaatttgatgaaagtaattctcttttcttatgctcctcaagctattattttgggcggaagtatagtatcggcttttcacttttttaaggatactatgaaggacgctatgcaagatttcccttataaaatactattggacaatgtgaaaataattacttcatatttgaaggatgctagcttattaggagcttccgctttgtttgagaaacaatatttaccaatatctattataaacaattaaaaatatcataagttatagacttattatatttacttctatataagaatgtaagaaaaataaccgctttgcaatacctgcgtaattctgttttgagacctttgcaacagaattataattttttatattataaactttaaattttgaatgcatgaaacaagtaaatcttagaatctatcaaactattctgactttattagtaggactgtttctttcggcaggtgcttacgcacagcagatctctgtgaggggaatagtaaaagatcagatgggggaacctgtgatcggtgccaatgttctcgtgaaaggaacttctaatggagttattacagacatagatggtaagtttgcattgtcggctgccaaaaatgatatcttgattatcagttttgtcggttttatgagtcaggaaatcccggtaacgggaaaagatttgatggtaactttgaaagaagataccggacttctggacgaggtggttgttttgggatatggcgcgaatgcccggaaacaagacttgtcagcggctgtgggtgtattgagtaacacggatgacttgacggtgcgtccggttagctctacggaaagtttattgcaaggtcagttagcgggtgttacggtacaatctaatggcggtgatcctacatccactccttctattgttattcgtggacaaggttctcaaaatggtgacaacgtactttgggtagttgacggcgttccgggtgctcctattgcttcaatgagtgatattgaatctattgtcgtattgaaagatgccgcgtctgctgctatttatggtgcgcaatcaggtgcgggcggcgttatcctggttactaccaaaaaagctaaagcgggtattcctactcttagctatgaaggtacttacggcattcgccaggctacaaatttgccggaaccgttaaatgccgaggaagagttggagatgcgtaaacgctcttatgccaacgcgaatgtgactttacctgacggttggaatatagaaaagaatccatggatcggtactacccgtacaaactggatggatgagatttttcgtacagctttctatcagcgtcataatattgctttaaatgtaggtaccgacaactattccagtcgcttatctttttcatttgataacgatgaaggtgtattgattaatacttataataagaattatgcaattcgttataatggcaagtttgatttgaataagtgggtatctattagtgaggatttggtatggaagaatactgagaatcgttcaaaagatacaaacgacgcttatacaggtcctgttttatctgcaatttatatgccggcaagtgctactgtctataatccgttggatggtacttggggaggtactactacggaggatcctgaatacatagctaaatatggaagcaatttcgccggtgctcatggtgatgcggtcaatccggtacgtttactgagagctgaaaaccgttttaatagaaccagcgatgtgtggagcactaccagtttgcagatagccaatataatacagggcttgaagtttaccagccgttttacttataatctgaaaaccaataattataagaacttccgtcccattcaagatgaaccgggtaaacctaataattcaaatagcctggatgtaaccaactaccgtacagatgcttggaaaacggagaatactctaacttatgataatagtttcggaaaccatacagttggtgccttattctctactacagccgaccattataatgtacgcggactgaaagtaaatggtaagaattttgctgatgaaagtccgtatctgcagtatctggcatatgcaggaactacttctgctacagattatttgacagggcctgatgccaacgtttcattagtagctcgtctcgcttactcttatgatgatcgttattttgtgacggcatcttggcgtcgtgactatgccggtcgtttaccgaaagagaataactttggtgatttccccgcagctaccttagcttggaagatttctaatgaaaagttctttaaaaagagtgatttcatcggtatgttgaagttgcgcgcttcttgggggcgtgtaggtaatttgggttctattgactataattacaagtcactcttattaggaacatcatactggcaagaacaagctcaatatggtgtgataaataatgcaacctggaataattttgtatataattccactgcaatgaataggaacttgacatgggagacttctgaacagtgggatttaggtttagatgttgaactgttcaaaaatcgtttggcattgtcttttgattactttgataaacgtacctttaacttgattcagaagcaaacaatgaattggccaagttctatcggattggacccgttgttgattaatcaaggtgagattcgtaatcgtggtattgaaatacaggctaactggaacgatcgcgttaataaggatttttcctacttcgtgtcgggtaatttttcatatctgaagaattgtgtgtcagatattggcgtaaagaatgctgatggtagccccggcgtatggacagatagtgattctaaattccgtaacataccttatactcgccagactgccgagggagagcctttgaactcttactatctgattaagactgacggtatctttcaaagtgatgcggaagcggccgcttatgtggataagaatggaaaacgtatccaaccgaatgccgtagctggtgatttgaagtttattgactataataacgatggtaagattgacgataaggaccgccaatattgtggaagcgctactccaaaaacaacgtattcattttcatttggcgctacttacaagaaattctcttttagtgctatgttccagggagtagggggtgctcaggcattttacgctgctaaatctgtaattctgagtgatgcggatggtaatttcaaccgcgtaaaagatattttgaatgcgtggagtcctactaatacatcttctaatattcccagactttcgatgaatgacccgaactccaatttctctacggcttctgactggtatctggaaagtgcttcttacttgcgtcttaagaatttgactttatcttatgatttgaccgatgttcttcaaaaatggtcacatctaagggaacgtaacagtcgtatgtctgtttatttcagtggcgagaacctttttacgattactgattattccggtatggatccggagtgcggaggatgggatgctatgaagtatcctgtatccagagtattttcttttggtgttaaactaacttattaataaaaacagttatgaaaaaatatataccattattggcgttatcggcactaaccttttgctcttgctctgactttttaaatgtgcagccggaaggtaatcctgccactacatcctattttttgaatgatgaacaagcgattgatgccattgacggactttatgctcctattcatcaggaaaaaggctttggacgtgagttgttttgggaacaaggtgctgcttgtgatatagtatgggctaaatcacgtggtttcaactcgttagctacctttaactataacggtgatgaaagtcccatcagtggtggatttgacttattctaccaaaatatggctcgttccaactggattatcaagcagttgcttgccaaagagaaaaaaggtggactaagcgatgtagaacatcggagtttgggtgaagctttctttatgcgtggcatggcgcatttttggattgcttaccgttatggaacgaaagaccaaggtgtaccttttgtgcgctacgaagattttgagggcgattatgataattccatacctccacagcaggcttctgtaatagacaattataagtttattatagaggatatggataatgccatttcttatttgccgaaattcgaagaatattcagatgatgataagggacgtgctcacaaagctgccgctgtagcctataaagctaaggtatatgcctattgggctacatgggatgaaactcaatggaacaatgtaattgctatggttaattctctggaaactgattatggacgtggtttggctgatacttttgccgaagtgttctcttcggagtttacggatttttggaataaggaatatatttggtctattccttccaatggtggctctacaggcggcggtgttgaattccccggagtgattttggaagataaagcttggggtgtgtataatggctggggccacataaagccttcttacgatatttatgaagaaatggcaaaagacggtgctggtaatgatcgtctggtgcgttctattttggaatataatcaagagttcgaattttttggtgagaaacgtaaattctatactgatacaaacttggatgtaggtttccagattaataaatatatggacccgttcaaacataaggatgccgatactaaaggatacgttaacacaaatggcaactggcccactgctcgtgtaaatttcccattgattcgttttgcggaaatgctgctgttccgtgccgaagcctatttaatgacagatcaacctggtaaagcgaaagaagatttgaatcgtatccgcagacgctctaatttgaaagagttaatagatatgcctactatggcggatttatatcatgaacgacgttgtgagttggcttttgaatatactgaccatctgtttgatttgaaacgttggcatcgctcgtcaaatgttgtaatcaaagaattggctgcaaaagaattgaatgcccatcctcgtatccgtaagtatgcggaccgttctaatccggagtcaacttttacaatagagccatatgccgactatctgaataagactccttatcaagattatatgatggtatttccttatccggctgaacaaattactaaatcaaacggtaagttgatacaaaatgacggttattagctaatttgaaacatctaacttgatgaaacagaatacttttatatatgcagctattgcgttttttgtttgtagctcttgtacatccggtaaatattctcctgttgactatgtagatccctttattggtacaggttttcacggtcatacgtatccgggggcaactgttcctttcggtgcggtacaattgagtcctgatacccgtgcgggaaattgggatgcctgtgcgggatatcactatgatgatacaactctaaaaggcttttcgcatacacatctaagcggaaccggatgtattgatttgggtgacattttgtttcgtcctacaactctaaaaccggatctgaccgccgaaagcatttgccgaccggctaatttctcacataaagatgaaagggcgtcggcggggtattattcggtgatattgaaaggtgaagggataaaagcggaattgaccgcaacaactcataccggaatgcaccgttatacattcccttccggaaaacccgttactattattgtcgatttggctcatttacttgacaatgaatatatctatgaagcggaattggaacggacaacatctaatgagattgtgggaatgcgtagaaccagaggttggacagataatcaatatgtttattttgcagcccagttctcagaaccttttcaaactgttgagtttgtacaggataagaagatagtttccgccgaaaccaaacaggtgggtactgacttgcaagcgattctgacattcgctgacaaagatggagaacctataatcgccaaagtaggattgtcattggtaagcgtggacaatgcgcgtaaaaatttggcggaggaagtgaaagacttcaattttgatgctgtgtgtgctgccgcccggaatgactgggaacaagcgctttcatctattactgtcgagggaggcggtacagacgatttgaaaaatttctatactgccatttatcatgctatggttgttcctaatgtagtgagtgatgtcaacggtgaatatcggcggcataatatgcagataggacaattgccaaaagggaaaatgcaatactccactttctctctttgggacactttccgtgcatggaatcctttgatgacgttgattgatactgcattagtcaataatatggtgaactcttatctggatatttacgatgcttccggagaacttcctatttggccgctttctgccgcagagacgggaacaatgataggataccattcggtgtctgttattgctgacgcttatttgaaggggattagaggatttgatgcggaaaaggcattggatgcaatgaaggtttcctctgaaaagaataaaaaaggagcggattactatataaaatatggatttatcccttcgaacataaagaaagaatctatatcttgcttgctggaatttgcttatgatgattggtgcatagcgcgtatggctcaagaaatgggaaaagaagatgtttatcggaaatatattgaacgttcccagaactatatcaatgtgtttgacggttctaccaaattcttccgtggaaagcggatggatggcaattgggagacttctttcaatccattcgaggtaggacgttcctatacggaagctactgcctggcagtatcgcttttccgtaccctatgatgtgaacggaatggtgcaattgtttgggggcaaggaaaaatttatcactgcactcgattctatatttatcgcagacccaaatgtgcatggtgatcttgcggatattacagggttgataggacagtatgctcatggtaatgaacccagtcatcatatcgcctatttgtatgattatgtagggcagccctggaagacacaggaaatgacacgccacttacttgatgagatgtaccaacctactccgggaggtatcagcggcaatgaagattgtggacagatgtccgcatggtatatcttgtccggtctgggcatttattccgtttgtccgggaagcaatgaatttgcattgaccacccctctgttcgagaaagcggtgcttaagttggcaaatggaaagagactgactttgcttgccaatgatccgaagaagaatatctatatccataaagtagagttgaatggaaaacagatagatactaactttattacttacgctcaattgatggaaggaggagagcttcgctttactctatcagacaagccggacaaaagcagaggtatttcggaagaggcttctccttattcttataccaaagaaaaagtggtttccattccttatgtagatagagatctgaacttgtttatggataaggtgacagtagctcttgccacaacgaccgagggcgcggagcttagatacactctggatgggaccgaacctacagaaaagtctttgctctacgataaaccatttaaagtagatatgactacacagattaaagcaaaaggatttaaagaggggttccgcccgagtagaactttgtctattacagctactaaagctgaattgaaagcgtcgcttccggtacatccttcacggaacggtacatcctataaatattttgaaggaacttatcaaaaagtggctgatattgaaaaaactccattgttagaggtaggtgtattgccggaaccctctataaaggaagcaaaacagaaagatcatttcggttatatattctctggtctgattaatgttcccgaagatggagtttatattttccagactcgttcggatgatggtagcgttttgtatataggcaatgaattggtggtgaacaacgatggggcacatgccgctattcctgctacaggatatattgcgttggaaaagggattccatccgtatatactttattattttgaggattatgaaggggagcatttaagctggttctggaaacttccttctgcaaaggaattagcaccgattcctacttcagccttgtttgtaaaataattaatgacataatgccatggaaaaaataattttattagttttgccatttttcgctgcatcatgcggcctagtgaaacaacaggcatctgcaccggagcctgtcaacgtcatgtctttcaatattcgctatgataatccggaagacagtctggacaattggagatacagaaaggatcgtgtggcaaatgctattcatttctacgacgtggatatattgggtacacaagaagtgcttcataaccagttggaagacttgaagctgcgtttgccggaatacggcgtggttggagtaggccgtgaagacggtaaagagaaaggagaatacagtgcactttggtataagaaggatcgtttcaacgtgcttgattcaggatatttctggttgagcgaaacacccgaagtagccggttcaaaaggttgggacggtgcttgtgagcgtatcgcttcatgggtcaaactgcaagataaggtttccgataaagaatattttgccttgaatacccatctggatcatgtgggggggatggcacgtcgtgaaggtataagccttatgctggatagagtgaatgagttaagtgatggattaccggtaattgtgaccggagatttcaattcagaaccggaatcagatgtgatcaaacacgtcacagattctgccaatccggaacatctgacggatgctcgccaggcatcttccattgtttatgggccttcctggagctttcatgatttcggaaagattccctataacaaacgtccgttgattgactatgtattcgtacgcaacggtcttaaagtcttgagatatggtattttggctgaaacggaaaacaacggttttttgtcagaccatacgcctgtactggtaacggttgaatagtgtataaacttaagaaagagacaacttagttaaagtaatgataacaatgaaaaatatattgagaaacttcgtattcatagtttgggcagttgcattattgcccgtcaatgtgtcggcgcaaaatcgtagagacaaggagcaaacgtatgtattggaacaaccgtatgaagtaaccaagataactccttctcaaggaaagaagataaaaaatgtcattctgatgatcggagacggcatgagtcttatgcatgtatattctgcatggacagccaaccgtggtaaactcttcttagacaactgtcaggctgtaggtttgtcgaaaacttactgtgcagataaactgattactgattcaggagcgggggggacagctattgctagcggacagaaaacaaactatcactatgtaggtgtagatactttgggacatcctttgaaatcattggttgattttgctgctgccaaaggcaaatctacgggaattgcagtaacctgccgtctttgggatgctactcctgctgatttctgttgccataataaagaccgcgatgctgagagtgagattgtgacagattatgtgaattgtaatgcggactatgtatttggtgggggtgccaaactctttgaaaatcgcgaggatggacgtgatctgttcaaggagttacgtgaaaaaggtttccggactccccgtagttgggatgaactggcaggtataaagagcggtaaagtattcgcagttccttatccggtagacaccccgcttcctgctgaacgtggtgacctccttgcacgtgcttcattgaaaggaattgatttgctgaatcagaacaaaaatggtttctttatgatgattgaaggttctcaattggatgattacgggcattttaatgatcttgatctgctgatgcaggagacacatgactttgaccgcactattggcgctatttatgagtgggcagccaaggatggtgaaacactggttgttgttactgcagaccatgaaactggtggccttacattagtagatggtgatttaaaggagggtaaaatcgtatgtaaattctctacaggcgggcatagtggtgtgatggtgccggtatatgcttttggtcccggagcacaggaatttaccggaatttatgagaatactgctatctttgacaagataaagaaattactcgatctttaaactaaaacaatatttcccatgctgaaacacattttgtttacatgcttctttttctttacggcaattccgttgctgaaagctcagggctgtggcaatgatgaaaaatatcatttgccttataaaaacacgtatgtaaaagaacctttggtagccgagaacgagtaccgcatagccaaacccaaaaccgttgaaccgaagagtttcgaagaagcccggcagattcttcctaatcctatttgggccggacacgaaaaggaacttgaaatgtattggagagcatgggaaatagctgttggcaatatccgtgctcctcaacaggggtcaggtttcgtatcaagttatctggatacggcttacaacggtaatatctttatgtgggattcttctttcatcctaatgtttgcacgatatggtacacgcttcttccctttccagcgtacattggacaatttctatgccaagcagcatcccgatggttttatctgccgtgaaataaaggccgacggagccgattgcttcgagcgttacgatccggtcagcactggtcctaacttgatgccttggtgtgaaatggtttattattaccagttcggtgatacggaacgcctgcataagatattcccggtactttgtgcgtattacaagtggttgaaactcaaccgtacgtggcgtaacggaacttattggtcaagcggatggggaaccggtatggataatatgccccgtgtgcccgaaggttatagtcctatttacagtcatggacatatgatttggctggacaccaatctccaacaactgtttacggccaacttgttacttgagatgggattctatctcgaacgttggcaggaaatagaggaattcgaagatgaggctaagatgttagggaagtatatccatgataatctttgggatgaaaagaccggttttctgtatgaccaatatgctgatggtacactctgcaaaacaaaaggaataggtgcctattggacattgctcactgatgtgttggatgataaacagcttgaccgtatggtgaaagaattagataatccggcaacgtttaatcggaaatttcgtattccctctttgtcggcagatcatcctaagtataaagagaacgggcgttattggcaaggtggcatatggccgggtaccaactatatggtgatgcagggacttgtaaagaagggatatcataaattggcccgggagattgctttgaatcattatgccgaggttctggaggtatataaaaatacagggacattttgggaatactattctccggagaaagcggagcctggatttatggcgagaaaagaatttgtgggctggactgggcttcctcctattgccgaactgatagagtttattatcggcattaggggagattatgtcaatcaacagataatctgggatatgaatttgactgaaactaatggaatagagcgttatcctttcggttcggaaggaatcataaacctgaaagctgaggcacgtcgttctgcaaatgatgaaccacgtatcgctgttgatacgaatatcggttttgagttgctggtgctttatggtggtaaggaaaagaaggtgaatgtaactcccggtaagcatacctattaaaaaagattgtctatgaaaagaaatatgtcgcggcgtcatttcttgaaaacaggaggactcgctttggctgctatggctatgtgcccacctttgtcgtttgcctcctccgaaatgccggtgcagaagtacatttctctgcgtcctcctgtgggcaaaagacattttgtatcgaaggcggtagaggcaactattgagcagaccaggccaaaaataaaagatgagaagttgcgttggatgtttgagaactgtttccctaatacgctcgataccaccgtcaggtataaaatgaaggccggccggccggatacattcgtcataacaggtgatattgacgctatgtggctccgtgattcatctgcgcaggtatggccttatttgccattgatgaaagatgataaggaactgcaacttttaatagcggggcttattaacaggcaggcggaatgtattcggattgatccttatgccaatgcattcaatgacggtccgttgggcagttattgggagactgaccatacacagcatatggtgaaagaactgcatgagcgcaaatgggaaatagattctttatgttaccccatacgtctggcttatcactactggttgttgacgaaagatatttccgcatttgatgcagattggcacgagactatgaagctggtagtgcagacctttaaagagcaacaacgcaaacaaggtttggggccatacagttttacgcgtgattgtgaccgcccgactgattcacaaattaataacggatggggtgcgccggtaaaaccggtgggtttgatcgtttcctctttccgcccttcggacgatgctactcaatacggcttccttattccttccaatatgtttgcagtggtgtcattacggcagttggcagagatagaacgtgaggtttatgataatcttccctttgcggaagaatgtactgcattggcggatgaagtggatgccgctatccgtagatatggaacattcaatcatcctgtatgcgggcggatatatgctttcgaagtggatggtttcggtaatgccctttgtatggacgatgccaatgttccttgtttactggcggctccttatttgggctactgttcgtttaaggatgccgtctaccggaatacccgtaaaatgatatggagtgaaaacaatccttatttttttaaaggcaaagctggtgaaggtgtgggaggcccccatgtggggttgaactacatttggccgatgagtatcattatgaaagcttttacgacggatgcccctgaggaaatacgcagttgcctgaaacaattgcgtgatacggatggcggaacaggttttatgcacgaatccttcaactcggagaatgccgctgatttcacgcgctcttggtttgcctggacgaatacattgttcggtgaacttatccttaagataatccgggagtatcccggccttttatcccaagcattatgaaaatggcttattggttgcttactgtatcatttgccctttttcagtatggagatgaagtagaaatatactaatatcaaagaatcatgaaaaaattaattatttttttattcgtgttgtcgggttgtgtcccggctgtggtttttgcgcagcaacaattctcttttaaagatgggaagtttaaaattgcccaatttacggatttgcattggacaccccgatctctggcgtgtactgaaacagaagcgaccatctgcgccgtcttgaaagcggaacatcctgatattgccatattgagtggagatgtagtaactgaagatcctgccattgatggttggaagtctgtgattcgtatcttcgatgaagctaaggttccttttgtcgttactatgggaaaccacgatgcggaacacatggcaaaggacgatatctatgatcttcttctggagtctccttattatgcgggagcaaaaggaccggaaggcatcatgggatgtggcaattgtgtgataccggtttatggctcgagaaacagagagaaagtagaagcattgctgtattgtatggactctaatgactatcagccggacaagctttacggtccttacgactggattcactttgaccagatagcatggtatcgcaagcaaagtgcccgttttaccaaagaaaacaatggaaaccctgtgcccgcattggctttcttccatatccctttgcttgaatacaacgagatagcaggtgatggaaagactttcggtaataacagggaaggtgaagtcacttctgcgaatatcaattccggcatgttcgcttcatttattgatatgaaggatgtgatgggtgtatttgcgggtcacgatcatgataatgattaccttggaattaacaaaggcattgtacttgggtacggacgtgtaaccggtgcggatgcttatggtgaactgacgaggggagcacgcatcatcgaactgtacgaaggcaaattcaggtttgatacatggatcactacaccttcgggacgtgaagcgacctattattatccttccggcttgaattcagaggaagaacggaccgcggactacctgccggcagtaaagaatgtatcttcacccaaacaaggggtggcatatacctattatgaaggaaagtgcaagcgggttgccggcatcgcttcttgtcttaaagtaaaagaaggggttatgaagaatatttcgatcaaagaggctgccgttgcagatcactttgcctatgacttccatacgttgatacagattcccgaaaaaggaatataccgtttctatacattctcggatgacggttcaatgctttatattgacggtaaattggttgttgataacgacggtggacatagtgcccgccgcgccgaaggaaaaattgctcttgaaaaaggttttcatgagttgcatttattgtattttgaggattacatggggcaggaattggaagtaggattctccggactggattttccggaagttcctctgcaggatgaaatgctgttcttaccgaattaagagagcgattctttcaatagttatcattggacatcatccggtgttctttcctgtattcatagggagagacgttctttaaagttttaaattggcgggacaggtttttgagattatttattcctacttgttccgccacatctgcaatcggggcgtcgcttgccagaagtaattgtgcaaaacgctcgatcctgagatttaagatatatttgtgaatggattgcttggtgacctctttgaaacgtatctccaacagacggcgtgataaaggcacttgcttgacaatgtccgatacagtgatgtcattggctaagtttcggtggatatatttcaaagctgtgtgaatatgtgtgttggtggtagagtaaaagtctgttgaaagcctatttactatatttaccggttggagtaccacgtcttggtaagaacattcttcgtcgttcagtaaatgttctataagttcggcagcttcgaatccacctctcacaatattttgactgatactggataggggaggatcagacagattgcatattatttcgtcattatcaacacctaatatggctattttgtcgggtactctgatattgttaaccttacagatttcagtgatgcggttaccttggttgtcatcacaagccataagcgccgtgggctgtggcaatgattttaaccatgtaagcagaggaggagcttcataaaaccataaatcatcaagtgactgctcttgataggaatagaaattattgccgaaaccatgttcggctatacactcgtagaagccttcgcaacgttcctgcgaccaaacggtatcacggtaaccatagaaagcgaagttccggaatcctttgcttaaaaaaaactctgctgccatcctgccggttttgtggtagtcgccggtgatgttgggaatattgctgaatcttgatttgtagtcttgcgcaattgcgataattccgtttttacggaacaactctacattatcatcattatcaaatctaccgataatggcgtctgcctgccacgcttttgcccatttcagaaccccttctatcccataagtaagtttataggaaggtggcatccggcatacaacccatggttcatgtttttttgagtatgccaaaacccctttcaataaattgtatgaaaaggattctgtaaagtcagtcaatagtatcagtcgaatcatggtatctggtaaaatcaaaataaatgaaagaaatagctttaatttggtttagaagcctatcagttggtcgtttcttatctccttttgtctttgaatataacgatgaaatcgtacttaaagagtaataaaatgggatcttacatatcgacctgactgataaacagtggcaagttatagaaaatcttttagatgacaaaggggcaagcgtaaatattctctccgttccacttttaatggtattgtttacttggcaaagaccggaagcaatggtgtatgcttcctaaggagttgccccttgggaaccagccaaatgtcatccgtttgcagaataatggcgcaaaaagatagcgagtatccgctttttgataacagatccctttgttgtttctgacattccacagttctccactgtctggtcgagtgattttttcaatttggtctggtctacatcatgctggtattggccgacaccgatgggcttaggatcgatcttgaccagttccgccagcggatccatcagccggcgagcgatggagacggccccacggacggtgacatcataatcgggaaactcgtcacgggccgttttggaggccgagtagatggaagcaccctgttcgctgacaacaaagacctgcacgggacggtcgaactgttggtgcgtgacgaagttttccgtttcgcggctggcagttccgttaccgatggcgatggcctctatcttgtaagcttcaatcattttgcggagtttcgaagccgcttcggtttttttgtctaccggcgggtgaggatagatgttttcattgtgtacgagattgccttgtgcatcgaggcagaccaccttacaaccggtgcgaaagccgggatcgatacccattacccgtttttgtcccaagggtggggcaagaagcagttggcgcaggttttcggcaaagacccggatcgcttcgtcatcggcctgttcttttactgagggaggcaaattcggtttcgatggaaggtttcagcagacggcggtaggcatccgcgctgatgacagcctggcgggcaaagagattacgcactgcattacgggcacgttcgtcttcgctcacctcggtgtccatttgcattggagcgatttgctcttaagcgggttgtttttcgccatggttgccattgtcgaagaaactatgatgcgcggatatgttctgggacgtttgttgcgtacgcgtctcaataaatttatttctcttctcatctcttcccttttgtttgcgttgcttcatctgatgaatcccaatgtggcttttttacccatgctcaatctggtgttgggagggttgttactgggagcttcttatctttacacccgtaatctttggtttcctgtttcgcttcatttcttttggaactggattcaagggcccgtacttggctatgaagtcagtggcaatcgtttctgtgaaaccttgttttcacttcgcctgcctgcaaataatctgattaatggaggggcatttggttttgaaggttcgttggtttgtaccgtattggcaacactctttacactattcattatctggtggttcgaacaataaaaaaatgtcccatgttccgctgaactttgggacattgataaaacaaacaccacatttacttcacagtaagttagagtggaaaagcaagagcgcatttacttcacagtaagttcgttgcgcactattaaacacaaacaaaacaaaataaaagctgtacaacagccattataacacttgcatcaatgtatgtttatattgatttttccataacagagggcataaagtatgtgggggtgaatcttattctaaaatttatacgtcgttcccaccattaaccctactgttccccgtatgggttcctgaaggtctgcccgataacttctgtctttgaatatattgatccggggttccagccagagtccgctatgtgccgatagcctgatttctccctgtagtccgatgcgtccgttcaagataattgaagacgatgattccgctccgggaaaatagctcccgatgccgcctgccacgatcaggttgaacacgtggctgtcccgatcggaaaaaagccttgtgaggctgcacagatagtcaatgttgaggctgatattaaaatcgcggttgctaccgctatcttcattatccaaaaaagcggtactactaccggcactgatccgcatcccgttaaatttgtcgaaccatttacctaaagcgaattccgtgtcgaacaatacatttccggtgtttccggtaccggctgccagcgaggcaaaacctcctttaaggaaagtcagggtagcgtatcctgccggtttgtaagtaatacctgccattagtgatcctgccaggttatatcttttccacgatgactggttgtccacccggtccggataaagtgccagttgtggctcgataaacaggttaaaagcagacgatacattcagtttcccttgtagtcctgccctcaatccgtatgaatggattgttttttggtcttttacgatagtggcctgataactgagtccgagagcgccgatcacttcgaatactcgcttcgggttgtatctggcggcaaatgcactgatattgatcaaatagtctacattggctcctgccagatgcatattcgtatttccctgtttccattgtgtatattcccctccggcccgtagtcctatgacgggggtcagccaattacctgccatgaatgatgcccgtggcccgtgggcggtttgtccgcctcctacgttaaacagataaccgatacccgatccgacagagaaaaacagatgttccgatcctctcttcgaatggaacttttctgctccctttcgtttgggcatcaaatattctgaggcctttatattgttttttccttctgttgaatcttgcttttgctcttgtgctgccagagttccgcataagatgaaaccgattcctagcagcaggattcttttatagctcttttccatattcttcattgctttatcgttttttcttcattcaagccgctctcttccgtttcggtgtcttccgtttcgtttttttcttttgttttctccgctttttccttcagttctttcttttcatcttccaactgttgcagtaggtcggttacgtctccgtctatctgcgcaatctctttcagtgacggatcttcgttcagggcccgtttaatgaaagcgtatgcttcgctcactttgtccaacctgttggcacatgccgcccttagataatagctgagtggttcatccggtagttcttgtgccttttcccatgcttcttcattttgcttcatggccattaataataccacttcatttatgccgccttgcgttccgaaccgttcataagcatcctcaaaatgcccgttataagctccaacgatggctcttacgtcttgtgtcatgtcgttgtccggcagaaagtctataatcgagtccgcccggttataagctctttcgtccattaaggcgattacctgattacagagtagttctgtgggagccgatctgctgacaaacggttccagcaatttgctgtctgctttcttttgttctatcagcaacgcagccaattcgttggccataatcataaatttaggatattgttccagtgcctgtcggcagatcacttcgcgtgtagagtcattatcggcatccaggtatatccgccaaaattcatagggtaccaattttttatagtcctgtttatacattatgcgtatttcttcatcgttcagcaatctcatcaccgaatagttgaaactatattccacccggcgcagccgtggtaagtaagtcgttagaatgacattccgatattccggtagtcgtaggatccggctgtactgtgaggccatgttgtccggatagcaattgatgatttcccgtaacttgtctgtaggcagtgagtcgcgttccatcaattctgctacctcttcccatgaggccaccactccttctgtatatgtactgtcttttattgcgtttatagtacctccgttcagaaaaccaaagatacgtttcagcgtactgtccgtgcgtttttgtgccagtttcagattcgattgatacggaccttcaggcgaagatacccctttgaccgaaaacgacaggaattccgagttcggatcggtttctatttcctgcaggcgcaagcgcattttctccaattctctttggttgttcggatctttttcgtctatcgttgccgagttgatcaggaagttcagcttcacttctcctctgtcgcctctttgttgtttttgaggtttagggatgtatttttcatctctgattttcatgccatctgcttggtacgtaaagaaacgcatcggatttaccgtacctttggctatcactaccgtatctttgtatgccagttttttatattctaccagatacatgtagatgtcacaccggcattcatcgtccgggttatccatatagagggagtctacgtaggcaatcacttcattcttatcaatcttttgcgttttctcctgaaaagctgctaacggatctctgctcaggtcgaattccatcattcgttccaatgtgatggcatactcctttccggtcaccactgccgggcggaacaggctctgtgttttacgggtaatattcaccaacatcggttgcactacgatacgtgtattcggcttatacatttctttgggaatttttactttagggtggatgatgtattgatttccgacgatttcgatgtcggttggttccggtagcagtttgtccaccacttttttggcggtgatcaccacttcgtcaatcatcgatgcttcgtatgagatcactacgtttatcgttgtctttccttttagttttaccgtttttgatgcgtaggcaaatcccgagaaatgcagggtcgtattgggatctgccatgatcttgaactttccgtcgaggtctgtgatgccgtatacatctcccttttcattctgatctctgattacgatagagatggcaggctctccctcgtcatcgattacgcttccgcgtatttctactttctgggcttgtccccatgccggaataatggcgtatagggccattatccccaatagcaaaaatcttttgatattcattagggttattttatttggctatataaataaaagatacacttagtttaaccggtatgggggcccatcccgattcattcggttcaccatgagtgcttcccggttggtagcgcaccaacctgtagcgtgccacacccacaccgcctgatacctcaaggttccagcgacgtgacagaatccagttgtatccatacgtgacacccgcggccgcggcatctccataatatgccctgcggtttattcccacatcgaacatggaatagaatcctgtgataccgatgtaatggcgtgccagcaggttccgaagccaatatttagcttcagcttgtatgcgtccatggcggtagaaaagtttatctgtaatcttccagggattagccgatgccgaaatttcagctgtcatccaatcgtttaatgggaattccactcccagattgggggatgccgccaaccattccagcgtattagtcttgatggccatgcgttgggcggatacttgaaaagatattgctatgaaaataaagagtatagcccgtttcccgaatagagacgggaaattatatccggctatctcccacaacaagttggggaaatctagttttaaattaaatgtattcataaacgcgctcacttctgtctaaagcgtgctgtcgtttattcttgtcaccgacaaatatagaggttttaatcgggactttccaaataatcaaaatctttttttatcagttctgataaaaaggtttgcaggtcggtttcctggttcagttgtaatttctgtcggagccggctccggttgcttctcacggttgaagtggctatgtattggagtgctgctatttcttcggttgttttgttttccagtatcaagcagcaaagttgtatttctttgctactcggttgcaggtgcaaagcattgaaagcagcccatagttttagctcggatgtcattcttgccttttgtcgttgcatggttcgtagtatttcctgtaatcttgccaacatgatgggaggaaagatatatgccactgccaggctgggcagactcatcaaataaagttcggatgatgtatagaccccgatgaacatatacaaaagaatcggggcgaaagataatatcattacggtgtgtcgactcacagagatggaagccagaccacaagtaaccataccgatcatcagatcttgcgacaaaaagaagccggtctcttccggtgggaggtagatacggcagtacattgatattaggatattgctttgtatggtataaaaggtgcatttcaacaagaaagttatctgtttctttttccgaatcagcaggtaagtgaacagtaagaataaccccagggataatatgttacataaagccagtaacaggtcttttctgatcaggtagacacaaaggtcggcgatgattccgatactaaagcagcccactgtaccgtaatagacgaaataaattgtttgtcgcttcggatttcttatttctttgaactgtagatatttcttttggatgtacttttttgtttttggcaaagacaggtattttgaattcatgtttttttaggtttcagtaatcaatgtttataaccagcccatgcaggcgagtatactctgatggacagactttcgaaa

SEQ ID NO: 4996 - DNA, 226 bp, Unknown
  gut microbiota DNA sequence
cctcccaacaccagattgagcatgggtaaaaaagccacattgggattcatcagatgaagcaacgcaaacaaaagggaagagatgagaagagaaataaatttattgagacgcgtacgcaacaaacgtcccagaacatatccgcgcatcatagtttcttcgacaatggcaaccatggcgaaaaacaacccgcttaagagcaaatcgctccaatgcaaatggacaccga

SEQ ID NO: 4997 - DNA, 35735 bp, Unknown
  gut microbiota DNA sequence
aattcgcatatatgcggtacgtgtcccatcctgataatagtaataaggtgtaagcgttcctgcctttactttcacttcaagcagggtatgcccttcgtgttctatcggaataagttgaacttccggcacagggtcaagtcgtgcctttatcatttcactgataaaatcagcatcggcttgtggattctccaaccctacaattacgccgtcatcattcactccatagaacaaactgccaccatccgtattggcaaatgccgacacggatttaagccacgactttactttcttacgctccaacatttccttgaaatcgtaagctgagcattccgctatcaatgtattgttatgtatttgcatagtttccttattgttgttcgggtataacatcccaatatcatatacaaaggtaaggattaaaccgaagaatctgttaaaaatatcgctttcttttgatttttatgcgtttacatctcgttgtttatgaataaaaatcgtacttttgtgaacaagagcgtgtgttgcttatggatgcttattttcgggtttgcgttatatttgcaacacgtgtacgcaagtcgctgatagatatatcacgttgattttgaggaagtgaagtaagtccgattatcaataggtctacatacaaaaggccgttacaagacaagtgcttgtgacggccttttttcgtttgaaccaattttaactcttcgtttgaaaccaagctatctcttagttgttgtacactgcaacggtataacggacagagatatgtttgggaaatcagatgatttaaaggatatgaggaaatggcgggtatggaagctgaagctgatagatgctcgtctttattttgtcagtatattcgtaggactgttgacaggactggttgctgttccttatcattatctgctacaattgtttttcaatacccgtagagatttttttgattcgcatccacattggtattggcatattcctattttcttgtccttatggggaatacttttgtttgttatgtggctggtgaaaaaaatgcctttaatcaccggtgggggcatccctcaaacccgtggggttattaatggacgtatctcttacaaacatccttttattgaattggtgtctaaatttgtgggaggagtgctggctttgagtgcgggattgtctttagggcgtgaaggaccttccgtccagataggttcttatgtggggtgccttgtatcgaagtggggaagagtattggccggtgaacgaaaacaactgctggcagccggtgccggtgccggattggctgctgcttttgccgctcctttggcttcatctttactggttattgagtctatcgaacgttttgatgcccccaagactgctataactactttgcttgcgggagtggtggccggcggtgtggcaagtatgatttttcctatcaatccttattttcagattgatgccatttctcccggactgactttcttttcacaagttaaactgttcttattattggctgcagtgatttccgtatccggtaagatttattcggttattactgtttggtttaagcgactttatcccgcaatcaagcatccggcctatgttaagatgctctatctcttgtttatagcttacttaatatcgcttactgaggtgaatttaaccggtggaggtgagcaattcttgttgggacaggcgatgcatgccgatactcatattatgtggattgtggggatgatgattctgcactttgtttttagcgtactttcattttcatccggattgccgggaggaagtttcattcccactttagttaccggagggttgatcgggcagatagtcgctttgattctggtacgtcaggggatcatcggatacgaaaatatcagttatgttatgttgatatgtatgtctgcctttctagttgctgtgatcaggactcctctgacagccattgtcttgattacggaaatcaccggacatttggaagttttctatccttctatcgtcgtgggtggactgacctattactttacggaaatgttgcagatacaaccgtttaatgtgacactttatgatgatatgattaattctcctgaatttcaggaagagaaacgttatacactctctgtggaagtgatgagtggttcgtattttgatgggaaaacagtcaatgaaatacagttgccggaacgttgtgaaattatcaatatacaccgggacaggaaagatatacccccggcaaagcagaaacttgttccgggggatcaagtgcagatcgagatggatgcacaagatattgaaaaattatacgagcctttggtaagtatggccaatatttattgagcttgttctctcagccaggctatttcttcgggccacagtgtttcgtcgatagtctccagaatcaacggcatgttgtcgaaacggggatctttcattagcttctcaaagaaagcgaaaccgattaatcccttaccgatgctgtcgtgacggtctacacgacttcccaattctttttttgaatcgttgagatgcattccccgcagatattcaaatccgaccacttcaccgaattctccgaatacgtcatcataatcattcagaaagtcataaccggctgtaaaggtgtggcaggtgtccaggcacactcctacacggcttttatcttccacgcggtcgatgatgtatttcaactgccagaattcatttcccaggttacttccctgtcctgccgtgttttcaataacagcggttactcctttggtcttttccaaagccagattgatactttctgcaattcggtccagacattcctctaccgatatcttgttgagatggcttcccggatggaagttcagtaattttaatcccagttgttcgcagcgttgcatttcgtcaaggaaagcagccctacttttagttaatccttcttcctcaggatgtcccagattgatcagataactgtcatgtgggagaatgtattcgggggcaaaaccgaacttctcacaattttctttgaatagacgaatactatcttcagttagaggcttactgacccactggcgttgattttttgtgaagagggcgaacgcattggccccgatctcatgtgcattaacaggagcaaactctactcctcccgatgcactgacatgtgctccgatatatttcataattcttttctttgatttgtctgcaaagataacatttccataacaatatatgttttgccccataacaatatatgtaatgagtgattacatatattgttatggggcaaaagctcagatggtcttaatgattaagctaagtttcctatttcgtccagatttttttggatatcatcgtctgtaagcgaatagtttaccaagtcgccggacagatatttgtcatatgaagccatatcgatcagtccgtggccggacagattgaacagtattactttctcttctccgctttctttgcacttattggcttcacggatggtggctgcaatggcgtgacatgattcaggagcagggatgattccctcaacttgtgcgaacaggcatcctgcttcgaatgattccaactgactgatatctactgcttccatcagtttgtctttcaggagttgcgaaacgattactccggcaccgtgataacgaagtccgcctgcatggatattggccggggcaaagttatgtcctaatgtgaacataggcaacagtggagtatatccggcttcatcaccgaagtcgtactggaacttgccccgggtaagtttcgggcaagatgccggttcggcagcgatgaaacgtgtctttttaccttcaagtatgttgtgacgcatgaaagggaatgcgataccaccgaagttggagccgccaccaaagcaggcaatcaccatatcaggatattcgccagccattgccatctgcttttcggcttccagaccgatcactgtctggtgaagggtgacatggctcaaaacggaacctaatgtatatttgcagttaggagtggtttgtgccagttcgattgcctcggagatggcagtccctaatgatccctgatgattggggtgtgcagtcaggatatcttttcctgcacgggttgacattgaaggggatggggtcacctgggcaccgtaagtctgcatgatactgcggcggtaaggtttctgttcatagctgatctttacctgatagacggctgcttccagaccgaagagtttagcggcataggccaaagaggctccccattgtcctgctccggtttcagttgttacgttttgtacgccttcttttttgcaataataagcttgagggatggcggaatttaatttgtgtgaacccatcgggctgacactttcattcttgaaatagatatgtgccggcgtacccaatgctttttccaaaccataggcacgaaccaatggagtactacggtaatatttatacatttcacgaacttcttccggtatttcgatccattggtcagtctggttcagctcctgacggcaaagttcttctgcgaagatcggatacaggtcttctgcctttaatggctgtttggttcccggatgcaacggaggcatcggtttgttcaccatgtcggcttgtatgttgtaccaatagtgtggaatttcttcttcaggcagcatgtacctttttttcttgtcgctcataatattgtagttatttgattattctgatgccaaaagtaagtataatttttaagaattatatgatttcagcaacaaagaatcggatatgtttgttattttagttaagtttgtgcgactcaattaatatgcaatccgatgaagatttatcataaattctttttatatcagaataaattattgcagccttacgtacgacttttgttacgattaatggcaatcatcacctatctggcctccattatgctgatagtgggagtgatctatgaacatggctttacgctctctgcacatgaagttacgaaaatacatcttctctataagacggtctggattatattcttgattgacgtcaccctgcatatattacttgaatacagggatacgaaaaagaatttccggaaacttgcctggatactgagttggttgttatatctgactctgataccggtcatttttcatcgtcccgaagaaggaggggctatcttgcatttgtgggagttcctacatggctacttttatcacattgtcctgctgttacttttttctcttttgaatttatcgaacggattggtacgccttttaggaaggcggacgaatccttctctgattttggctgccagctttctggtgattattttaatcggagcgggattgttgatgttgcctcgttgtacagtagacggtgttacattatcgtgggtcgatgcactgtttacttctaccagtgccgtatgtgtaacagggctggtacctgttgatgtgtctgccacctttactccggcgggactgacagtgatcatattgctgattcagatcggcggtttgggagtcatgactctgaccagtttctttgctatgttcttcatgggaaatacttctctgtacaatcagttagtggtacgtgatatggtaagttccaattcgttggggtcattactttctaccttattatatattttaggtttcactctggtgattgagggagtcggtatgctttctatctggttcagtattcatggtacactggggatggatgtacaggatgaactggctttttctgccttccactctatttctgctttctgtaatgccggattttctacattgccgggtaatttgggtaatccgatggtaatgactaatcataattggctttatataaccgtgtcgctcctgatcatttttgggggaatcggtttcccgattcttgttaatttcaaagatattattgtttaccatgcccgtcgcttctggcgtttgattcgtacccgtcaatgggacaatcaccgggtgcaccatttatttaacctgaataccaagattgttctgataatgactgtcttattgcttgttttcggcacggtggccattgcaatttttgagtggaatcattcgtttgccggtatgtcgattgctgataagtggacacaggctttctttaatgccacttgtccccgaacggccggattcagcagtgtcgatttgacttcactcagtatacagaccattatgctttatattgttctgatgtggattggtggtgcggcacagtctacggccggtggtgtgaaagtaaatgcgtttgccgtggcctcactcaacttgattgcggttttgagaggaacagagagagtagaggttttcggtcgtgaattgtcgcacgattctattcgtcgctccaatgcggctgtggttgtttcattaggaatcttgtttgtatttatatttattttaagtatactggagcctaagatgtctatcatgactctgacctttgaatgtgtgtcggctctcagtacggttggttccagtctgaatgcgactcctttgctgtgtgatgaaagtaaattgctggtatcattgcttatgtttatcggccgtgtgggatttattacactggtactgggcattgtgaaacagaaaaagaatacgaaataccgttatccgagcgataacattatcataaactaatcagttgaattcattatgaaatacattattattggtcttggaaattacggtcatgtgttggccgaagaactttctaccttagggcacgaggtgataggggctgatttggatgaagggcgggtagatagcataaaagataagattgccaccgcctttgtgatcgatgcgacggacgagcagtctctttccgtcctgcctctcaacagtgttgatatggtgattgtcgctatcggtgaaaatttcggagcttcaattcgtgtggtggctatgttgaagcaaaagcaggtaaagcatatttatgcacgtgccattgatggggttcacaaagcggtacttgaggcttttgggttggagaagattttgactccggaggaagatgcggctcggagtttggtgcagctattggattttggtacaaagatggaaacctttcgggtagactcggaatattatgtggttaagttcaatgttcccgagaagtttgtcggctattttgttaacgagctgaatttagatgaagaattcaatttgaagttgatcggattgaagcgttccaatacgatcaagaattgcctgggcatttctttggtggagcacaaggttgtaaacgaattgccggaggatgccaagatacgtccggatgacgtattggtgtgctatggtaaatatagtgattttcagaaattgtggaaggcgttgtgataaggataaattatagtgagattgtgttctttctttatgtaaatgcgcctcaaatgtaacggaatcacatttgaggcgcatatcgaagaagttagattattctttcaaggcttcttccagatcaatacctaatgcttgagctactcctgtgccataagccggatcagctttgtagcagttgcgtacatgccgttgtttgatgaacaattctgcgtcacccatggcgcgtgcggtattttcaaacaataattgttgttcatccgcaggcatcagtcggaacaaatcacccggctgactgtagtaatcgtcatcatattcacgttcgttatagttgaatacatctccgtgaacttttaaaggcggttcttttttctcaggcgagtcttgccattcgccataactattcggttcataacctttggctgaaccatagtttccgtccactcgcattgctccgtcacgatggaaggcgtggaacggacaacgtggcttgtttaccggtatctgctctgagtttacacccaatcggtagcgttgtgcatcaccataagaaaataatcgtccttgcaacatcttgtcgggagagaagccgataccttcaacaatattcatcggattgaaagccgattgttctacttctgcaaaatagttttccggattacggttcaattcaagaatacctacatcttgcaatgggaaatctttgtgtggccaaaccttggtaagatcgaacggattgatacgatagttatctgcttcttcttcagtcatcaactgaatctggaacttccattttgggaaatcaccccgttcgatgctttcgtataggtcacgttgatgcgattcacgatctttggcgatgattgcttcagcttcctgatcagtcaggtttttaatgccctgcatagtctttagatgaaacttaacccaaattcgtttgttttctgcgtttaggaaactgtaagtatggctgccgaatccgtgcatgtggcgataggaagccggaatgccacgcggactcatggtgatagttacctgatgaagagcctcgggtaacagcgtccagaaatcccaattattgttagcgctacgcatgttgttgcgtggatcgcgttttacagcatgatttaaatcaggaaattttagcgggtcgcgtaagaagaagacgggagtattgttacctaccaaatcccagtttccttcttctgtataaaacttcatggcaaatccccggatatcgcgttctgcatcagcagctccgcgttctcctgctacagtggagaaacgtacaaaacattctgtttgcttgcctacttgactgaaaatagctgctcgtgtgtacttggtgatatcatgtgtgacggtaaatgtaccgtaagctccggagcctttggcatgcatacggcgttcagggataacttcacggtcgaaatgagcaagtttttcaatcaaccatgggtcttgtaacataataggcccgcgaggtcctgctgtctggctgttttggttgtcggcgataggacgaccattagctgctgtgagttttttattttccatataattttgattttatcggaaacaaagctttcaatgatgtggagtcttttacagcccttcttccgtgttattacccgacaaatgtagagctaaatcatttacctgtcaaatagataatttcaatccataaataggtaatatctatttctatcaaagatattgatattacttgaatataataggttctataaatgtttttttgaaaagaatttgatcttttatccgaattcatccggtaaattagccgtttgggaaagaaatagccccaatgtgatttaccacagggggatggagagtggaaataataggtaaacttaccggaaattttgtgtttctctgtgatgaattggttttaaggtatacattatgatgtgaattataggcagtgtgtaaagtgcagtctggtgaaacatgtaatttgtatatatcgtcgacagaaatacatcctgccgacgatattggtgatattattatttcttccagccgattgccttcataaaccattggctattggcttcgttcagtttctgttctttgagcatctccggcatttgactgtagtttctcttaaacgtttctatcagttcgttaaaacgttccggcgagtaggttaatgcaatgctggtagcttcggttgctcccatagcaggcgtcaatacaattccggcgtcccggtattttaaagcagtgattgctttgctgaatcgtttgaactgtgaaacgataccgtcgtttaattccggaatggaggtcgggtattggatttctattgttttttcctgatcacatgctgtttgagggatggtgatcaataaggctaattcatcgccgatgtactcatattcagctttattaccattaatagtgattgtctccggaatggcagaacccaaaaccttgattttaaattggcggtcggttggcatattgcgatacttaccttgacgaggacctaccgttacagttaagtggttctctttccgttcagtgtacatccgggtacgagcatattcattggcataatatttatcattaccattatcttcataaaaggtaaatgaaccattttctccagggaatatgtttacgataatctcttcgctattactattaagattcttcacacggttgtaaagtggcagtacggaaccggcttttacgtaaaccggatattcggttagggtaaacgaacgttctattatctgtccgcctttcaatagggttccggtggtccattcaaaccagtcgtttccttcgggtaaccatacttttacagtagaaagtccgttctgcatgggggtggtgataggtgctaccagaatttgatcgccaaacatgtattcactcttgaaatcgtatgcctctttggcttccggataatcatagtacattggacgacagatagaaataccgttgtcataagtttcacgcgccattgtatagatataaggagccagttgataacggaacagaatggagttgcgtaatgcttcgaaataatctcccttgaaattccataattctttatttagaactgaattctttgtagagtgtgtgcgcattacaggtgttaaggcaccatattgcatccaacgggtaaagagttccgggtcgagtatttctttgtctcctcccttgaacatgtggcctccgatgtcatgactccagtagccgtatagcacattggaagcgcagttggtaaagtaaggttggaattcgagtgatttccaagagatgacggcatctcccgagaagccaatctgatagcggtgattgcccagtcctccccagcggtggtagagcatcgggcgagtgtcacggttgcgttccatgtctgagaagaaaacataattgatccaccaggtattgctgaggctgtctacttttttatcatacatccattgttgccaatcgagccaccagaagtccactccctgtttttccatcgggcggagtaccttgttgaacataccgtttataaagcgtttgtccgaaaccacccagggaatacgttcctgtttagctgtatctactcccatccattgtgccatttccggatatttttcttcatatggagctacaccatcggcaggatgcaggtttagtgtgattttcaggtcattgcttttcagataacccagaaatttggcgggatcgggaaatagcctgcggttccaagtccagcctgtccatccgccgaatcccggatcggtataatgccagtccatgtctactaccaatacatccaaggggatattataagtgtggaaattatctactaattggcgcatttctttgtctgagtagctccaatatcttgaccaccaataaccgaatgcataacggggtggaagaggtactttaccggcaaatacagtaaaatcttttaaggcagctttgtaatcatgcccgtaagccataaaataccagtcttgtccgtctttgtgttcacgttcttttacccaggcccattccgaattgtcaaataagaaattctttgaatcatcaatcaaggtccatccgtctgtcgatagaagaccgtcttccagcttcatatcttggtggctgtatatattgtggtctccttcaaaaccatccaatgtacggtctgtccctttcaaatttcctttttgtattgttccgggtgtccattgaaaggggaacatccctttagctgatgtgatcgttaaattatctttcgtaaaggggccttgacctttcttatattttagtttcattcgggcggtactgatcactaccgtagcatttttattttgtactgtgtacttgggaacaggtagattgcggtggattgctacaaaagagggatcgtcggtaaacgaacccgaaggactccactccatacggattaccccatctgtaaggacgctaaaacgcacgttaccatcatgataggctattgcattttggggagttgcggccgaaagcgaaaaactgaacagaactccttgcaatgccaataaaaaatagactgttaaatgtttcatgttgtatttatgttagtttttcacaaagataagagtaatattcataaattagtaataatgaattttaaatctttttatatctttgcaacctgtgtaataaatatcgcttctttagcttacaacaggataatagtatgaaaaaagacggtttctctgaaatttatgatatttattttccgaagttgctgcgttttaccaggacgtatctgatttcggaagatgaatcggagaatattgtccaagaaatctttatttatttgtgggaacacagagatatcattgagactcttcagaatctgaatgcctatctgtttacgttagcaaaaaatcgttgtatagactattttcgtaaggagatggtccgtgaagttcgtaaaggttcgctttcggaaatagagaacagagaacttcaattgaaactgtattcattggaagcatttgataatgatcgtctttcggatgccgatattgaagaaatactgaataatgccatcaatcgtttaccggagaggtgccgtgaaatatttattatgagccgtttgcaaaatctccgttataaagagatagctgaaaagttgaatgtttctccaaatacggttgaaaatcagattgtcatagcgttgcgtaaattaaaagaagacttgaaagactactttcccctctttattttcattatctgagaaatattccctatttttgtcaaatcattatttatttttatattcaaaacacaacaatgaaacacttagttatttgcatcgctctgttgacagtcggtgcttgctgctttgctcagcaaaagaaagtggcttctcataaagccgcaagtgggaaccctgtatttcaaggatggtatgctgatccggaaggtatcatttatgatgatacttattggatttttccaacttggagtgatctttacgaaaatcagacttttttcgattgtttctcttccaaagatcttgtgaattggacgaaacatgcttcagttttggacactactgccgtaaaatgggctaagaaagcgatgtgggctccttcggtaatcagaaagaatgggaaatattatatcttctttggagcgaatgacgttcatgaaggagagattggcggtattggcgtagcggttagcgatcgtcctgaaggaccttataaagatttattgggtaagccgttgattaatgaaatagtgaatggagcgcaaccgatcgatcagtttgtatacaatgataatggacattattatatgtattatggtggttgggggcattgcaatgttgtacagttgaacgatgattttacagggctcgttccttttgaagatggcactgtctataaagaagtgactccggagaactatgttgaaggtccgtttatgttcaagaaagacggtaaatattattttatgtggagtgaaggtggttggggaggtcccgattactctgtagcttatgctatttccgattctccgttcggaccttttaaacgggtagctaagattctgcaacaagatccttcggtagctaccagtgccggtcatcattcattactgcatgctcccggaacagatgattattatatagtctatcatcgtcgtccactgaatgataatgcacgcgatcatcgtgtgacatgcattgataaaatgacgtttgataaggatggatttattaatcctgtaaagatgactttcgaaggagtgcctgcacaaaagattaagaagtctaaaaagaaataggaccaatgctttgaggatgtgtagaaacaaaaggttgcacaaacaaagctgattttacaaactggctacagatactggatttttcaagtcaccgatagtgatagtgaacggttgtatctgtagccggttttgttatcgggcatcgatattgtaaacggaggtgtattctttgatatctttgcgttaatctatctgttgcgttacgtattcgtaaacgatgcgcgaaatttctgcgataatctcactgttttctctgttatctgcttcggaatctttcacgaagacggctatactatagacatgtccgtcgggaagaagaataaacccgatgtcattgcaaccgatctgttgtcctttcgcattacggtcgcctgttccggttttatgccccattgttacttttttatcgagcagtggagcaatcaggcggtcttgtcctgtctgacattccaccattgtttgataaatgaaattcttgtattctttgtcaaaaaggttttcattgcgaaatatttccagtaatttggcggctgctaatggagtagtccagttttggtaacagaactccagattcttatgcatatcgttttctgtatggatgacagcacattcacgaattcccaatgaatgaagatacttattcacggcatccggaccaccttgataattaaaaagaatatcgcaggcattattgtcactttgctgaagcgtatatttcagtagatcggcaatgctcatttcgattcctccctgtgggtatgtttctcgaagcggactataggtgtccggctttaaatccgactttttaatcaataaccgggtttccaaaggttgcttttgatgatgcatgtaatcggccaatgccaatgcctgatgaaatttgaaaacactcatcatgggataatgaatatcattattgactgttatcgtatcttgcccgtcgataatgactgcaattcctatttcggcttttttcccttctatggctttctttagttgagtttcaagaggactgttctgcgcaactaccagggcaggacatagcagaaagaagataatggataaatgtataagtcttttttgcatatatgattgggtcctttgtaatacggtccacaaaggtatgaataataattttagtggaattcaatatcaccaagtattctgattattcagtatccggcgcaggaactgttttcttttcaaacgagccttgccgtctctcatacgaaaaatgcatttcgatcttccatctttcaccttcatctttcatcttccaccctcgatttggcaagtccgattcagagtatattcttgatatgcagatagatgtatctgttattctatctgtttataccatttaaagcagtttgtttttcttagtatctttagtgaaaatggtcagtttctcatctcgtcccgcatacccgggctgagataaagatactttagaatgatgtaaggtgcttatttacaatgtgttatgtttgctatggagttagcttgctctcttggtaatttctgtgccggtcgttctgaacttctgttgatacggagtcggttatgtagaataactcacattaattctataggtagattctaaagtactttcatcggtatatggagattatattcgattttaacttcattgtaagttaggttatggatggattttatttcaatcaaagtatgaacaatcggagccgggaggattcgagaactcatttgttctttggttttttcttattattttagaaacggaaagatataagtgtttaatctttagtattgattgataggaatttaccatgatagggaaaaattttcgtaaaaaaagtctcttttcttttagtggattttaaaagctattacgccttattaatagaatatcctaaaaatgagtgaactgatagataaatattttgcaggagagatgacctgtgaagagaaaaaagatctcttcgaccggatagaaagtgatgaggctctgaagaaagaatttcttcggatgcaaaatgtagtggcgttgacccaaatactctcccgccaggatgattcggagaccagccgtaaagggaaacagcattttatgcaacttcttttccgtaaaagattaaagcgcgcgataacggtttctttgaaatatgctgctgttttcgcggtattagtggtaggaactttctatactgcgaagttgtatttatctgaggaattcggaaaaagttataccatagttacggctcccaagggacagcgtgtaaaaatagaattacctgatggaaccattgcctggctaagcccctgtagtcgtcttcgttttgcggcctctttcaatgaaacggaccgtaaaatagagttggacggtgctacctattttgatgtggcaaagaatcccgagaagccatttgttgtttcggctaaaggttaccgtatccgagtacttggaactaaattcaatatatcggcttataaaaatagtaaagagtttgagaccgatcttgtggaaggttgcgtacatatctatgatccggcggatataaggaacgaagtgtttctacagcctaaagaaaaggcagtgttgtggggagaccggttgatgaagcgggagtctgactttgataatgaagaatatctgaagaacggagttgtcagttttctgtccgagccgttcgggagagtactgaatagtgtcgctttatggaatgatgtgaatattaaaatagaacggtcagtcaacgcgacgcagcggatctccggaaaattcaggcaaagcgattctttggagagtatattaaaagccttgcaaggcgctatgcctttcaagtataaaatagttagtgaagaagaaataattatttattgataaatataatgatatacttaactaaaagcagatgcctatgatataaaaaacagtttgaaatgaaaaaaggaggaaatggtctggtacacctttccctcccgataaagtcaacacatttggcagagccaaataaaaaaacaacaaagtattaaccttattacattgcaaaagtatgaaaaaaaacttattgctgttatcttatgcaattaaacaacgtgaaattattcaaatcttgcgaattatgaaatgcacagtcttgctgttatttttgcttattcttcaggcacatgccagcgtaagctcacaaaatgcaagggtaaacatgtctcgaaatcaacttccgttaaaggagtttatggcggagattgaaaaacaaaccgattatctgtttatctatagtgatgcagaaatcaatgcttctcgccaggtaactgtaaagaagggaacacatagagtggccgatttactaagagaggtactctctaaaaataatatttcttataattttgcagataattatatttctcttcatgtacgcaaagaggctgacgcacagtccttggcggtatctccccaacaaaaaaagaatacggttttggtttcgggaactatcgtagataccgcaggcgatcctataatcggtgctaacatcaaattgaaaggtgctcagggaaccggaacgattacggatgtggaaggtaactttaaattggaagtgcctaccaatggtgtactgatcgtctcttttatcggatatcagcagcaggaagtggcggtgaacggaaaaaccatgttgaaaattaagatggcggaagatgctgaaatgatagacgaagtggttgtaactgctttgggtatcaagcgggaagaaaaggcattgggatatgccgttcagaaagtgggcggaagtaagctgtctactgtgaagcccgttaatattgctacttcactgactggtaaagttgccggtttgaatgtaaccaacagtacggagttcaatacagccccaactctcaaattgcgtggtgaaactccattgctggtagtagatggtgtgccatatagcaatatctctctgaatgacattgcagcagacgatatcgaatctgttgacgtgttgaagggggctaccgcatcggccctgtatggtgcccgcggaggttcgggagctattatggtgactacgaagaaaggtagtcaggagggacttaatatttcggtaaacagcagtacgatgttcaatgccggttatctggtattgccggaagtacaacatggatacagtaccggtcagggaggtaaatataccgctgccgacttcgtttggggtgataaactggacatcggccgtacagctgtacagtatgacccgtatacttatgaatggaaagagatgccattggtatcgaaaggtaaagacaactttaagaatttcctggagacaggtttcattaccaataataacatcagcatcagccagaccggtaaatatggaagcttccgttcttctctgtcgcatgtttataataaaggacagtatcccaatcagagattgaataagattacttactcggtaggtggggatatgaagttcggcaaactgagttttgaaggtggtgccatttataacaagcgtttctatccgaatggagaaggagccggctatggtggcggtggatacatctacaacctgttggtatggacgggtaccgattatgatgtacgcgactataaaaactattggagaaagaaagacgaagagcagaactggatgaacgatgtgtggtatgataatccttattatctggctcatgaaatgacttcatccaatgactacgataaagtaaacacttacttgtccggtaaatatgacatcatgccttggttgaacttttcgatgagagccggtgccgatgcttatgccagccgtacggaaaagaaaaacgcaatgagcgcccgcggcggatgggacaagaacggatacttctatacatccaaatccaccggattcagtttcaatggtgacgctttgctgtctgccaatcacagcttcggtgattttgctatcgacggttttgtcggaggtacgatctactattattatgatgacgctatttcatcgaatacccgtaacggattgagtattccgggatattattcattgaaagcatcggttgacccaattgcctcttcaagttcatacaagcagaaacaggtaaactctatttatggaaaattctcagcttcatggaagagcactgtgtttgtggatgtaacggcacgtaatgactggtcgtctactttgccttcggagactcgttcttacttttatccggctgtatcgggaagtatcattatgtcgcagttactaaagatgcccgaatggctgaacttctggaaactcaggggtgcctggacagtaacgaagagcgacttgggtatttatgatacgaaccaggcttacagtgtaagcacgaatgtgtgggatggaatgaatacagccgtgtacccggaaatgatccgcagtacaacgcttgaaccgaccgctgcacgttcttatgaaatcggtactgccttcaatgtatgggacaaccgtttgcgttttgatatctcttactacaataaactgaaatacaatctgacacgtgaagccactatcagcggttcgtccggttttactaaaacattggtgaactatgatgaagagcaggttcgtagaggagtggaggtttctttgactgcttctctgattcagacgaaagactggaattgggaagtgaatgccaactgggcccgtgaccgctatttctatgcgaaagtcgatcctgtatattctacacagaaaccttgggtagctgccggcaagcgttgggactggtatggtatctacgattgggaacgtgaccctcagggaaacattatccatgaaaacggatatccggtacaaagtaaatatcagtcagtgatgggtaatgaatatccggactggatctggggactcagtactaccttgcgttataaagactggacattgggaatttcgttggacggacgtgtaggcggtatggcttactctcgtacggaacagactatgtggaataccggtgtacaccccgatagtgataacaaatggcgttatgacgaagtagtgaacggtaaaaagaattatgtaggccagggtgtgaaagtagtatcgggtaaagttgaatacgacacaaccggaaagattgtgagcgatacacgtgtgtttgcaccgaatgacactcaggtatcctatgaaagttatatcaagaattacaatccatggtcaggtggtaaggtttaccagaacgtgcatgactgtacattcctgaaattgcgtgaactttcattgttgtacacaatgcctaagtcagtttgtgaaaagattcacatgaaaggcgttacactcggtttgatcggacagaacttattgatttggatgaaagagtttaagtatgctgacccggatgtggattcggatgacctgaattcaccttctatgagatatgtcggatttaatgttaagtttgatttgtaaaaaaggaaattatgaaactaataaataaaacgttgcttttacttacagcaagtgctacgattctggcatcttgtaacaagtttgatgatttgaatacgaaccccgatgctgcaaccaaggtgacagcacctatgttggctacaaaacttatcctgaacattacacaacagggctctgctaagaactttgtgtaccacagcatgctgagcaaacagattgcatggtcggagaatgcttcggatgaacaatacaatttgtttggcaggacagattttgacggctataccatccttacaaactgtcagaagatggtcgatgcagccaatgagggagataaagattcgtatgcagctctggctaagtttatgaaagcctataaactgttctataaatcgctggaagtgggtgatattccttacagtgatgcattgaaaggtgaagagggcgttcagaaacccaaatacgatacacagaaagaggtgatgcgccaagtcttggaagatttggaagaagcgtatactttattctcatcgggcagtgactttgacggtgatcctatttttggcggtgacaccgaaaactggaaaaagactgtagtcgccttcgaactgaaagtgctgactcacttgtgtaagaaagatacggatgcggatctgaaagtgaaagaacgctttgcccgtctggtatcttcgggctcactgatgacttcgaatgcggacaacttccagttggtatactctaataaggccggacagctttatccgttctattacactcagaacaaacattctgattatctgatgatgtcgagtgtgattatcgataacctgaagaagttcaacgattatcgtatgttctattatgcttctcccgccaaagcccagacagataaaggtataaaggattccgagtgggatgcttatctttcgattgatccctcggacagctattcaaatatctccgtgctgtacggaaaaggtgagttctgcctggcaaacctccgctatacccgtgttccggaaggtgagcctttgatgcggctgagttatgcagaacagaattttattctggcagaaggagctgtacgtggctggatttcggaagatgcttctacttattataagaaaggtatagaagccagcatgaatttcatagcagacaatacccccgataaagaagaatatactcacggacgtaccataacgcaagaatatatccaggagtatctggcacaaccggttatacagttgtccggcgacaaggagaaagatctggaaatgattttgctgcaacgttatctcgcctcgttcctgcagcatccgtatgatgcttattatgattatcgccgtaccggatatccggtattgcctatcaacccgagtaccaacctgaatacggaaaaaaataagattcctacaagatggatgtatccggaagctgagttcagttacaatcctgataatgccaacgaagctgttcagcgtcagtacaatggttcggacgatgtgaacaagttaatgtggattctccagtaaacattactcttttgaagacaagaggatgtgtcatctatggtaaattttgacacatcctcccttctttatacctaaataatcaaacccatgaaacgaatttatttattgttggctatcctgttgggaagccttcagctggcaaatgcacagcaacagactcttcagtttaacaaagacggtaagtttaagattgtccagtttaccgatgttcattatatctataatgatcctcgttcggatgtatcgatcgaacgtatcaatcaggtattggatatggaaaagcccgaccttgttctttttacgggagatgtgatttatggtaaaccggcggaagaaggaatgcgtacagtgctgaatctggtatctaaaagaaaaatcccttttgcggtgactttcggtaaccatgataacgaacagggactgagccgtgaagaattgttgaagatcatccaatctgttccttttaacctgacacagactactccgggtatttcgggagtgacaaattttatcttaccggtgaaggcttccgacggcaagcgcaatgcaacggttctttattgtatcgactctcattcttattcacagatcaagggagtgaatggatacgattacatcaaatttgaccaaatacagtggtatcgtgagaacagtaagaagtttactgaagaaaataatggcgttccggtttcgtcgtatgcgttttttcatatagctttgccggagtataatcaggctgcctcttccgagagtgcaatactttatggcattcgtaaagaaaaagcatgcgctccccagttaaattcgggcttgtttgccgccatgaaagagatgggagatgtgagaggtgtatttgtgggacacgaccacgatgatgattatgccgtgtcatggaagggaatcttgctggcatacggacgctatacgggtggcaacacagtatataatcaccttacaaatggtgcgagagtgattgagttggatgaaaatgcaaatagtttccgtacgtggatacgcctgaaggaaggggtcgtacaacaggtaacctatcctgccgatttcattaaagaatagaagatacacaaaagacaaaacttaaatatagatagaataccatgaaaaagttatttgttttagtatgtttgcttgcgatcggattctgcaatgtggcttgggcggctaaacggcaggcaaaacatgtagtattgattgcgttggacggctggggtgcgtatagtgtgcccaaagcagacatacccaacattaaaagcctgatggacgaaggatgctacacacttcataaacgtagcgtatttccatcatcaagcgctattaactgggcttccatgtttatgggagtgggtactgaacttcacggatatacagaatggggttcgcgtacgcccgagataccatcgcgggttgtcaatgaacatggtatttctcctactatcttttcggttatgcgtcaacagtatccggaggctgagaccggttgcctgtacgagtgggaaggaattaaatacctggtcgatacactggcactgagttaccatgcacaagctcctgattatgataaatacccgactgctctctgcgagatggctgagaagtatatcaaagataaaaagcctgccatgcttgcagtttgcttcgatcagttggatcataccggtcatgctgtcgggcacgacactccgggctattatgaaaagctgaaagaactggacggttatgtgggacgtatcattgctgccattaaagaggccggaatatatgatgatacgattatcatgatgacagccgatcacggtggcattaaaaaagggcatggggggattacactccaggaggtagagataccttttatcattgccggtaagaatgtcagaaaagggggagagttccaggaaagcatgatgcagtttgatactgctgccaccatgggatacgtttttggagtgaagcaacctcaagtctggataggacgtcccatgatacaggttttcaaataaacactactgtcacaacctgaagaaaaacaatgcacataatataaatttgataaaatgaaaaagattatttttatgacgcttttcctgcttgtcgccatgacgggacaaagtaaaggaaagggtgagtttacggttctgcaatggaatgtatggcaggaaggtacaatggttccgggaggatatgatgcaatcgttaatgagatagtgcgcttgcaacccgactttgtgacattcagcgaagtgcgtaattatcataacactcgttttaacgagcgtattgtggcttctctgaaagagaaaggactggattattattctttctatacgtatgacacaggtttgctgagtaagcatccgatcacagactcgctcactgtattccccgaaaacggagaccacggaagtatctacaggctgacaagttccgtaaacggacacaaggtggcagtctacaccagccatttggattacctggattgtgcttactacaacgtacggggttatgacggttccagctggaaagagatacctattccgactactgtagaagaagttttgaaggtgaatgtggcttctcagcgtgacgatgccatcaagatgttcattgcacaggctcaaaaggatattgcaaatggttatagcgtgattataggcggtgacttcaatgaaccgtcacatctggattggattgaggctaataagaatctgtacgatcacaatggcctggtaattccctggacagtaactacattgctagagcaaaacgggtttgtggatacatatcgtcacatttatccgaatccactgactcatccgggatttacatatccggcagataatccgttgaaagaacccggtaaactgacatgggcaccgaaagcggacgaacgtgaccgtatcgactttattttctacaaaggaaagaatcttgaagcaaagaaagcgattgtctttggcccgaaaggctctatcgtacgtaataagagagtgcaggagacatcaaaagataatttcctgttaccgttggatgtatggccaaccgaccataaaggactgctggtgacatttaagattaagtaatgtttcaccacagagtaacacagaataacacgaagtaacgcagaataacccagagtattcatgtcgacaatccgtgacttaatactcactctgtggaactctgtgttaccctgtggtgaataaatgcccccttgatattatcctgtcgtttaaatttctcctcgcatccgatcctcgaatgcggctaatgcggctttggcgccttctcccattgcgatgataatctgtttgtaggggacggtggaaacgtctccggcagcataaattcccggcacgttggtacggcaatgtgcatcgatcacgatctcgcccggacgatttacctcaaccacatcgcggaaaataccactattggccaccaaacctatctgtacaaagatgccatccaggctgatcacccgttcttcttctgttttgcggtctttgacacggatgccggtcaccttatctccattgcctaccacttcggttgtctgcgagtgaacaagaacttctacattcggcaggcttttcagtttttcctgtaaaacctgatccgctttcagctcgtccataaactcgagcaccgtaactttggagcagatacctgccaggtcgatggctgcttcgattccggaatttcctcctcccacgacagccacctgcttccctttgtagaaaggtccgtcgcagtgtggacagaaagccaccccacggccgatatattccgcttcgcccggtacgttcagtttgcgccagcttgcaccggtggcaacgattaccgccggagctgagaaacgttctcctcctttggctgtcagaaccttatcctttccatcaagctctatcttttcgatctggcgatgttcgagcaaatcgatgggatattgtgacatgtgggttttcagattatcggccaactggcttccggttgtcgaaggtacggagatcaggttctctatgcctactgtttcttttacttgtccgccgatccgttcggcaatgaccgctacattcaagcctttacgggccgaatagatggcagcggccgaaccggccggacctccgccggctacaatcacatcatattttttgatggaagtttccgcactgttcgtctccgttccatattgttcttccagtttggccaacagttcgccaaagtcaccacgccccacgtggatcagtttaccgtctgcgaagacagaaggaaccccctgtattttcagtgcctctacttccgcctggttgatggctccgtccacagtctggtgctgaatttgtccgttcagcgtggtcatggcgttgagtgcctgcaccacgtcggggcagttggtacaggtcagtgacacgtaagttgtcaggcggacaggtcctttcaatgattttacccggttgcagatgccttcgtccggaaagttctttccttttccgtccgtattcaggatggcaagcagtaaagaactgaattcatgcccattgggaacggcccggaaggtgatacctgtcctgtgttctcctttgagaagtgtaaattccagtcctttgccttcattgatccggcaagagagtttctcggagcaggatgccacatcgttcaggagttccagaagttcggtgcggctttcgtgttgcggtgagacggtgatgtcgaatgtatagttcgcctccaatgcggcgaagatggtacgtaattgttcttttatagctgagtctaacattatatcgaagattgattagagatgaatgatttagaaagatttatcgtcaagagctaaaaaagaccgatatgggggataccggtcttcataggattgctgtttagatcttaccgaccaggtcgatgctcggtttcagggttgcttcgccttttttccatttagcggggcaaacttctccgtcgtgagtagctacaaactgtgcggcctctactttgcggagcaactcgtcggcattacgtccgatgttgttatcctgtatctcggcaatcttgatttttccttccggattgacgaggaacgttccgcggtaagccattccgtcttcttcgatcatcacaccgaatccacggctcaatacacctgtcgggtctgccaacatcggatatttgatcttacggatgctttccgaagcatcgtgccatgctttgtgtacgaagtgtgagtcggtgcttaccgagtatacttctacacccatagcctgaaactgttcgtatttctcggcaacgtctaccagttcggtcgggcacacaaaggtgaagtccgccgggtagaagaagaaaatagcccattttccctttacgtcttcgctgcttactgttttaaaacttccgttctgaaaagcctgtactttgaattcaggcatctgtgagttgataattggttccataattgtttcttatttagattcattcttatttgtttccgatgcaaaaatagggcgaattttcccgtttcagcaaaaaatccaattgataatatttatcggctgatagatgaaatcttataggctgccttgttttgtatgtccggtgcccgataaatggggagtggctttcgttttgatacctttttcttcttttagctgtcagaaagagaagaatatcccttggggagtaaccgggtcttttgcggttcaagtcaaacgggaggagcggaggtgccgaaacagggcgttttttcttcagaaagcaggcttttgatgtccgaaagccggtgtttgggtcgggaagtgccggtgttttccgaaaaagaagtaagcatttgctccgaaagacgtaagcaagttgagaaaatgcttacttctttttggaatatctctatatgttttccctcattacatatattgtaattgttccgaagaggaaaaaagaaggatttctttctggttgctctccggaaatgaacatgctgaaaaagataaaagggaagcatcaggattgaatactgtcctttttgttcttttctttcttgaagaaccgcttctttgcatagaaacaggaacttaaagtgataaaacggaaattgctgacaggaaaaggagacgaaaaaatcgcttcaccctacctttgcccggaaaaaagccaatctggaaccattcgattatcaatatgacagaatgtagttttaccccccttccttatccgccatccagtacctaagagtcgttagtgtgtgaactcgagttatctaatcaaaatagaaagaagtttgcgttttgttaaagttgccctcacctttaaacttccctcttactttttagtcatatagacagttgcaacaaaaaagacagatgattatttgataacttaaaaaaggaaagaacaatgaaaagaataagttttttattagcagtcctattaatgatgggaggaatggtgatggcacaaggtccgcgcagaggcggtcaggatatggacccgaaaacacgtgccgaacgcatgaccgagcgtatggcgaaagaatactctttgaatgaaactcagaagaaagagttgcttgaggtcaatatggctttcgtacaaaagatgggagagcgtcccggaagaatgaagccggaaatgagacaaggtaagaaggggcagagtcaggctaccgacagctgcacttgtaaacaggataggagaaaagctcctcgcatgtccaaagaggacagagaaaagatgcgtcaggagatgaaagcttcgcgtgagtcctacgaggctggtctgaagaaaattatgacgaaagaccagtatgctgcttataccaagaagcaggccgagcgggagcagagaagaggaggcggaagataagcttcagcgttgatgattagtgatgtggcggacatcgacatggtgaccggtccatcactaatcatcaattactaattaccaaaatacttgtatatttcccccgctttttgttcctttgccgtacgatttaataaactgataattcgaatatgaaaaagcttatttatctgcttgggttggcaatgcttatggctgtcgcagcttgttccggttcggctgaaaagaaaaagagcgatatccgtgttttgatgcaggatagcaccgatgcacatggagtgcagcgcatgacggcccgtaagagcgaggtagatattaaatataaaggcaaagagtaccattcgtttatttcccgtacgcccaatgattcgcttccccgggtggtaagccagatggggaatacgtatgtcgacaatcagatagtgcttaggctgacgcgtggaaacgaacgtgttttcagccgtacttttaccaaaaagcagttcgagtctctgataggcgatgattttatggcgaaatctatcctggaagggattgtttatgataaaacgactcctgagggaatagtctatgctgccagtatctgctatccgcagacagacctgtatgtacctatctccatcacgatctcacccgatggaaaaataagtatgaagaaagaagagcttctggaagaggtgtacgatgaagatacatccgcccgttaaaaaatacaaaaagaacccttctctttatttattcccaaatctttcccgtttctatctcgttatttgcagtgtgaaatagttccgaaacttattattgacactaaaaaaataacgattatgaagaagattttgtctattcttgtattggccattgcagccgtccaatttgcatttgcaggtgatatcatcacgaaagatgcgatgaaattgcctcttccggcacgtaattttattaatcggcacttttccaatccgcagatttcgcatattaagatagaaaatgagattctgcaaacaaagaagtacgatgtgttgttgactaatgcaaccgagatcgactttgataaccggggcaactggattgaagtggattgtaaaaaagcggctgttcctgcaacaattgttcctgacttcgtgaaggaatatatgaaagccaatgggtatcactctgagtttgtgactcagatagagcgcgaccgcaaggggtatgaagtcgagttgaatacggatttgagcctgaagtttaccaaagacggtaagtttcgtaaagcggagcattgataaattggaataaacctattaaaaaaagaccttgattatgaaatctttgaaatttagtttgttgacagccgtgttgctgtcggtcgtgtttgctttcagttcgtgtggcgatgatgacgatacgggatatcttccgccgagccaggccattcaggatgcactgaagaagctttatcccaatgccactgccattaaatgggagcaaaagggcgtctattacgtagccgactgtcaggcggacggcagagagaaggaagtttggttcgatgccaatgccaactggctgatgacggaaacagagttgaacagtatcaataacctgccgccggcagtgttgacggcttttatggagtcgagttacaacaattgggtagtggatgatgtggtgatattggaatatccgaatgaaccttctacggaatttgtggtaactgtggaacagggtaaaaaggtagacttgtatttttcggaaggcggtggtttgctgcacgaaaaagatgttaccaacggtgacgacacacattggcccaggatttaaaggttgaatgtgccgcccgaggcatgtgaatagtaaaaacaagaggatgtgcaatctgtggtgagttttgcacatcctcttgcgctttatggggaattgctttttacatcggcttataatcctttgccagtccgccttcacttgtttctttataaagtgagggtaggtcgtggccggtttgtttcatcacttgtattactttgtcgaaagagacacggtgcattccatcggtaaatgaagagtatagattggcgtccaatgcgcgggcggccgcataagcattacgctcgatacaaggaatctgtaccaatccgcataccggatcacaagtcatgcccaagtgatgttccagtcccatttcggcagcatattcaatttgagccggacttcctccgaatagctggttggcggcagccgatgccatggcacatgccacgcctacttctccttggcagcctacttctgctccggagatggaagcattttgcttgacgatgttacctatcaatccggctgttgccaatgcgcgaaggatacgcatctcactgaactcacggcttttggcaagatgataaagaacggcaggcatcactccgcacgatccgcatgtgggtgctgttacgattttgcctcccgaggcattctcttcacttacggcaagcgcgtaggcaaataccaatccgcgtgactgcaaagaagccttgtatccggtagcgcggatataatatgtggaagctttacgtctcaggttcaatgggccgggcagcactccttcttgttcgagaccacgctggacagactccttcatcgtatcccatacttctttcagatagtcccatatatcaggatcttcgcattctttcacgtattcccagtaactttttccggtatgttcgcaccaatccagaatttcggtcatgctgttcatggagtatacttccgggctttcaatagacggctgtttgttgtcttcggccaatgcacctccccctacactgtagacagtccagttttccagttcattgccgccggcatcaagtgccacaaagttcattccgttcggatggaaaggaagaaagattttgggttgccatataatatctaccggtgcagtaggtttcagtgtgtcaatgatggctacatccgtcatgtgtccttttcctgtcgccgccaggcttccgtagagggtcactttgaacgatgctgcttcaggatgtcgtgtgaggaacatttctgctgccttgcgaggtcccatggtgtgactgctcgaaggtccggttccaatgcgatagagttcttttattgatttcatattagctaattaggttgttgcgcaaaggtaattgttttttcaaaatttttggtaacttaataccatttcttctttcggaaaaaccagtatacggctccgcccaccaggagcatcaatatccaggcatatacatatccatatcgccagtctaattcgggcataatcttgaagttcattccccacactccgacaagaaaagtcaacggaataaagatggtggaaacaatggtgaggcgcttcatgatatcattcatccgcaagtcattgttggatatgtaaagatcaaccagggacgatagggtttcccggcatatttcgatggtttgcaatacgaattgcagatggtcgttgacatcattgaagaaagcacggttcactttgtgcatcagggagttttccgccctcaggagtttcacgtattgttcctttaatggaagaatggctttcttcatcagcatgtactgccggcggagtgcctgtatctggatgccgatatcgttaccgtcactgatggtgagcaattcttcttccaggtcttccagggagtcgtcgatagtagatacggtggcgatgtaattccccattatgctgtttagtaagacactgagcaggtagtcgctttgtctgccccgtatttttagtacatcattgtgaagggcggaggtgacatcgtcaaagaagtcggtttcgttttccaggaaggtgagtacaaagttgcttccttggatgatgcatacttgttgctgttccagttcatccagttcatcttccgggcttttctcttctttgttgttgaagcggaatagcttcatgataagcaccgtgtacttgtcatgctcctctattttagtgggatgctcggcattcagaatatcctgaaggataagaaagtctatttcaaagtgactgcatatttcccggatgacttcggtgttctgaagtccgtgcacctgcagccagttgatctgctcgcggttgagagaattggcgacagtctggaaattgacacctgaaacctcctgcatcacaagagcgttgtaagtacataaatgcaggtgggtgggagtctggctctcaccgttataaactaatctttcacttaacaggttattcttcatattcttctttttttatgccaaatcgactaccgtgatacctgcacctcccaattggatatgttcgtcggcaaaatggcggactcccggtatggtttgcaaatattggcggataagggtacgcaggatacccgtaccggtcccatgtaggatgcgtacccggctcataccgaccaggatggcgtcgtctacaaagtaggttacagcttgtagagcttcgtctccccgcattccccgtacatcgatatcttgcttgaagttcagctttttttcgtacatgctgtcctgagtctggttgctgacaaaagaacttttggcagactcttgtttttgggggactgcgttgctgcgttccagccgctccgtctttacagttgtcttgatgctgccgaaggctaccacggcattcttcccgttgatttcaagtacttctccgaccgaactttgtcctttgatacgtaccggacacccttcggtgatgggagttgctttgggagtttgttgaactgccggctgttctttggtgccgttttgctttttctccttcttgcggttttgcttctctttcagcttctccatctttcgggctatcttatcttcctgttccttggaagtcaggttgtctatcgattcacggaagtccgccagttcctggcgtaccagacgtgttttttctttttcagcctgtgcctcttttatggtacggatggtgttctcgatacgtgcatttgattcttgcaacaaccgctccgcctcctcttttgcctgacggatgatctcttttctcgacttttgtaattcttccatctcagcctgatagcgggcaatggtttcttccatatgcttttcgcgctggcggatagtctgacgctttccttcccaataacgtttgtcacgtacgatatcctgcaaatacttgtcggcattgatatattcacttcccacaatctcagaagcatctgcgatcacatcttccggtaatccgattttacgagcgatttctacagcgaatgaactgcccggattaccgatctgaagttggaaaagtgcctgcatcagatgacggtcatatagcatggcaccgtttactacaccttcgtgatcctctgcaaaatgttttagattctggtagtgtgtagttataacaccgaaagtaccctttatgttgaatcgtttcagtacagcttcggcaatagctccgccaatctggggttctgtacctccaccgaattcgtcaattaaaatgagacttcgttcgttgcagttcttcatcatgattttcatattggtcaagtgtgaagaataggtactcaaatcgtcttcaatggattgttcatcaccgatgtcgatgaagatactgccaaacaggcctacatgacttcgttcatgcatgggtacgagcatgccgcattgcagcatatattgtagtaacccgactgttttcagacatacggatttacctcctgcgttgggaccggatataataaggatacgccgtttgaggttcagttctatgtccaatggcactactttctttccatgtttggcaagcgaaagttgtaatagtgggtggacggccattgtccagtccaataattgctcgttctccaggctgggtttgatactgtttgtttggatggcgaagtgacttttggcacgaatgaagtctatctcggcaagaaattcatacgattgcagtatttccgggatagaaggacgcagggtgttagagaactcagtcaggatacggatgatctcccggcgttcatccccttccagttcacggatacggttgttggcttccactacttccgctggttcgataaatacagtttttccgctggccgattcatcgtggacgattcctttgattttacgttttaatcccggagccaccggaataaccaatcgaccgtcgcgcatggttggtgccacgtctttgtccacatagccttcggattgtgcgtttcggagtatgctgttaagcgaacgtgagatacttcccatcgtgttagccagttcccgtcggatgcgtgacagttcggtcgaagcattatccttgattttgccatatttatttaaaatgccatcaatcttggtgataagttgtggaaagacagttatgtcaccggccagttttttcaggctggggtagggacaatccgattcttcttcatcattgcgctgcaggaaacggacgatgtcccggatggtctccaacgaacgtcgtagatcaaacaattcttgttcgtccatgtacattccttctatccggattcgtttcaaagagggacggacatcgaaaaaaaattggtcgggaaagttatcttcctcttgtatgatgcgaacaaactctgcaacctgattcagcagttcatcaacttcttcaaagtgatcggaaaaattcatttcattcactctctcttctcctaatgtgctgagacatttgtcttttaataattgtctgatttggtcgaatcctattttctgctcaaaattctggggatatatcatggattatctaatttatctatataacagtttcaattgaattgttccgcaaaaatacgattattccacgaaaaaaatggcaaaatgtttgtggatttaaaaatgattcgtacctttgcatcgctttaagagaaaagcactacttaaccgtagttttggagaggtggcagagtggtcgattgcggcggtcttgaaaaccgttgtactgcgaggtacccggggttcgaatccctgtctctccgcaataaacgctgataatcagcaatttacaagaatgacgcccaattttacaccctaaaaagtagaattgggtgtttttgctttatttaatactttattcttttattacttgtttggctttgcgctgtctttggttgcttaactattatttattgtataatttgaaaaggggatattgtgttgttgatgacattgttatactaatatttatttaaatcattttctttttttaacttttttagagtagggagtctcccgaataattctgtctttgtttacagctct

SEQ ID NO: 4998 - DNA, 721 bp, Unknown
  gut microbiota DNA sequence
cgggcgatgggtggaacgtctattcggaaatcaagcgcaagctgacggaggactacggcataccgccaagcgaggtgcgcttcattcaggagtgcaagaccgacaaggcgcggaaggcggtgatagacgccatgaatgccggaacggtgcgtgtgctgttcggctccacctccatgctcggaacgggtgtgaatgcgcagaaaaggtgtgtggcaatccatcatttggacacaccgtggcggccatccgacctgcaacagcgtgacggacgcggagttagggcaggaaatgagattgccaagcatttcgccgggaacaacgtggatgtaatcatctacgcggtggagaagtcactggacagctacaagttcaacctcctgcactgcaagcaaactttcatctcgcagctcaaaagcggtgctatgggggcgcgtaccatcgacgagggggcaatggacgagaaatcgggcatgaacttctcggagtacatggcgttgttatccggcaacaccgaccttttggataaggcgaaactggagaagcggatcgcatcgctcgaaggggaacgcaagtcgttcaacaagggcaagcgtgattcggagttcaagctggagtcaaagaccggcgagttgcgcaacaacacggctttcatagatgccatgacggaggactggaaccgcttcctgtcggtggtgcagaccgacaaggagggcaaccgcct

SEQ ID NO: 4999 - DNA, 10592 bp, Unknown
  gut microbiota DNA sequence
tatgaaggacgttgcggacggtcgccataggaacgctgaggacggtcaccaccctcgctgttaaaacgcggacgatagggacggtcgccaccttcacgattatatgaaggacgttgcggacgatcaccataagaacgctgaggacgatcttcactattactattaaatctcggacgataaggacggtcgccaccttcacgattgtatgaaggacgactgtatccgccttctctgttaaaacttctgttaccatcacggccggcgtccgtattctcactcttggagtcttcgcgccattcttcgttttctgtgctcattttcttattcgaataaaaattaaacttttggcctcacggcctgattttagacacttatattatatataacaataatcacccttaaattcccgtatacgaatggggagtaattactcttaattcttttttgatttcttcgttcacatccaatccttcaataaactccttgatagaagtttctgtgatagcctgattcgtacgagtcagagccttcaaggcttcgtacggatgcgggtaagcctcacgacgaagaatagtctggatagcctcagccaccacactccagcaattatccaaatcacgatagatagccgtttcgttgagcaacaacttgcgcaatcctttcagcgaactttgaatagcaatcacaatatgcccgaacggagtacctacattacgcagcacagtagaatctgtcaagtcgcgttgcaaacgtgatacgggcagtttcactgcgaggtgttccagaatggcattggcaattccgagattaccttctgcattctcaaaatcaatcggatttactttatgcggcatcgcactcgatcccacctctccggcttttatcttctgcttgaaatattccatcgagatgtattgccagaaatcacggttcatatcgatcatcaccgtattgatacgcttcatggcatcgaagatagccgacagattgtcgtagttcgaaatctgtgttgtatattcctcgcgttccaatcccagtttctctgcaacaaactgatttccgaatgctttccaatcatattcgggataagccacatggtgtgcattataatttccggttgcaccgccgaatttagcagttacagggcaagccttcaaagtagccagctgacgttccaggcgataaacaaaaaccataatttcctttcccaagcgagttggagacgccggctgaccgtgagttttggcaagcatcggaatggattcccattcagtagcatacgttttcaactgcgcaatcagttcttcaatcagcggataataaacttgctccaatgcctccttaatagaaagagggatcgatgtattgttaatatcctgcgaagtcagtccaaaatgaataaactctttgtactcttccaatccacccaacttatcaaactcttctttcaggaaatactctacggctttcacatcatggttggtcacactttcaatatccttgatacgctgcgcatcggcttccgtaaaattacggtagatattgcgcaatgactcgaacacactcttatcaattcccttcagttgcggcaacggcagttcgcacaaagtaataaaatactctacttctacctgcacacggtatttaatcaacgcatattcagaaaaatatgcagctaaagcttcagccttgcctctatatcggccgtcaatcggagagatggccgtaagtaaatcaagtttcatattgtcgtttagataattatcaggctgcaaaattaactctttttcctgagttataaggcataaggggagagaaagtttgtataaaagagactaaaatcacgatgaacggccaaaggtgaacagtctttaaacaatcaacgatgaactacttgcattttaccatcgttgcaagatagttcatcgttgatcattcatcattcaaaaaccgttcatcgtttcactcagcccttaagcttcatcaacaccggtgttttcactgttttcacttctgtttgaggggtttcattcaattgttcaaagataacaatcttattttcacccttcttcagccatacacccggaatatagagtgtttgctgaggacctactttccagtaacgtccaatattaacaccgttcacaaaaacgataccctttccccagctttccatatccataaatgtatctccgactttatccaacgtaaaagtcccctcataaagcaccggacagcctttcagcttagccacttcagacggtacatttttatgtgtatcagctttcaatttggtcaaatcgggcatttcgtccatcggcaactgatacatatcccatccgccgacaatttccttaccggctatctgaaccgggctaataattcccttggtattatgtacgatctcgctaccataattaatgcgtcccatattttcaaccagaatctgcagagtagcattaaacggcacctctatctccatggagtaggtcttggtattccgattcagcactcctacctgttcaccatccacataaacaacggcatagtcacgcaaccccggaatttcaagtgttccgctaatcggctgattgaaatgacgagtatacaatacatatccatacccctgattcaattgttcaaaagtcaagggagtatcagacgacacgggtttctgtttttctgcaaaagcaagcacatccgcaactttattcaattgaatagaaggtatttcgataacaggattaggagccggagcttcaggaattgtatatttaacatatttcttgatcacattgcgaatcgaatcatactttggagttacccagcctgcctcgctaataggagcatcataatcataactggtcatatccggctgaatatcacgcttcttatcataattagcaccactcgtaaaaccaaaattcgtacctccatgcaccatatagaaattgaaagaaacatcattttgcagatacttctcggtttgacgagcaatcccggaagctcctatctgcgggaacggctctgcccaatgcgacagccaacccggataaaattctgcaaccatatacggacctttgccgtcatgatattgatcaaccacttttttcaaattctcaatatcactttcgccattcgccgtaggcaaagctcccggagtagccccaccctcaaaaagccaactgccatcagaagtaaacagaggtacattaaatcctacatcagccaactgctgcttgattttagcattgtaagcgcgatgttcttccaaaggtatatccttacgctgggcaacgtatgaaccaaattcattctcacactgcaccattacaatcgggccaccctttgtacactgcaaactaccgacctctttataaagacgatcgatatacgcttttgtatatttcagaaactccggattatctctcctgatttccattcctttcacattttgcaaccaccaaggataaccaccgaattcccactcggcacaaacataaggcccgggacgcaaaataaccatcatcccctcttcacctgcggtttttataaattcagccaaattcttgtcacctgtaaaatcccattttccgggctccggctcatgaagattccagaacacataggtagccactgtatttaaccccatacctttcatcatctgcaaccgatgacgccaatattgatgagggatacgggcataatgcatctcaccggaaagaacaggcgttatctttccgttacgataaaaatgtccattcttgatttcaaacgtagatttcgactgcgagaacacgcacaatggcatgacagccaacaacaaaagtaaaaaaatcgattttgttcgcatggtagtattaataggtttattgatgaagcaaagtaaagaaataaatcactttcccgccaaatttccctttgttttcttttaaaaaataacttgaattaatacaccattgtatcaggtaaagtacagaaaaagaaaatccttacagaaatattctgcaaggactccgtatagagtgggcgttgacggattcgaaccgccgaccctctgcttgtaaggcagatgctctgaaccagctgagctaaacgcccgatgtatctttcttcgaagaatatatagcaaaattgaatctcttttcaatgtgggcgttgacggattcgaaccgccgaccctctgcttgtaaggcagatgctctgaaccagctgagctaaacgcccatatattcttcattgaaagtgttcggttgtgggcgttgacggattcgaaccgccgaccctctgcttgtaaggcagatgctctgaaccagctgagctaaacgcccttacactttcttttcaaaagcgatgcaaaggtatggcttttcttgagacctacaaattatttgcgatattttttttcaaaaagttttcaacaggtataataacaaactgattttcaattataaaaaacaagcatacagagtctccccgaacgtatgtccggaaatacaatggaggcttgacttacaggattacatccggcacctaatgacacgtgcaggattacctaccgccacacaatcgtccggtatatcctttgtcaccacactgccggctccgatcacacaacggtcacctatcgtcacgccgggacaaatgacagccccgccaccaatccaacagtcttcgccaatagttaccggataagcatactctttggggttacggcgttccagatagtccattggatgatgtggagtatagatttgcacacacggacctatcaatgtataacttccgatggtaatgaatgctccgtcaaggaacgtacaattggcattcacaaatacatgctcacccaaacggatgccatcgccatgatcacaatgaaaaggcgggcaaataacggaagtagccggaagatcaggtatcaattcttcaagtagtccccgataagtttcgtcatacgtactcaagcaccgcattcgtgccaataacttcttggcatgttcaaatctcacctgtaattcaggtgccgacatatccgccaattcaccgctacgcattttttctatttctgtcatctcgattcattctgtttttccgtttgtaaatacatattttgtctcgtccgaaagctgttcgttaaattcaaacccttcccaggcgaatgtcttcaattgttcaacagattctatccggttcttcagaatataacgagtcatctcgccccgcgacatcttagtataaaccactaccgtagccaattttccgtttttccagacgtgaaactcgggagttatcacacgaacctccttctcaacccgcttccaatcgaaaagtccccgcatttcgtcacttgccagattacaaagcaccccaccggctttcttgatatctgcaataaaccggtctgtaaggattggcttccaataatcaaacatcgttctgttgccgggttcaggcaaccgtacatctccctcaagccggtaaggccgaatcatatcgagaggacgcaacaacccatagcagaatgaggtcaatctcagatgatcctgggcatagcaaaagtcttcttctgaaaagtcctgggggtgaactcttttaaaaacaatccctgtataagccaacaatgcaggcaattcccgtgtaccctccgagtgaaaagcctgatagcgtctataattttcaacagcaatcttaggattcacctttaacagccgttccaactcctcgactgaaaattgtgacatctgcagagcaacctccgctgcctccttccggaagccgggaaatgtagtgagaggcgtttttgtcttcgaaacgtcactcatagttttggcacaagataaaagtatcagcataggcatttttccttatttcaatgtttcaaaggaacaaaattaatagaaaaacggcagtatgcactttttttcttatttttgtgcagtcactaaaacctgaaaaactaacattttacctaaaatgaagattaaacgactctacttactgggagcctggctccttttgggcgtcagtgcttcggcccaaatcacaagtattcaaccacaaccacagcagatcctttcacaagcccgaaacctgagcttaccggacacctatctgattgttggagatacagaggcaaacacacatgccgtcagtgccctgaaaaccctgcttgccggaaagcattcggataagaacgggtttcgcatctatatcggtgaaaaaggagacaaagctatccgcaaattcgcccgacagattcctaatcacaaagaaggctattatttggccatcaatgataaagagattgtcttagccggccaggacgaaaggggaactttctatgccttgcagacgttagcacagttactgaatgacaatcaacttcctgtagtagaaatcaaagactacccttcagtccgtttccgcggtgtagtcgaaggattttacggaaccccctggagccacgaagctcgtctccgtcagttgaagttctacggagagaataaaatgaatacctatatctatgggcctaaagatgatccataccacagttctcccaactggcgcctgccatatcccgaaaaagaggccctccaattacaggagttggtaaaagtagccaatgagaacgaagtggactttgtatgggctattcatccgggacaagacatcaaatggaaccaagaagaccgcgatctgctactggcaaaattcgaaaaaatgtacgatctgggagtccgttcgttcgctgtattctttgacgatatctcgggcgaaggcaccaatccgaacaagcaagccgaactgttgaactatatcgacgagaaattcgtaaaggtaaaaccggatgtcactcctttggtcatgtgtcctacagaatacaataaaagctggtcgaatcccaagggaaattatctgactaccttgggagaaaagctgaacccttctatccaaataatgtggacgggtgaccgtgtcatttctgatataaccaaagacggcatagcttggatcaacgcacgcatcaaacgtccggcgtatatttggtggaactttccggtatcagattacgtacgcgaccatcttttactcggaccggtctatggcaacgacacgcagattgccgatcagatgtcaggctttgtcaccaatcccatggaacatgccgaagcatccaaaattgcaatttacagtgtagccggctatgcatggaatcctgaaaaatacaacagtgaacagacatggaaagatgctatccgtaccattctgccaagtgccgcagacgaattggaattttttgcagcacataactccgacttgggaccgaacggacataaataccgccgggacgaatctgtcgaattgcagccgttatcacaacgttttctcgatagctacctgaaaaacggttcatataccgaagctgacttcaacgctttggaagcaactttcggaaagatggtagagtccggtgacattttgatgaccaacacagggaatcgtcccctcattgttgaaatgatgccttggctccgtcagtttaaattattgggcgaaaccgggcaagaagttctggctatggccaaagcttataaagaaggggacaactcactctttatccggaaataccgtcatgtgaaagcactgcaacagcaaatgttccaggtagatcaaacctataaccagaatccttaccaaccgggtgtaaaaacagcaactaaagtgatcaagccactgatagatcaaacatttaccacggtcaccgaacgctataataaggagcacggtacacaattggatgccgcaacagactatatgccccacaaactggtaagtgatgtagagcaattacgcaatcagccgttacagatcaaaaccaaccgtgtattggtatcacctgccaacgaagtaattaaatggggagccggatgcacgctgaccatcgaactggatcaagcttatccgggagaaaatctggatatagatttcggtaaaccggacgtggctgcctggggacaacttgaaatttcggctgatggcaaagaatggcagaaggtcgatttcaaacaggaaaagaaccgcatcaccttgaacttgaaacaaacacctgtgaaagctgtacgtttcagtaatgtcggcaatgcggaacaagaagtttacctgcgccgcttcatgattactctggacaaatagaaattcattaaaaacttatctgtgcaaaagccccttccgacattttcgctaaaatacggaaggggcgcacacaaacaaaacaaacaataattcatcaacagccttcacaggctataccgatgaatatcactaaagatagcatataaagaatatgctcgtgaaaaagccgcctttccaggctgcagaggataagattaatcattcagcatgttcatttatcttcgtacaagagctttctctttcctgtaatacacgaaatttcatttgttgctgttcccgccaataataaaaacctccacacgaaatcttacacaaaacaacatattctgttttacgcttccgcatcagacgtaacaaaggagtacacaaaaacttatccggttcggaaacacgtaccctgattgttttctgcccggaagaaactccatcggggcaaggcaaccagtcgatatcaagtatgcccagaagagaataacaataaaaagcagaatgttcataagcataccatgctccttcttcctgatacagaaaaatacaatcaacattctgtgcttctatttgcaatatctcttccagggtcatactaccgcaacgttctattgaataactactatcttacgggctacagtctccccgccggaggcggaagtcatctgtacagtccctctcctgctcgctccgaaagctacatgcaaataagcatgcgaactgtatttgctactgagttccgacaccatgccgtctcccggaagagctccgggagatgcggcggatgggtgtagaaagagccagccgggagatgtcggattcaacacccgtaccgtccagttacgatcggttgaaccgaccaaatcgaggacaaacgaatcggtatctttctgatccgatatgacgggattccaactgacacgaaccggctgagacagattatcacacgtcatagtcaaggttgtagctacggcatcattagccgctgaggtaaaatcccccgtaattttatatttgttacttcctaaagcctgggcagacaggtttgtcaaccaattacaatcgtcaggaagggtcagaaccggctgaataccacgactggaatatacggtacaaatatccacaccagttgccgatgtagtcacacctgtttttccatataggctgaatacattattagacgatgccatacggtattgaccgtcggccacaatacaaggcagatccgtgtcttcatccgtcaactccactttcaaagcattcgaaggtgcagaagccacagcaatatccggactttcatatcccggaccattgactcccaccactgtaacaatatagcggtggttgcgtacaatgttcaaaggacttccgtcattaccgttcatcactaccttatagtagccctttttccccttataccgggctgcaatcactactcccatatagtcggaagccgaacaattgcgctcataaatgtataaagatggttccgcaccattaacccaacccttacgataatccagataggttccaccggtaaccggattcgcgacaacgggagtatttacttctcctgtgcaatcggtcggagccaggaagccatgacaggccccctgatgtacagtaattccctcgatgacaaaatcatccagtccggtattcccacctccattacccttcttcacttgtatacatgctgtggaacgcaacagtttcacaccctctgctttcgttacgatattgattccgttcaatgcaaaacgtccccacatgaccaaaggcattacatggtttaacaatgtactctccccttcatccacatgttcgagtgaggctgtctgcaaggaagagatagccgcattttctgtcataccgggagttatatcaccaaagttcaagcgatccgaagtgccatcagcactccgaccgtttgcaaccagatgaatgatacgccgttctgaagtggcatccaaacggactgtgaaattaatccccgttccggtgaccaccaacctgtcactctctactttgacgcgttccataaactttgcgtctttgtcgaatatcaacaagtctgcgttcttaatatcggtatccgtatacggaccaccggcacgagtaagagtatttactgactccggttgcggtagggttaccgaaacagcaacatctatctttccataagcgggtttctgttcctcctcttcatgactgcacgaggcaaacagaaaagcaatcagtatacctattatatattgtattttcatattatagcgcattttcattgtttacactaaaatctatctcctctccccctgataattatcggaataagtattcacgattacaggagtccagaagggcttttcttccggtcggaacggaaccttaaccgaatgagacgagcgagt

SEQ ID NO: 5000 - DNA, 9651 bp, Unknown
  gut microbiota DNA sequence
aacatcctaaactctattggcaggatatgggtggaggcaagaacacacgtcccaatagctattacttgaaggatgcctctttcttccgcctgaagaatctgactttgggctatacgctgcctcgggtatggaccgaaaaggcgaatatctctaaagtgcgtatctacttctccggtgataatctgttgactctgactccgtacaaaggactcgaccctgaacgtaacggggatggaagagatgccatctatccacaaaacagaatctattcgtttggtttaaatgttgaattttaattaggacatgcaatgaaaaagaatattcatatattgttagctgccacattacttttcggtgccacctcgtgtgaagactttcttcagaaagatcctccgtcaagcccttcgcaaagcgtattctggcagaaaaagagtgactttgaatcggctttggccggaacttattcggtcatgtactccggcgtattttctcagattatgccttgtctggacggattgacggataatgcgatcgtacaacatagcgaaggtacgtatggttgggccaagacgattgcccagggagatcttactcccaatcaaggtgggttcgttaccgatatttacggcaattgctataaaggcattgcccgtgtacatatcttgatggaacaactcgatcagtataccggatcggatatcagtgcggatgaaaaaaagtttatgcttgcacagtgtaaagcattgcgcggctatttttattcatggttgtatcagtgttataaagaggtgcctgtagtgactcagtctctcgatctgaatacgatgtatcaacctaaggctacccgcgcagaagtgttgaatcgtgtaatgaccgactatgacgaagccatcagtgaattgcccgataagttgtattccgattcacaaacttccggtcggttcactgtttcggctgtcaaggctctgaaagcgagaatcctgctattcgatgcttacgatagcaatggaaaggctatttcttccaagatggaagaagtactgactctgttgcagagtatcaaaggttatagtttggctgcgcgtgtgcgtgacaattttatctccgaaaagcaattggcatcaccggagatcatgttttccgttcgcttcctgcgtccgaacctgactcattctatggatttgtattatggcgcctgggcggttctggaccccacccgcaatatggtggacgcatttgaatgtacggatggaaagccatggggagaatctcctttgacggtacgtcctgacgaaagtattttatatggtaatgacgatgccctgaagaaagcggaacgtgctaaaatgtttatgaacagagaccgtcgtctgtacgagtctgtcaaccattctatgatggccaattttgtcgatgacgggtttaaagacgaagaggttcaggtgaacgaatcaaataataaagggcctaccggtttcagcgctctcaaatatgtccaacctacggatgtgacacccggatacagtactgtttcggatgcagatatcgttgtactgcgttacgctcatgtattgttgatgatagccgaagccgaaaacgaagcacacggagctaccacaacagccttgaatgctattaatgaagtaaggacacgttcgggacaaccggccatcgaagccggtatctcacaagacgatcttcgtgaacgtatccggaacgaatggcgtattgaaacttgttttgaagggctgcgttacttccagttgaaacgatggaagttgatggataaacgggtgaacggggtagaagatcctgcttatccgggatacatcaaggtgtataaacctgcatttgaatttttcccgattccacagtccgaaatagataaagcgggcggtgtattgaaacaggacccggcgtatgaatgacaatctgtacaccgaagatatgacttgtaactaaactcaccgttgataataaagataataagccgacggaacgtatcattcttcataaagaagaaatacgttgccgtcggctttttataaccgattaggtttcacttcatagtccggtagagttgcctcaggacatcacttgcgatattctgaatcagtcgtaccaatgtgtagtttctattgggacgagattacagccagatagctcctccttcggcatctccggccttataggtataggttatgaattcttccagagcttctttccaagtcaggttgaaagtttccatgatggagtgtacggtacggttgctgccctcgtcgagactgtcttcgcccactttctctaagtttgcttcttcatctatatcgataaattcttcccgactccagaatacaacgaccggcagattcaggttaatatcccatgttccccgttgtatcaataccccggaaggtttgtagaaaggatcgaaagtaccggtctgcggattttttttggattcgtaaccgtgatacagccggacttttagatcgaactctttgcggtctttcaagaaacggataattccttttaaccctaccggattgtcccgtcccgtgatttcggcctctccgctgtgataggtcttatcccagggggtagtgtctacataaagatagtctatcagcttctgtggatcgttgtcgtcagcttctatctgtccgtcgaaggttggctttatattttccggtgtgaagaagtgctggtgtatgttctcttgcccgttttccacaaactggttattcatcagttcgcctttggcattgtagtaatagataaacatcagataaacgggagcaggcgtaaagcgtccttgatttttatattccccgtttttctgtacatagaacttcttctggctaccttctgccagtgtccagccttgtccggccttcagttcataggtaatgtcctgtattctttttatatgtcgggcaggagattcgggattctgatgcggaccaccgttggtctgtatctcgttccagtcggcatgcaggtggcattctaccagtcggaccgttactttggccgggtcttcatgcaacttgttttttgtttcgtcttcgggaatcaccggatctttggtgcaactattaaacaataagacaagaaaggcccccgtcaggagcattaagatggttttagatgtaattgttttcatttttctttcaattggtttgttgatattatacaatgaataaaaatcatagtcagaagttccagttcagtgtgcaacgtatgtcacgtcccatatcatgggcatagtagcgtgagcggttggtatattccttatattccctgttgaggaggttgtctgctgtcacagtcagtgttagtttgtttccgtattttacgggacactccatactggcttccgttccgaaaagatgataggcgggaggggtatatggaataaggtcggttgccggattaaaacggttttgtttcgctacaaatttgtggcgggcagtcaggcgaaacaggatgtgtgactttgtttggtgcgtccatgccagttcatgaccgaggtggaaagaaggaatataagggaggtaattcccggttccttgttcgtttgcccggataaaggaggcgatcagatgatactcccaggaggcggcaggcataaagcggaagtcaaaatccgctcctctgaaaaaggcgggtgtctgccggtaccggaataccggataagtgcctgaaatgacagtgatgttctctttcagcggttcatcataaatatacccctttatccattgcagatagctgtccagacggatatggaacactttgtcccggtagctgaccgaggttatccacttgtggcttcgttcggcattcatggaggcgtctccccggacaaacatgcctgatcctaattcatttccgttgctgtacagctcgtgcacatgcggggctctccatgtcagtgcgaagttggatgtaagctcccagtattttgaaagtcggtagtgcccgcccaggccatacgtgaaattacagaattttctgtttcccccataatagtttccggtccagtcatatccgccggcacgtgtctcttgcctatccaggcgaattccagcttctacggcggttctttcataccggtatttctgtatgccgtacgcgcctgcctgcatttctgtgtagttgggaatgacggggacgattcccgtccctgctttgctgtgattgtcggtgaatatcatttgtcccccgatttcggtctgccatggcccataatccagtttccaacggaaagtattttggatagaactcagcagcaatgcgacggccggtatatccgaatgattcatccggcggatgcgattctcccggcggtcgtctttctgccaggaagtttgccagtaaaagacacctgccgcacctgcattgtatctgacttttccgatggcagttctgtggacaactttttggtaggggtaagagatatgccgtgtaaaagggtctgtatataccggacgtcccaagcggatacgttcggcaagcaggtcctcacttcccatctgtgcaccgaacatcactcccgtctgttcgccgaagtggctgtatattccttcgatccgtaatcgcccgctgtcatatcccgcagatgcagagaagtgtaatcctctggttccggtattgttgagcaaataatgtgccgtagagcggtctcccgaatttgaataggtcccttgcatacgccaggcgatgtttctgaggaaaggtagtgtgccttccaggcttccggttgccgcatagcgatgcccgttacttccgtagaatgtggcgattttgcctttggggtgttcctgcccgaaagcgaaagggggctgttccatcacgataatacctcccaaggcatccgaaccgtaccttactccgtccgcgccttttatgaccagaatattaccgctttcgtttatatctacttcgggggcatggtctgtcgcccattgttgccccgtctggcgcgcaccgttattgatgatcaggatgcggttgccatgcattccatgaatgacgggtttggatactgttgttcctgtgctgagagaactgacaccactgatccgttccagcaatgtggcaagcgaactgcctgccgcacgatggatttcggaggaagagatccggttacttacggctcctgccgttattcccggacgccctgcggtgatgacgacttcttccagatgttgtaccggaaatgtgacaggaacagtatctctctgtgttcccgcatgttggtgcagcgtttgtgcgtatagtcccgtgccggatgtggcatacaggcatgcaacatacaggtacacatgtttgaaatatgtttcgaatatcatattttacatgtatagtaagtctatgcccgggaaatattcctttggatcttttcccgggtagtttcaaaaaataatggggtttagagagaaatgttatactgtcacaaagggaggggcacggagggaatgaaagataagggaagtcgtgaagcttctttcttcctgctgaagataccccaccggaacgcttaccggcaagcaaatatattcaaagttttcggcttcagtgaagggggagagagtaaaaaggcaaattgcacaaccttcctccggattgcatctgtgctgtacaccggaagacatgcactcagaccggtcatgtgtatggagcgtttttatccaaaagaatggcatgagagtcagcagcaacagatatgctgccaaaactcggttcttctgtatatgttttacccttttcatttgtccggcaaatatcggtttttatgcggtagtgtacaatacctatatgtaggtatatcccttttagatattgtccggaggataagaacctggtcggttactctatgccgtatatacaagttaccggaaatagggtaagtgctttaattccgacaatgggagacaaagtgggttcattatgccatgattgaagcgtaaaccagaattcctattgttgtaagtagccctacgtagatcgtgatttccgtatgtttcacttttccaaaagaagcgcctcttgctgttttcttcagtaaataacacatgaatgctgctccgcagcatcctatgatggcacctactatgaggtcgcccggataatgcactcccaggtaaatgcgcgtatagcaattcagcgtggcccataaaagaatgaaaaggctcagccatcgtttgcggaacaggaagaccagaaagaatgccagtccgaaagaattggaggcatggcaggatggaaagccgtaacgtccgccccggtagttgtttacaatgtggacgaggtcggagatgggatttgccggattggacggtcgcaggcgttctacggcagggcgtatcagactggcacaaacttgatcggcaaagaggatggtgagtgcgatggcagtcaggcagcatagtgttattttccaattgaagttctttagcagaacatacaggatactggcatacatcggtacccaaatccattttccggtgaaagtacgcatgaaataatcaccaaaggcattgtgaaatccgttgaggtatagcagtagattctggtctgtgttgaccagtaactggatcatgtcgttagtcatatcattttggggttaagagggtggttatcgtttagccaagtcgtcatacaacttttgcaggtatgctttggctttgggtaaattctctcctttatgtgttccttcatctgagacgatggagttcgattcgcagttgaatacgacctcattctccggtgtcatcattccgaaagcatttggaaaggtgaagaatccgaagtgaggtgagttcggattaagcatgtttttactaaagataaactcttcgtgcggtaatccgagttgtcccaacagtgtggcggcaatgtcaatctgcgagccgtaagtacctatctgtctgggctcttttacggcacctcctatgaaaatcagcggaatccgatagcggtctacggtcaggttgtctatgtcctgcggataggctcccagatgatcgggaaccaatacgattaccgtatttttccataagggagtctctttgaactgacgtacaaagtcgccggcacaactgtctgcataggcaaaagcgtttagtctgggattttccaatcgtcggaacgggacttcgaacggttcatgactgcttgaagtctgcaatatcttcataaagggtttttggggtgtatgctgtttcaagtcgtccagcagacggttgaacaccacatggtcatgcgctccccatttgctgagacgttcggaaagcgggaaatctttatccgaaacgatgttgtctattcctgcctggatcaggtaagagcgcatgttggtaaaatcggcgtcacctccgtaatagtattgcaggtcgtatcctgctttcttcaggctgccggggatcgaaggcaagtgttgcgttttctttggatacttcataatactggtagtcggttgtgccggataaccactgatgatggctgccagtccacggtcggtgcggaagctgttggcaaagaaatgagtgaacaataccccttcacgtccgaactgatccatgttgattgccacattggactctcctccgagggtttccatcagtttggacgaaaagctttcgagtatgattaatatcacgttcgggcgttcggtcgtgaagagttgcgggatgctgtcagtgggggcaaccggctggtctttgagttcggcaaagagtttgtctgcctcttcggctggcatgaatcgatattgcttgtcgaaattgtcctggcgtgacaatgactccatcaggctgaaacaaggattgatagccgcatggttcaaccgctgattactgctgaagtaggctttgctcaggttcatggtcgacaccgtgaaacctccccgtatcgggatgaacaggagggcggtggcaagtagcaatactccggatacactcaaccgatgaaaaggtatttttaccggttgtttttgataaatcagtacccggtagaatatcaggtaaagtaaagccgcatagacagccattgcggccagtcctgccatcacgacccaaatgctgacactggccaaagcatctttgggcgaggagaagaggtagaacagcggagtggcatccaagcggaatccccagtattcatacagtcccaggtcaccgataaagatgcaggaaagcagaatggcgattatcatgaaatatccccggcgtatctggcggataaccgccggctgtatccagaccgatgcgatcagcaatagtccgggaatggcagtcagatatccggcaagtgaaaaatctaacggaagcccgtgtcccattacagagaaataatcagtccatgacaccttattatataaggtatggtagtaacccatgaaaattggtttctggaggacgaatatgaggacaaaaagaaaataagtcgtaacgaattggataagtcttctcttcataaactctatacttaaaaagattgaacggtcgcaaaggtacgattcttttctttatctttgcgcattaactgtggtaaaacagagagatatatggcaaaaatcgcaaagaaacttaccgaactgataggccatactccattgatggagctgtccggttatagtcgtaaatacggccttcaagagaatatagttgctaaactggagtcgtttaaccctgccggaagcgtaaaggaccgcgtggcactttcgatgattgaggatgccgaagagagaggagtgctgcaacccggtgccactatcatcgagcctaccagtggcaataccggtgtgggactggcgatggtggccactatcaaagggtatcgccttatactgaccatgcccgaaaccatgagcctggaacgccgtaatctgttgaaggcattgggagcccagattgttttgactaacggacagaagggaatggccggttccattgccaaggcagaggaactgaaaaagtcgattcctggttcggtcattctgcaacagtttgagaatcctgcgaataccgaagtccatgctcggtctaccggtgaagaaatctggcaggatacggacggaaaagtggctgtattcgtggcgggagtaggaaccggaggtactgtttgcggggtggcccgtgcattaaaaaaacataatccgaatgtatatatagtagctgtagagcccgcatcctctccggtactcgaaggcgggaaagcagcttcacaccgtatacaggggatcggagcgaattttgtgcccggcatttacgatgcttcggttgtggatgaagtcatgcctgtgcccgatgatgaagcgattcgtggcggacgagaattggcctcgacagaaggattgttggcgggaatttcttccggagcagttgtttatgcagcccgtcaactggccggacgtccggaatttaaaggaaaaatgattgtgactctgttgccggataccggcgaacgctatctaaccaccgagctattcgcatttgacgcttatccgttggactgaaaagaatatctgcgattgtctgatattttataatattcgcttttaatatactatttatgaatcgaaaaactatcatgattccctttcgggaaagagaaggggtgaggaggaagtttctctttcttcttttt

SEQ ID NO: 5001 - DNA, 4940 bp, Unknown
  gut microbiota DNA sequence
tcataccatattctatatgactttctaagaaatctacttgtttttgcaactttaacggatctatccaataatcatctccttcacacattgctatatatttcccccttgcccgaggcagattgtatacaatgtttatatccaatcctttggaatactgattttcaacctgataaatgggcttaattatatcaggatatttagcctcgtattctttaattattccggctgtatcatcagtagaggcatcatcatgaattaaaacctcaaaaggaaaattcgttttctgtattaaaaagccatctaaacattgccggatgtaagatgaatggttataagttatacagaaaatgcttaccaaagggggagtatcaatattctgcatatattcgattatattgatcaagcattacatgattcatctcctcttttgaatcaaacttaaaaaataagaaagccaatggttccgacatataatccttaatataatctccagatctccaaaggatacattcatcaaatatatactttctcaaatcatcaggcacgaccaagcttttcaccacaccattttgagttcccatgatagttctataggcccaaaatccatgttgctggatatctacaggaaaatgactacaatcaagaccacaatgtgttcttgcctcccaatagtcccaatttattcctgtcaatttctcagcaggaatcatatacaggttaccaaggatgcgcctcatagcctcaatgatatatggtttaccatctttaattctatattgcattgatagtattccatcttttaaccccaaaatattgaccatcttttccgcttcatttattaaatgatctctgacacaatcaaaattatcagccggataagtatctatttccacacgataaggattcacaaaagaatattcattattcgtacaataggctacaaccttcttattaagaatgaaagtacaacatgcgtgttgtgaaccatcaatataaggttcaataacaatatgtttaattctcgagtgttcgaaagcattttttattgcacttttagcttcttcatagcaatcggcttttgctactcctctacctgcacttaaatctgtaggtttcactataatcggatattcagccttatcaagccacttcaccgcatcctcttcctcaaagaaatattctgattgaggggttgttataccgtattctctagcaaatttcttaaaacgatctttatgatgcatgattaaagtgttttcataactatcatgaccgggaagtcccatttcttccgcaacataagcagctgtaatcacccctatatcattacaacaagcacaaatggcatctatgtttaatttccgagagagagctaatacttcctccttacaagagtaatccatctggatatattgatttacatacttttcaccaactaaacctggacgattgccaattgacactacataaaagcccatttcttttaatgccaaaatcaaccttaagtcattatggcttgtatttaaaataagtacctttttcatttcgtaaactgtttcaattcattgaataactctaaaactaaagtttctgttttttcccaacccagacatggatctgtaatagactgtccatacacatttcctccaaccggttggcatccatcttcaatataactttcaatcatcaagccttttaccgaagacaataatctggagtcacgtttcatagaaagtaaaacatctttagcaacatttatttgctctaaaaaatctttatttgaattactatggttacagtctattataaaagcaatattttctaggtttctttgttggtacaaatcataaatacgaattaaatcatcataatgataatttgtattagcctttccattcacatctaaaaagccacgtaaaacagcatgtgtacatacattcccatgtgaaataacctcccagccattatatataaaatggtgaggatgttgggctgttacaatagaattcaacattacagagatatcaccacttacaggatttttcattcctactggaacatttaagccactggcagtcaacctatgttgttgattttctacagatcttgccccaaccacgacataggacaataagtctgatacataacggataacttccggatacaacatttcatccgcaccaaataatccggtttcttctataacttttttatgaagcctgcgaacagctaataaaccttcaacaatatcctcctcgcgatctaaaaaaggttgatgcaacaaacccttataaccatctcctattgttctaggtttactggtataaatcctaggaataatcaatatcgtatccttaacctcttcttgaagtttggccaaacgcttcgcataatcaagtacaacattttctctatcggcagaacacggaccaattaccaaaataaatttatccgatttgccttcgaaaatatcccttatttctttatcacgtaaaattttgcgttttgaatattctttatttaaaggatatttcaacatcacctcctgaggcgtaggtaatttttttaagaaatccataacattcttctgtatgattaattatatagtgtctaattctactttacaccccatttctgctgacatatatgctgcataaattattctaatggtatcatatgctagatcgaatccagccttaggatctctatcataaaaaatagcttccataaagtcacgcatttcatctgtataacctctgattatttcatcttcaagaaaaggcttattccaaccgattttggacggtaacatctctgatatatacacattatctaaattatcttcatctagaaaataagtactcattaaatctgacatagtcaatgtacaatttatggcagcgtcattacaatataactctacataatttttacttcctcccaacaaagtatcagtagctataatgacagcccgcgaatcatcagtaaaatttaaaattacagtaccacaatcttcaacatcgacaggattagccgcaatatgcctatgttcgtaatcagataaattgggggtaatacgtcccatatcagctatgacactttttacctttatgtcaataccatgtgctttagcttcttgttgttttaaccataaaatagctgataaaggatgtgaacctgtccttatgaaagtacctccgcccgttttatcccattcacccgcaactggagaactagaacctttaagactttcttcaccttttgcatataaaatacgacttttctttgctgtaataatctccgcagcttttaatacggctggtgcatatacaaaattttccgcatacataaacttctttcctgatttacgaataatctggcgtaatcttcttatagactcaagaagttgtaaatacattacttttttagaaacattgatcccaataggatattcatctcctgacatgccgaaatagcctgtcaaaggtttttcacaaataacatgtttcccggccaacatggctctttcaatcatttcttcatgtacatatggcggggtacaaatatctatcacatcgatatctggatcagtcaacaagtcctcaaaatcataggaggtttcttcaaatccatatatagcttttgcaacttccagctgctctttgcgtcgggccacaatcattttaaatcggagtggaatacccgtaaacctttttaaagcatttatatgtaactctgtggcacgccctgcaccagccattcctatacagatttcatttttcatatatacaagtttataaatttaagacctattgccttcaaaaattactgatgttattctatcaagtccactaaaagtcaaactgtgatgcatgggcaaacaaatcacactgtttgctatcctattcgcaatgggcaaattatccggatgtgcggattccagtccacgataagtggaaaactcacttattaacggataaaaataccttctgccgagtacatcattctctttcaacttaaagtaaagctcatcacgggtcagaccatattcctcagcatttataaaaataggaaaataagaatagttgtgacggacaccgggcatatcctccatgaaacggataccggggatatctttcaaagcatcacgatattgaacggcaactttatgacgagcctcaatggcggaatcaacttgtttcaaattcaatagtccataagcggaacggacttcatccatcttaccattaataccaggagcaacaatagtcgtttcaccggcaaagccaaaattcttcagataatcaatgcgtttcttggtctgttcgtcgtgacagaccagagctccaccttcaatcgtattatagaccttcgtagcatgaaaactcagagtggacatatcaccggattcaagtattgacttgccgtttacctctacaccaaatgcatgggcagcgtcataaatgaccttcaaaccatatttatccgcaatctcttgaatacgaaccgtgtcacaaggtttgccataaacatgcacaggcataatagcagtcgtcttgggagtaatagcggcctctattttttcaggatccagattacaggttacaggatcaatatccacaaacaccggcttaatcccgttccaccacagagaatgggtagtggcaacaaaactataaggagtcgtaatcacttcaccggttatacgtaatgcttgtaaggcacacattaaaggaagtgtaccattagtaaaaagactaatataaggtacctttaaatactcacataaagcctgctccaacttctgatgataatgaccattattagtgagccatttacgatcccagatatcctcaagataaggaataaagtcatccaaggaaggaagaagtggagaagtaaccgtaacaacattttccattataattataattaaaatc

SEQ ID NO: 5002 - DNA, 14385 bp, Unknown
  gut microbiota DNA sequence
gtgaagaacgcaatatgtcatcagtagtctttttataccaatcgaaagttacgctcaagccatcgaacacctgcaggtcgaaaccgatatcggtaatagtagtggtctcccacttaatgttacggttggcataagctgtctgctgatatccgataataacaccatccgaagttttggtaaacggatagtcatccacacccgaaatcatagcttgatagggataaagtccgatattctggttacccaactgtccccatgaacctctcaacttgaaattgttcagccaattaagattcaaatttttaataaactcttcttctgtggcacgccaagctactgagaatgatggaaatactccccaacgattttcatcggagatgcgtgaagttccgtcgtatctcatattggcttcaaacagataacgctctttaaaatcgtagttaaaacgtccgaacaaggactgaatagcccactcttcttcacctccactgttactccagtcggctgtccctccggcattgagtaccggcaagtcaaatgcaaagtctttacgataggcattgagcgtttcatatttctccgactcttgattgtaacctaccatcaaagagaaattatgtgcattatccactaacgacaaatcatatttcagataactataaaggttggtgtagaaacggcggccatcgcctacacttaatcccaatccgcctttatcgagttcggacgatctctcgccggtatggtaatcgtaagtataagtcgtgcttcctcgccagtctttacttttgttagactgaaggcgggcagctcctttagtataccacgtcaagcctttagccagattgatctctaaccacagctgagcatttatatcaaaattattatcacgcttcatggcgttatctccgataatggcaggcatgtttttgttatgactttcgaaggaataagcggaacttgtccagcggcgaatacctgttccgtcatccggtaaccaaggcatataggtcggtgcctgcgaaagcgtagagaggaaagcatcattctgtccctggcgaggctgctctgtttcaccatacatcaagttggcataagttcccacctttataaaattagtaatacgcgcagtaaggtcgattgttgcattgtattttctatatttaaatccacgcatagtacccggctgatcgacaaaattcaaagctacattgtaggtagtcttctccgtgctaccggccatcgagagattatgtgtctgcactacagctgtacggaacatatagtcctgccagtcaaagttaggatattgggggtccccgacattattccgataaagattaatctggtcttgagtgtattgtttaccggttccggagttcttccaggccagattcgctagctccatatattccacagaattggtgacacgatcatataacttggtgggtgtgtgcaaacctacatttccatgataactaatgtgcaccttatctcctaccgcaccttgcttggtagttaccaggataaccccgttggcagctctcgctccataaatagcagccgaagctgcatcctttaacacagaaacactctcgatcacgctgggatcaagatttgtcatgctacccggtacaccattgatcaggatcaaaggatccgacccggcggaagagaaagtcccctggccacggatacgaaaagaggttccttccccacctggctgtccaagtccctgattgacacgaagtcccggaatctgcccttgcagcaggatagcagcattggcaaccggacgttttgaaatatcgtcacccgtcacagcagacacagatccggtcagattgactttcttttgagtaccgaaacccactacgacaacttcatccaacttctgggcatcttctttaagaacaatgttcattggttctctctgggctttgatactctgtgttttatagccaatataggaaatttccaaaatgctcccttccggaacatccaaagagaaccggccgttcagatctgtgatgtttcctaaagtagttccttttaccaatacggatacaccgataagaggttcgccagcttcatcagtaactacgccgctgacttttagattttgttgttgcataatggtaaccgcatcctgtttgagcccatcggccacggcaaactgaggagaaatacataatagcagtagactggcacctgctattttgagacaattcatttcacgagtcttgattaaactcggaaacaggttagttctttttgtcatacattaaatttttcggttaaacataaaaataaggaatgttctatccggaagatttataaaacccggaatttgtttttagtcgtttttctaagtcttcataagctttctgattttgattattagtattctgtcaatattagaactttactgaactatgctgatactccattccgaaagcaatccattggggagtagtcctttcagaacttggaaaaacacaactttcatacaatttggtaagataaaagcggaaaaagtattgatttccttcggtaccgtacgcaatatttatacttgtttgtaccctaattctacctaatagagatataacatattgattaaacgaaacttataccagttaaacaggaaaatagaaggctgtttagatttacttcaaatgactaattagcttgaagacattgaaatttattaaaaaaaagattcgtattttgcattttattaaatcttattcttatctttgccgcataacatctgccaaagacttaatagatgtgaattatttgttagccttaaaagctccgaaatgtactttctatgctgcggatatagttctgaaagaacttaatcaattaacaacacacaagaggcctccattctgtactacctattttatactaattgacgtccaatgccttatttaatcaagaaaataagtgccccactacccaacatcattatctgatattagtatatcattatttatttgaaatattataaatgaataagctacatttaaaattactcttggaatgccttccggaagaattgcttataataaaaaaactgtttttgccatcaataatttccggatagcaaaaacagtttatcttttttaaagagctggtataggattatttattgaaatagcctacataccagtcatagaatttttgaatcccttcttctatagaagtagagggtttatagccaaagtccttttccaatcggcccgtatcggcataagtacataccacatctcccggttgcatacccatcatctgtttaatggctgtcttacctgctgttttttcaataacagaaatgaaatccatcagctctaccggtgcagaattaccaatattataaatatagaaaggaatgggatcggcagaaggatgagcaatgatcttcatcagacctgcaatgatatcatcgatatatgtaaaatcacgacgcatttgcccgttattgaatactttaatggggtcgccatttaatattgccttcataaacagacaaggagccatatccggacgcccccaaggaccatatactgtaaagaaacgcacaccggtagtaggtatactataaagtttgctataagcatgcgccatcagttcattcgacttttttgttgctgcatacaaactcaccggagagtctgccttatctgtttcagcataaggcactttatcattcagtccataaatgctgcttgaacttgcataaaccaaatgatttaccggataatgccgacaacattccaacagatttaagaaacctacaatattcgattcaatatatgcataaggattttcaatcgaatagcgaacaccggcctgagcagccaaattcaccacaatatcaaaatgttcgtctttaaacaagttggtcaatccttcacgatctgtcaaatccatcttgataaagcgataggaaggatatttagcactcggcaacaatatgtctttctcgatcgattctttagctatgccggtatcagctaaacgatcatatttcaactgtacatcataataagagttgatgttatccaaccccacaacttcacaaccttgtgctaccaatgcttttaccgtataagagccaataaaacctgcggctcctgttactaatgctttcatgattcaatttagtttagagtaccattacagaaaaacgacctataacgtaatgttctttaccattaacaaactcttccagtttcttgttcgaacgtatttttttgttcgaaatcatcaaaatggtattctgatatttattatccaagacttcttcttctgtcacttctttcactctttcatgcagatacacatccatattttcagaacgacgtacattcaggacacaataaccggatacgtttttctccttagaaagttccactgctttccggcataactcggaataacccaactcaccattaatagccggtacatcccaacctcccacaaagacagcacaaaacaatccgagggcaagcacattaatagtcttgttcaacgatttcttccgataaagaaaatacagagccgtaccaccactgacagtcaatattccaccggctacataaaaaagcttctgtcccaggaattcagtacccggcattcgtcccagcacaataagagccggcagccctgccacgaatacgacggcaggaagaagcaacgtcaacgccaaccattgattccagcggaaatgagataacaaaagtacagccaaataaacaaagaatggaaaagtcggtgccaaatagacagccaatttaccactgaaacaagataacatcagtaacgtagtgagaattatgaccataaagaaacgctccatatcagaacgaatcaatcggcgacaagccccggcaataattataccgaccagaaacagagcccacggagctaacgaataccaaacagaaataaaataataataaaacggggcactatgatcgaacgcattgacagcacgccccactgtttgacggaataacaaatcatgcagataagttaatcctccctcttcccaacaaacaccaccgaaccaaatgaaacatccgagcaataatacagcgaacgttttccatccccaataacgtccaaaggtcttcacacgtccggtaatcagcaaaaaaatgaaagtagacaccaatggtaccagtatccccacaggccctttggagaaaactgccataaaaatataaaaaggaaacagaaactgattccagttcttactgccttgccctttcagcatctgataaaaagtacgaagagcaagcacaataaacatacacatcaacatatccatgcgcaatacaacagccaaccctaaaaagagtccacaactcatcaacattaattgagccgataaacggttagctacagagacttcacgttccacccaccggtccattaccaacatgatcactaaagccggaataaaagagaagagtgaagcaaaccacatggcatgattgcctaacaagcacttgcccaacatcagaatccagaaatacaaaggaggcttgtcagcatactgaataccatgattagtgaacgtaaaaatatcaccattacgcagtgcttcgtcaacaatactcaagtaacgtaactcgttggagggagtgtagtcacggaaaatcaacaccggcagtacagccagcaataataaaaacggaagatatttacttttcataggctactgattgcttggagcttttacgtccaatcatcagattgcgaaaataggcaacgaatccgacggattgacccaaaatcaacacaggatcaagacggaatacaccgtatgccacaataaccgatgaaccgaccaggctgataatccagaagccggcaggcagtaaagactctttatgatggaatgaataagcccattgatatacaaagcggagagtgaaaataatttgccccattgaaccgaaaatcaatagccaaagaggtacctcttcattgcggaaaaaactatcgataaaatgttgcgcatcatgcaacataaaagctgccgcaattaccggtgtaatcactaacaaggttttcagtgctccgtgaagcttattccaaatacctttctcgttcagattccacaaatagatataataggaaataaactgtccgaagataatagaaaaatcatcacgcaaccatccataaatacacaacaaataagatccggcaatactcaatatccagaatatggaaggagacactaccttctttgccctttccgataatatccattgaaatatgatgcgagctgagaaaaaagcctgcgctaaaaaaccaattacatagataaagccgctccccttcacaaatttacgctattaagttattgtcaccgatacgatagttaatatatctctttttcatccaacgataggcaaagcaatcaagaaaaggagagaccaaccggttccacaaatgatatttggatgtacctgctacacgaggaaaatggcgaaccgggatttgcttgattttagcatcttgcaacaagatcaatgccggaagaaaacgatgcatacccgtaaagaacggaatacgtttggcataggctgtatgcaaaaccttcagaggacaaccggtatcctgcacaccgtcattggtcatcattcttctgaaaccattggcaatcttcgattgcagattcttgaaaaaagaatctttacgattggcacggattcccatcaccagctgataatcagcaatatctttcagcaacagattgaaatcttcgggagtagtctgaaggtcggcatccatataccctacatataccgactctgtatagtcgatacctgctttcatagcagcacttaatccggaattttttgctaaatccatataaaagaaatccttgttacgtgcgcatacctccataatacgctgcttactgttgtcacgcgaaccgtcattcacaaacaacacacaggccgtacaaatagatttgggtaaaaactctcccaatttctgttccaaagagtagatattgtcttcttcgttgtatacaggaacaacgatagtcagttgataattgatcgttttattcattgcctcattgtaaatatcccgcaaaagtacaaaaaatatgaaataaaataggattattgaaacaacaatccaaatctaatttatgtttttatagcacaaaaagaaaaaaaggaaccggattataacattcatacagaattagaatataagaagaatgccggagaaagataagattttctccggcattgttatctgttttataaatctgaaaactaaatcatgctttccggatgtaatcaacaatccatgcccctacttctttcgtaccaaatttttcaccaccttccacttgaatctcgggtgtacgtacattagcatccaaagaagcatcaactgctttgcggatcaacgcaccttcagctttacaatcgaagtattcgaacagcatggccaccgaaagaatttgcgccagcggattagcgatattcaagccttttgcttgcggccacgaaccgtgaatcggctcgaacaccggagtactctcaccagtagaagcagacggaagcaaccccatagagccgctgatgacagacccttcatcggtaagaatatcaccaaaagtattctccgtcaccatcacatcaaaaaatttaggctcctgaatcatcttcattgcagcattatccacaaacatataatcagtggtcacctccggatactgcggcgccatctcttgtgcaatctgcctccatagacgactggaagcaagcacattagctttatctacaacagtcaagtgcttacgacgcttcatagcatattcgaaaccgactttcaagatacgttctatctcaggacgtgtatacatattcgtgtcgtatgctttgtcattatcctgatatttttcaccaaaatacatacctccggtcaattcgcgaatacacagaaaatcggctccttctactaactctgcacgaagaggagacttgtgcaccaaacacttaaatgtttggacaggacggatattggcaaataagccaagttttttacgcatagccagtagcccctgctccggacgcaccttggcagtcgggtcattgtcaaacttaggatcacctacggccgaaaaaataactgcatcggcattcttacaaacccggtaagtttcttccggaaaaggatcgcctactttatcaatggcatccgcaccgcaaatggcatattcatagtttactttatgtccaaacttctcacagacggcactcattacctccacaccttgtacagagatttccggcccgataccgtcaccggctaatacagcaattttaaaatccatattattcaataattaatattcttctattatattcagcatttttatggtagctttaatagcagcctctgtctggtcagcatccaacccgcgggtacggaacaccttttcaccaaaactccaggtgataacggtttgcacaaaagcatctgttcgccctccgggagggatacttacagcatagttgatcagcatagggaacttacgtcccaaagtcactttataaatcttacgcagagcacgtacaaaagcatcatactgtccatcgccggaagaactttcttcgtaaacctgaccgtcgatttcgatactcagcgttgccatcggtttcaatccgtgtgctaaagtgacaaagtagcttttcaacttcactttattactcatgccatcatgcttcagcacgtcagagatgatataaggtaaatcctcctgagtaaccaactctttcttatcacccagttcaatgatccgctccgtaacttttttcatggactcttcgtccaactcgagtcccaggctttcaagattcttacgaatattggccttaccggaagttttccccaaagcgtattcgcgcacacgtccgaaccgctcgggaagcaaatcattgcaatagagattacttttattatctccgtcggcatgtactccggccacttgcgtaaaaacattctcaccgacaatcggcttgttggctggtatcacaatacccgaatacgattcgaccacgcgacttacatcattcagccgactctcgtctatattggtaatagcgttgaaatgatccttcaaaatagcttgtacgcttgctaaaggtgcattaccggctcgttcgcccaaaccattgatcgtcgtatgcagtcctttgacaccacttagcacggcagcaagtacattacttacagccagatcgtaatcattgtgtgcatggaagtcaaaatgggtatcaggataacgtttcttcatcttccgcataaactcaatcacttgaagcggattcagtattcctaatgtatcgggtagcatgaatcgtttaatggtagtctctttcaatgcgtccacaatccggaatacatattcgggagaatccttcataccgttactccagtcttccaaatacacgttgacttcaatatcgagttcgttagcataatctaccacggcaagaatgtcttcgatatgcttttccggtgttttctttaactgacaagtacaatgtttcagcgaacctttacacagcaaattaataacacgacatcccgtagcatgaatccaatccagtgaagtatgtccgtcgacaaatcccagtacctctactttttgtagcagatttctgcgggcggcccagtcacatatcatctttactgcatcaaattctccgtcggacacacgtgccgaagccacctccacacgatctactttcaactcctccagcagaagtcgggcaatcattagtttttcatggggcacaaacgatactccgctggtctgttcaccatcgcggagggttgtgtccatgatttctattttgacgccttttcccattgttctattttatctttattagtcaacaagaagtctatatcgtcaagtccgttcatcagacagtgtttcttgtaggcattgatttcaaaatgctcactttttccggtggctttattcgtgatagtctgttccggtaagttcacttccacttccatcttaggatttttaaagatagaatcgaacagttcagctaaaaattcttcagttaccacaaccggaagaacgaaattattcaattcgttgtttttatgaatatccgcaaagaagctacttactacgacacgaaaaccgtaatcagcgatagcccaggcagcatgttcacgactggatcctgagccaaaattttttccggctacgagaatctgtcccccatatgtgggatcattcaatacgaacgagtcaattttattcccctgcttatcataacgccagtcccgaaataagttttctccaaagccttccttcgttgtagctttcaaaaaacgtgcaggtataatctggtccgtatctacattctccaatgggagaggtacacaagtacttgtgagtatattgaattttgctttcatctttttatttacaatttaaacatttgcgatttaaataacttcgacttattatgcaaacgatctttattcacaaactccttggccggtaaatctacgatcgctacattgaccattacatcagttccctcgggtcagctatcactcccgttatcgcagcggcagctgccacaagcggactagctaatagtgtacgcgctccgggtccctgacgtccttcaaagttacgattactggtagaaaccgaatactttccggcaggaatcttatcatcattcatagccaagcaagccgaacatcccggttgacgaatagcaaaaccggcatcctccagaatcttatccaatccttcttcgcgtatctgggcatcaaccatccaagagcccggcactagccatgctatcacatgttcagctttctgatgtcctttcacaatagaagcaaatgcacggaaatcttcgatacgcccattcgtacaagcacccagaaacacataatcaatcttcttccccaacaatgcttcccccggctgaaatcccatataatccaaagatttcaggaatgaagctttggttgtttcattcattccatccgttgtaggaatatgctgcgtaatgcccatacccatacccggattagttccataagtaatcatcggctcaatatccgcagcatcaaaacgaacttctttatcaaaaaccgcatcatcttcactcttcagagttttccaatactgcactgcctgatcccattcttctccctgaggtgcattctcacggcctttgatatattcgaaagtcacttcatccggtgcaatcatacctccacgggcccccatctcaatagaaaggttgcagagcgtcaaccgaccttccattgtaaggctacggatcgcttcacccgcatattctacaaaatatccggtcgcaccactcgttgtcattttcgacatcatatagagagcgatgtctttggctgttactcccttgcccaacttaccatccaccgtgatgcgcatggtcttgggacgtgactgcaaaatacactgagaagcaagtaccatttcgacctcacttgtaccgataccaaaagcaaccgctcccatcgcgccgtgagtggaagtatgtgaatcgccgcaaacaatggtcatcccaggtaaagtaagtcctcgctccggaccaaccacatggataataccattccgcttgtccatcattccataatgagtcaaaccaaaatcagctgcattcctagtcagtgtatccacctgagtctttgaaacaggatcttcaatgggtttatcctgatcgtgagtcggcgtattatggtctggcatacaatatactttctccggacgaaacaccttaatcccgcgtgcacgcaatccggcaaaagcttgaggactggttacttcatgacaatataatctgtcgatatagagctgtgtagggccatcttccactgtagtcactacgtgtgcatcccatattttatcaaataatgtattcatctttttatttattattttatgatttacaaattacgtttggagtcacatcatttagtaaacttgttaatacagtcgatataagcttctaccgatgcagcgataatatccgtattcgcaccaaatccatagtacatctgattatcatattcaacctgcatgtgtaccttgcccacatcgtcacttcctttactaatggcctgaattgtaaattccttcagagtcatatgacggtcaataatacgcttcagagccttgatggcggcatctaccggaccattaccactggcagccgcttcaaatttctctccggcaatattcaatccgaggctggcaacagaacggactcctactccgctggtcacctgaagatattccaatttgatgcgatggttaccacttctgtctgcacccgccaataccagaatatcatcatcatgaatatctttcttgcggtcggcaagtttcaggaattcttcatatactttatccagtttttcctgatccagtgtcacacccagaatggaaaggcgatttttcaaggcagcacgtccgctacgggcagtcaacacaatagaattatcatcaatacctacatcatgcggatcaattatttcataagtctgcacattcttaagtactccatcctgatggatacccgaagaatgtgcaaatgcattgcgtcccacaatggccttattagcctgtaccggcatattcatcagactcgataccatgcggctggtaggataaatcttctgagtattgatattcgtctcaatatcaatctcgtgatggctcttaataatcattgctatctcttcaagggctgtatttccggcacgttcaccgataccgttgatggtaacttctacctgacgggcaccgttcaatataccggccatcgtgttggcagtagccattcccaagtcattatgacagtgggtagaaataatcgcattctcgatacctgctacatgatctaccaaatatttaattttcgctccatactctgaaggcagacaatatcccgtcgtatccggaatattcactacagtagctcctgctttaataactgcctcgatcacacgggccagatattcattatccgtacgtccggcatcctccgcgtagaattccacatcatctacaaatcgacgggcatatttcaccgctgctacagcacgttctatgatttcctctcgagttgagttaaacttatatttgatatgcgaatctgaagttccgattcccgtatgaatacgcttatgcttagcaaatttcaaagcatccacagctacatctatatctttttgcaccgcacgtgtcagcgcacaaattgtaggccacgtcacagcctttgaaatttcaatcacagaattaaagtcacccggactggaaataggaaaacctgcttcaatcacatctacccccaaaacttccaaagcctttgccacctgaattttttccactgtattcaattggcatcccggtacttgttcaccatcacgaagggtggtatcgaaaataaataatctgtcgctcatattcttttattttaatctgattatacaccatcaaaaaagcctttcacacaaggaagtgagaaaggctttcgtatattttcattatacacatttacgcgcgacactcacttcccccgacctttgccagcagaataataataccacacagtagaatatgtataaatgattgattcatgttaattgtctcttttaatgtttgacgatgcaaaggtagagattatttcttagcctccaaataatacgttacttttttattgataaaaatatcatttcataagaataacaccattataataacaaatatatcacaaccaaagtctatagattcacctacaaaaaatgggaataaagtactgtcagataccttattcccattcaattatacggtcgctacttgctgattatttcttatcgcaagctttttttgcacaatcttctttctgagggcactctgttttctgatcgcacgcagctttatctttgcaacaagcttttgtagaatcacaagcaacagaatcacttttacagcaagtagcagcagattccgctgcttctacagctactgaagtcgagtctgcggcagcatctgaattagctgttttgttgccaccacatgaaaccattgcaaaagaaaatgccaccattgcagcagctaaaaagaattttgtcttcatacttaaaatatttgctttaaacgtttataaatactcgattgcaaatataaataaaaataagtaatctaccaaaaacaagtcatcccctccggtctttcgaccgaaggggatgaaccatctgaaaaaaacggcgactacctactctcccactgttacgcagtac

SEQ ID NO: 5003 - DNA, 2641 bp, Unknown
  gut microbiota DNA sequence
caggttaacgtcatttacggtttctctctcattcttttctttcttatttaggtttaaaattgatgtttggtataagttctaaacgaacttggtataaattttatttcttgtctgttttcctaagttccgtatgaacttagctttctattttattcattactttcaaaaatatcgtgttctacttaagttcttcgagaacatagtagtcattacttattaatttataatttaatggcgcactatgcgacattatatttaatatcagatccaaaggttcattccgcaacgtaaatgtaaagcgataatgatcagcagttttctgcgggcaatcgatcttttgtccgtaccatttctctaaccgaggcaagatcatggctaatgtttcatttttaaagctcaaccgtcctccaatacgccaagcagaataagaattggcatctacgcgatctatacgtatatcaccatttacctggcacgttagtttttcgttcggttgaaggatatattctccttttatttgctctttgtgatccttaggttctaccttaacctttccgttaagtaacactgtttctacactttcatcgccatcgaaactaaagacttcaaatgctgttcctaaagctgtaacatccatattctttgttttcacaacaaaagggtgtgccttatccggatgaacactaaaaaaagcttgtccggaaagagttacttcccgcttgtttccggaaaactctttaggatatgtcaagcgactccctgcgttcagcatcacaagcgtaccatccgctaatcttaccgaatccattgactggcgtccggagttcagtacataccaaacctccggctctgcttttctggataataacattaaagatagtgttccacaaatcagcaataaagctatagatgccacccagccataccgatgtaggttttgcctaaaacgtccggtttttcctttctttatttggtgcatgacgtttgtcagcattcgttcttccttatcgacatcggtatacatatcagaagcctgttcccattgactataaattgcttgattcacaaatttatagttatttagcttctctcgctcttctggcgataggctatcagtcagtagcttctttattatatccttatttcctgttgtcgcttgtttcatctttattaccttcttattacctatctatttataaatacacgcaactccataacatcccccaaagaaaatttaaattctttaaaataaaagggaagttattaaataatctcctctataccttattattatagagaaagaaatataaaaaataaatagatgttcttacgtaaaaattttaaggcttcattaatatgacgctctactgttttttcactgatagataatcgaatagctatttctttataactgagatgttcctcacgacttaaatgaaatacttcttgttgtcgtggtgtcagttctgaaattaattttttgatatagccttgaagatcggctgcatccatctcgttttcaatgtcatactctacctctgcactactaagtacagtcgttttataggcattttcattaaaacttttacggaattgattaaaaatgatatttcgggttataataaacaagaatcctttgaaactttcattctctttcagaaagatacgtgcctcccacaattttacgaaaacttcctgtaccacttcttctacttcggctatagaagataggtataaacgggaaaagttgtgaactttaggccaatacattctgtatagagcagtaaatgcagcttcgtccccctgttttaatgatacaataagctctttctcggtcataaatctatcggtgtgatgtgcaaacatacaatttttcagggagaaacaatacaaattttaaaagaaaaatagagaatttatagtaaacgaaaacatttgaatataaaaatgtgtgtttaaataataatgattgcagaaatacaaaaaagatagttaattgcgttttgcgttgacataaaggagaatatttcgatatttaacttactcatactttttaagaaaaagtgctgtaatcatttgttttcgaatataaatagcattttaatacaaattcaacatgttttttgagaaaaaatacatgttattgacacatcatctttgtttcttggacagagataattaactttctatctgcatgaagttaacttcctgttttcaagatactaattctctatttgtacaaagttaacatcgtgcgaaaatgaaatttaaaagtccgcctcttaaaagctatttactacctcttattgattacaattcaactatcataaatataataaacttatattataagcatcatatagcatcctgttttaggatttatgtagcaaacaaatcgcatacaacacggttcatctgtcataagttattctactaataataaaatagccgtgttttttctttgttccatagttaggtgttaaaagcaggcaatacagatgggatagaaaatacaaaatgataaaaagtataatataatcaaaatgtaagtagaatccagaaatagaaataataaaagaggaaaaacgccatagttctcgaagaacttaagtagaacatgattttacatcctaaaaagatt

SEQ ID NO: 5004 - DNA, 6510 bp, Unknown
  gut microbiota DNA sequence
gctggctttcaccgcagtactctgatcggcatacatatagtccacctctccggaggctgcgagaatcttatcttttgtactggtttgaccgtccgaattgtcagtggattgaaagtcgatcttggcgttagcgtctccgctcttccccggaaatacagagatattgatcgtggaattatcagtgtattcgccactcgaatcagtggccttcagcgcagtactgccactctgaaattcaccattactacccggttgatacgccggataatgcgcatagatcgtagcctcttccgccgaaagatagattttatcggtcgtgctgctattgccccatttcgaagagttgtaagtgtacaacccatagttattcgttgtcttattcgtcgttgtgctgttggcatacaccgcgatgcttcctaatgcagtccctacagccgatgcatccgaaccggcatctatcgcgccgcgtgtcaacaccacctgtggcgacacctgcaattccgccaccccggtatcctgtccttcgggcaagatgctttcactgcatccgacagccaacagcaatgccggaagagccataagccaatgatatttcgtttggttaatcatcatgttcgttttatctttttttaaattcatgtatctaatccgcatccagagtgccgtcaacagtcaccggagcccacacctgcaccgttaccgaagtgattcccagttcatggtcgccgatgttcagcgtcactacgtgtgacatgcccgcctgcaacggatttttcccgcttgcgttggaatcaccgaacgtaagcgacacattatcgaatgtacctattgatgtttctactttcagcgtatacgtgttgcttccgcctccattgccgttgcttccgccggcttccaacggagggagtaaaagttgccccacagataccggagtctggccggtcacttccgttccttgcccggctccgttggttccgttctgcgtaagatccaccgtcagtccctggggatgttcggttgtggtggagaacgtcacctctcccgtagccagcttcaacgaagcaagcggtttcgcctccttcaccgtgatactcttcacccataccgacaccccgttttgaagcgtcttcttcgcttgaaaagagagttgcgtcaattgatggtcgaacaccagtgaaggaaagtgcccgtctgcccagcggtttccctgtatctgagaagcgtaaagcagatcggtctgccctgtgagtacaaagggaaccgtaccggcataagtgcccgttccactgcccgaagcggctttatccggctcggcgtagggggcgtagcttaccagatagagccaagctccccaacggggataaatgggcgctgccttaccggcattgtcccaacttacttcaccgttggtcccgacagttcctttccagacaccctcttcggcggcaaccaccggagtggtgtagtctcccgcggttcgggaaaataccatggcggcctcaaactccgcctgaggcttgctgcctgccgagaccgccgccctcgacgatacatcgccctccagagcggaaagctccaccggaacctcctcctcacccatcagcgaggaacggtccgcgtcggagcaacctgccaggaaagctcccggcaggcagaaaaagacaaaaagcgaaatatggcgtttcatgatcatggcagacattttatgcgaatcagttcagatcggcatggccggcatcacccgctacccagtcggttacagtggcggttacggtcatcttcgtagcatccgccggagtcagaggctcggtcacgttcagggtgatcaggtgtgacttaccggcctcggtagacaggtctgttgtattatcctgctttttgattgtcacattactgaaagtgatatcagtgcctcccacagagatcaccgcatcgatcacgacttggcccgaagcctggatcatcaacggattacctacccgcacagcatctgcacccagcgccacactggaaataccacccacattcatcacagcggcatccgtccacttgctcacaccggccttacccgaagccggagctacgttgacctctgcaggcacctgtgcgtcctgcacgctgattttctttaagctgatggttttatcggtccattcgccaccacttgcctgagtggtgagcttcatctcaaagttgagctgggtggtcaggtgcttgaacgtaagttcaggtttctgttgactactgctgctaccggcctccgccgcgtcggcaagcatcacgtcctgctccccgtctgtttggggaatcgtcaccgttgtaccgctaaccgttcccgcaggagccacagccgccagccaagacttcgtgctggcagtcgtatggtaataaagaatcgggttgagtgacaccgtggccttagaacccgccttgaaagaggcggtggaaaccgtggcacgggttgtcagtttgttctgtccgccgtcttccttcacttcattggcaagcaccggagaaaacttagtccaatcagcagcctgatcaccgtcagccaccagcaccgtagccgtcacatcactgcctacgcccaccgccgcgcgggtcttcaccatgccctgcacgctttgcgacacttggataggagtcgcgttcaccggattctcgggcaaaaggtcattgtcattgcttgagcagcttgccagcaaaagggccatagccgccacacttagtttcgttttcattgttttctaaaagttttatagttaataaatatgtttattgttctgtttcggcagaccgattgtccaccagttccccactgccggagtcgccctcctgccaccgtccgaccgtagcgacagctacaatctccaccggatcgggaatgacgggatcgggaagttccacccggacggtataagccgttccgccttccccctccccgccttcgaaccgtacgggaagggcacggtattcgcggtcgtgtgtccggtcatcgtctaccgaaagcaccaggtcgatggtcagcgtagcggaaggctgcaccagcacatagcccggcagcgtcagcttgttgccgtcaaacggaaggccctccgcctcttcgcccgcttcataaacgggcacgctcaccgtgcgctcacccggcaagagcgactcttcggccagggagagggtcacctcgtccgtcagtccgttcagatggagcgaccgcacacggagcgccccggtatcttcggcctctaccgtgagtgtaaagatcagttgcgtcagcaagtgccgatacaggaacgattggctgtcggactccccgaaaggagcggaaagcgatccgttctgttcgcccgtcagcatcaggtcttcttctcccgtcaggcggtaagtcagccgcccgtcagccgtcagcggtgccggaggatagtatccccgcagatagagcgccgagccgtccgacggatagtagcgttcgggcatcaggcggatctcgttgtccgtggcaatgccgtcccagctcccgtcgtactgtcccgtacgtacaccgtaagcgacacacaccggggtatcgccgaaaacgtccaccgtcgcacgggtacggatacccgtaaagagacggatgggaaccggctccggttccggacgcggttcgagcgagcgctccgtacacgagaagagaagctgggaaagaaaggcagctttcagtatgtatttcagtttgagtatcatattcccattgtatttctaaaacctatatcccagccccaggttgatccccgtcaggccccaacggacgaaggaggccggatggtgatagtatgcatggggaggttcgttatcataagccttggcggacgaatggaggtatcccccgcgcactcccgcctcgatgccccaatgacgggacagggggacatacacgcctgcggagagtcccgcatgccggtaacgtccggtgcggcttctgcctgtggcggccgtatcgcctgcgggcgagggacggtaatcgaaatcgcccgactgaccgtagacacccagatagaaccaacggtaacgcccgtcacctttcagccacaaacggggctcgaggctgtagccggagacgccccagaaacggtgatcgcgcccgcctttccagtctgaatacgccgcagaggccatcaccgaccaacggcgggcaaagtgaagctccagcgccaggttgggcctgaaagctcccaggcggccttccgccgtcagccccgaccagtcggcaaggttcgtcttcagggagaagaccatccgatgcgggttttctgctcccgaccccgcaaccgtaccgggatgaccggccggaccgaccggtacaaaaagaatggggggcgggcacgggcggttgtccggagcagatgggaccgcaggaggcaaaagcggatatcgggaggcatacatgccatagttgcggcgggcggcggataaagtatccgcacccgcaggctcgcgcaggcagacaatcaccacgtcgcgctcttcaccgggatagcatacggcatggttgtgagtcacgaaatactcctctttcatgcccttgcgggtgatcagttcggacttcacacggctgctacgcacataggccagccaaagattgtcgtgtacgctcccgcccgaagtgcaatgaccgtctacatagatacgcatcttcccgtcggcgatagggccacggaaagaagagacggcggcaaacaggcgtttcagctcgtgattgttgccttgatagtcggcatacagaacgtcacgcccctgtacaaaacggaacgtgtgcaacgaatcgcagtccgaaaccgcacgtgtgccgacaccccgaccgcagaccggtgcggagagcaaaaggatatatccgagcagcagtaaaattctgttcatggcggcaatctctaaaaaacggtttacaaacaaagttctgtcaaatggatttcactgaatatgctgcgcatcatctggttgacaacccccatacgggaggccaccgacccataacggccatagacacgctgctcgtcgacatccggagaaaccggacacaccccctcgtgcaggatcagcaacaaggacagcaggtcgatggagcccaaaggcttgcacagttcataagaaacgggactatcggaagattccgggcatatacagcgaatcagccctccacgctccaacaggggaaggaggacagaaacattccggaaaacgcaatcggaagaatcaggaggacaagatatgccggcatcacggtaatagatgtaacgaagcaccctgatagcctcctgggttaaaattgtaagcataactttttgttttgtttgtgaagaccgttactttgtaggtaacggcatttaacaaatatctgaaacagacagcgttctaaaccgaataattagatttaaacaataaaaggcatccgatgatggcaataaaatgttcatccacgttaaattacaccaacgcggacaacccttcttattgcttttttaagagaaaatagggaaaactaatgctaagcatgcatcttttttaaaattaattatctttttattgaaaaacttgcctttttatttgtttgtgtgaaaaataatgtccaattttgcagcaataaagcgatgccgttacctacaaagtaacagactacctacactactgattataagcgtaataccctcaatccattctaccttcaaaccgcacttagcacatagttgagtatcttcctgtttgtccggtctacttccttatcaccgaaaggtttcaggtaagtttccgtaactttcaccgaagagtgtcccagcccacggctgatcactcccacgggcgtctcctgatgaaaggcaatcgtggcccacgtgtgacgcgcggtgtatgaactgagcctgccgcccaatctcaaatccaccgacacccgttccagccggcggttcaggttgcgcagttcacattgatattcctgataaggagtcagcaccttctcctgccgacgttgcccggtacggggttgtcccaggatgggcagcaggtagctcggatgatcgttctccgccatcctccggttgatgatgtccatcgcctcacggggcacggtaatgctgacctcctgccccgtcttatgccggcagtaggtcagcacccccttgtcaagattgctcctgcgcaggtgtgccagatcgacaaacgggatgccccgcagcataaacatcagcacaaaccagtccacagccttcgccgaggtcgattcatccggacaccccgacatgcggatcatacaccccaccgtgcgggcatccacggcacgcttcacgtcggagcgcgtaccggtgtataccttgtcgaaaagcccggtcacatatcccggacgccccttcatcccccggttgtagcccgcacgcagggcacgcatgtaagtagacaccgtgttccagctaagcccccggccaagcagcagaaattcgtaattccccagaaacgccggggtcacctcttcaaatccgatct

SEQ ID NO: 5005 - DNA, 241 bp, Unknown
  gut microbiota DNA sequence
ggtaaacagaaaatacgacgggattgtgacaaggattgaacgggaatcaaacggaagtcagataagagtcagatggtagtcaaacagggttaaactgaaaagtcggtaggaatcaggcgaggattggaccggaatcaaatggagagtgaacggaaattaaacgaaaatcagacggggagtgaatggaaattgagcagaaatcagccaaggatcaaataagaatcagacgggaattgaacgg

SEQ ID NO: 5006 - DNA, 18970 bp, Unknown
  gut microbiota DNA sequence
catgcgataaatctttaacatcgctgaacgccaaacctgtaaagatgcagaaaacaaaaatatctcgcacctgttctactcgtttaatactgaactcttttgcaagaatgattttaatctcgtccatcgtcaggaattcaggatcggtttcttctagtttgaagcgatagtaagcgaatggatcttttttaatccaatcgttttctaaagcaatgcggataatttttttcaagttcttcaatcggggtgatagcggagttttgcgcacagcctttttcaatcttcaagaaagcatcaaatttagaaatgaaattcgcttctaagttattcaaggcaatatccgatagctgatattctttcttaatgaattcctctaaatatcgggtagtggttccataccgttgcacgttttactaacaaagtctttgccgattagcttacggatttgttcgttatgctccctgaatacctgcaatagcgttttgttatcttcgtccacaccataatataactttctcacaagatcaacggtgataaccttgtcggaagtttccagttccctataaatttggtgtatgcgtgagcgtgtgatttctatgtaatggttcagttccaccgacatacggtcttttccttttgaattctcttttgcttgattccataggtttacggaacaacttcttttgatagaaatatctaccatacagccgtttacggtaattctcatgcacacgggtgcttctccgttctttaataatttgcctttcttgatgaagaacaaaaccgaaaatgattttctagccatttttacatcgtttttagagttccaaaactatgtattctcttccaaggtaagaccatgcaaaatgctatgaatcagtgagaaagattcaaattcgtgggactttttcgaactaaattttagtcccacgatttatccaccgataatatgcttgaaacggctattttctgccacctaccagaaaaaagaaatccctgataatgcttgattatcagggatttgattgatttttcttttgttctaagtgatccgcctggggctcgaacccaggaccccaacattaaaagtgttgtgctctacctgctgagctagcgaatcaatccttatttgcgtatcagttatttcctgattgcgggtgcaaaggtagtgactttttttatatctgcaagcttttgggtgaaaaaagttttatttattttttagtattttcctctgctgattgattatcagtgacttcgtgcctgtcatattttattttttctttgttgataatgaaacgttgataataggacaacatcaaagtggtgagtgggagtgctatgatcatacctagcattccgagtaaagatccccaaatggaaagggataagagaataatagcagggttgagtcctgtgatctttcccataattcgagggacaaggaaaccgtcttgaatggcctggacaacgatgaatacaataagagcacctgccagaattacccagaagttttcaccggtatcagcagccttaaggatggcaagtacgatggtgggcaggaagccgatgatttgtaggtagggtaccatgttgagtgctccgataaatagccctaaagcaatggccatcgggaaatcaatgatcaggaatccaatgctgaacaaaatccctacacaaaaagcaacaaaggcttgcccacggaaataacggttcatgccatcctgaatatcattcaccagattggaagcgaaagtacggtatttacccggaagcaagtgtagccagccttcggctatagactcatagtcgagcagaataaaaactacatataatagaataatgaaagaagcaaagacactaaacaggatattgatggattccgcgacaagggcccagagtttagggaccgtttctttaatggtattcattatattctcttcactcaggatacggttgagtgcctgaaggtcaatgtgcttgtggataaactccgaaagagtaggagggacagtgccggaactgtaggcaccattggtcagataggttaccagtagatcgttcatgcgtcccatttcggcaagcatgggaggcaccagcagatagaaaagggaaatacccactatggtaatactgaacaacgcgcagaaaatagaaatgattctacttttgagacgtaatttgtactggaagaatttgacgagtgggtaaatcatataagcgatgagccatgctacgaaaaaaggtagcaatacaccgctgagccttttaaaaagtatgagtaatcccacaatgagcacacagcagatagaaccgcgtatgaaactatcaaatgtaatttttttcctttccatgataacctgatatttgatgtgcgacctcatcggtatgacttggctttactgccgtgaggtccttatgatttttctcgatcttcttgtaaagcgcgttggtaacattcccgacagagcggctcgtattgggctgtttcccccagtaaaacttgtttgtcattctttacggtacggtgtgaaaaagaagccaactgtccgcatttcacgcagatggcatgtactttcgaaacttcgtcggcaatagcgcatagagcgggcatcgggccaaaaggaactcctttgaaatccatgtccaatccggctataatgacacgcactccgttattggccagttgattgcatacatctatcaatccactgtcgaagaactgtgcctcgtcgatgcctactacatctatttcggatgtaaagagcaaaatgcttgcagaagagtcaatgggtgtggaggaaatggaattactgtcgtgtgaaacaacgtcgccttccgaatagcgggtgtcaatggcaggtttgaatatctctacacgttgacgagcgaacttagcccgcttcatgcggcgaatcaactcttccgtttttccggaaaacatagagccgcaaattacttcgattcttcctcttcttctagtctcttgtatatgatcttctgaaaataataccatgctgatgtatgttataattgcttgcaaaagtaatagttttattggcttctcagtgttttttcattatttatttctacatttgccaagtcattcaaagagaaattcagatgtagatatgcaagcattgctgaacgacatagagctggatattcaggagcttaagtacctgatggaaatcatttcacgcgaaccggattccgttttgcgcggagtggcacgaagaaatattgtgcaaatgcgaggacgactggatgcattattggagctgttggatgcaaagcctgtgatagcggccgacgcttctgaaagtccggagaacaggcctgtaacggagacaatagagattgtggaaatcccgcctttaaaagaaactgtggctgacattccagaagaaaacgaagaagccgcagtagcagaagactcccaggagacagtcgagcctgaaccgttgcacttgtctgaagcagttatcgaacaggtacctactgtgaaacttgatcctgtggctgatgaaaaagaagaagtattcgaatcggtatcggttccacaaccagaggaaccgactgtgaaagttgagactagagtggcttcttcacccatcttggccgagcgtatcaaaactgcaggtgatttgcgtcgttcgatcagcttgaatgattcgtttcgcttctcccgtgaattgttcggaggaagtatggaacagatgaataatgtgttgcatcagattggtgaaatgagttcattggatgcagctcttgtttttctgtcttcaaagatcaaggtcgatgaagaaaatgaagctatgaatgattttgtagagcttctcaggaaacattttatataatgaatatttaaggagatatgggaaaactatatgtggtaccgacaccggtcggaaatttggaggatatgacattcagagctattaaagttctgaaggaggccgacttgattctggctgaagatacccgtacttccggaatcttgctgaaacactttgaaattaaaaatgtaatgcaatcccaccataagtttaatgaacataaaacggtggagagtgttgttaatagaataaaggcaggcgaaacaatcgctttgatttcggatgctggaacgccgggaatctctgatccgggctttcttgtggttcgtgaatgtgtacgtaacggtatcgaggtgcaatgtttgccgggtgctacagcttttgttccggcattggttgcgtcgggattgccaaacgagaaattttgtttcgaaggctttttgcctcagaagaaggggcgcatgacaaagttaaaatcactggtagatgaacataggacgatggtattttatgaatcaccccatcgtttgttgaagacgttgacacagtttgccgaatatttcgggcctgagcgccaagtgtctgtatctcgtgagatttcaaagattcacgaagaaacggttcgcggcactttgagtgaactgatagaacactttaccgctaccgaccctcggggcgagattgtgattgtacttgcaggaatagacgattaataataacttcatttaaaaacgtaaaatgtaatcgtatgaaaaagttagcaattttattagtatgcgcagctatgttggcttcgtgtaacggcctgggtggtggaagtaaagacctgaaggcagaaaatgattctcttttgatggagttgacccagaggaacgccgaattggatgaaatgatgggtactttcaatgaggttcaggaaggattccgtaaaataaatgcagccgagagtcgcgtagatttgactcgtggaactatctctgagaactctgctactgcaaaacagcaaatagcatctgatatcgaattcatcacaaaacagatggaagagaacaaggcacagatcgctaaattgcaggctatgttgaagagtagtaagaataattcggcacagctgaagaaggccgttgagtctttgactcaggaattggttgccaaaactcaacgtattgaggaacttcaggctgaattggcttctaagaatatccgtattcaggaattggatgccgctgtaaccggtctgactgctgataaagaatcgttggctgccgagaacgaagcaaaagccaagaccgtagctgagcaggataaagcaattaatagcgcatggtttgtgttcggtaccaagtcggaacttaagactcagaagattcttgaaaaaggagatgtgctgaaaagtgccgattttaacaaggattattttactcagattgacatccgtactactaaggagattaagttatattcaaaacgtgctgagttactcaccactcatcctgccaaatcttatgaactggttaaagatgataagggccagttgactctgaagatcacaaacccgaaagaattctggagtgtatctaagtatttggttatccaagttaagtaaattgtataaaataattatagctgataagggcacggattgcacagcaagtagtccgtgccttctttttgaactgtacccgatactttaatatgaaatataagaacctgttttttgatttggatgatactctttgggccttttctcaaaatgcgtatgatacgtttgaggaagtttatgacaaatatagactgggacagtatttcgattcgttctctcatttttattctctttaccaaagacggaatacggagctgtgggttgagtacggaaacggacaggtgactaaagaggaactgaaccgacagcgttttttatatcctttacaagctgttggtatagataatgaaatgcttgcaaaacgttattctgatgattttttctcgatcattcctactaaaagtcggttaatgccgtatgcagaagaggtactttcgtatttggcacccaaatataatctatatattctttcaaatggctttagagagttgcaatcccgcaagatgcgttcgtcaggtatcgatacctattttaataaaataattctttcggaggatctgggggtgatgaagccttggccggaaatattttattttgctttgtcggctacacagtccgaactgcgtgaatcgctaatgataggtgatagttgggaagcggatattacaggtgccaatggcatagggatgcatcaggcttattataatgtgtccgggcgtgccgattttccgttccgtcctacttatttagtgactgatttgaaagagttgatggaactattgtaacatttatagatatattgtatttttgcgttcaatatagaacgcataaaaatacaactatggacactctcttacctttcgctttactctgttttacctctttctttacgttgactaaccccttgggaacaatgcctgtctttttaaccatgacccatggtatgactgataaggagcgacaagctgttgttcgccgtgctactttcgtttcgtttatcactttaatggtatttgtttttgccggacaattcctttttaagttctttggtatttctaccaatggattccgtattgcaggtggggttatcatttttaagattggttttgatatgttgcaggcccggtatactccaatgaaattgaaagacgaagagattaaaacttatgcggatgatatttcgattactccacttgccataccgatgctttgtggtccgggcgcaatagcaaatgctatcgtgctaatggaagatgcccatacgattgagatgaagggaacgctaattggcattattgctttgatttattttattacttttctgatattgcgcgcttctacccgattggtcaaagtgttgggcgaaacgggaaacaatgtgatgatgcgtttgatggggcttatcctgatggtgattgcagtcgagtgttttgttagtggattacacccgatattggtaggtatcttgaaagaggggctgctttaaataaagaattggatattatttaaggaataaaatgcccggattacatagtgcaatccgggcattcttttcgattgggtcaatactttagaaagtattcttttaattagcggctaccaccggcccaccaaactggatcggtatatacatactgaccgtttccgaaggctgcttctacgttcgggtttgcacttacgtcatctgctccataaggtgcacgaagcgggaatttatagggattgtctagtttgatgtactcttcacccattgctttcaaacgacgtacatcgttgtaacattctgttgtttcgccgaaagctccaaggaatgcaatatatttctgtaccattacctcttttaccggattggcatcgaacaatggttttacattgtttgtgaaatactcttctgcttcagtagctgtaatcgctttagtagtttctttaacacctccataactttttactgtaggggcgttgaatgcagctgaaactcctgtttcggcatttgcaatggctgctattacagcatcttttaaagcattggccgcctcgtcctttctatttaaccgagctaatgcttcagctttcaggaagagtaactcatgatagctcataagtaaggtcgggcatgtttgtgagtatacgaagataggagtgttatattcgtatttgacagactctgccgtaccattgtctgccatcaggaatctcggatcatcagcacctgtaacttggatagatacagcattttcgttttcagttaacttaccttgtccgatacagaagatgcggcgtaatctcgggtcattgcgttctattagcttgtcagcgtaacttttacttgcagctaatccgtcgcgactccattggaagtcaaatagaggatttaagtttgttgcactatagatagagaaagcagcctgttcttcaatagatgtatatgatttgtctacatattccagaattttttgcaaatcggcatcttttgaggaggaacgggctaatagtcgcattgtataacgtgctttcaatccataagcgagctttagccatgcttcgccatcacctttatatataaagtcatattctccaatttcatcacttttatcgcctttgggaagatcggtaattgcagcatccagatattccataatagcagtataaattgcttcctgtttgtctaattccggagtcagaaactgaggttgtccgtttgctaactcgggaagggcagcctggctgaaaggagtgtcaccgaatgagtctgcgatcagtccggcattaattgctgccaatacttcaccgataccttttgtcgtataattgcccgtgacttcattagaactgatattaatagcgatacgtgcattcttcagtgtagagtataaattaccccatacattgttaaaagtagaggatgccgagggctctccgttacgtttctctgcatttgccaattggttatccactccaaccatatgttctacataagtagaataatatgtattaaagtcacctccgatgttgctaaatgcggttgctgtgattacatccgccaaaatgaatttggccggaacactggttgtatggtctttgtctttattgatgttgtccattgtgtcttccgagcaggaagcaaatgcaacggaaatcaatgccacagacaagataccttttgataaattaaatattgatttcatttttgtcctttttagaatttaactgtaataccaaaaccatagcttgatgttcccggaagagagaaacgctcaaaggcaccggccatgttgttgtttccctgtgatgattcggggtcaataccattatccatttctgaccagagcaacaggttacgtgcaaagacattcactgtaactcctaaataagatttattcagtaccggatagctgagggcgatttcacgtagtttcaggaatgaagaaccatatactccggcctcagagattgtactcagtctgtcgaaatagttataagcattttcaccgctgattttaatatcgttgggtgcataagaaccgtcggctaattgtttaacggccggtttctcaaagtagaagtgatctgctttacgatagtctgctgatttctgagtaacaccgtaataatcgagtgttgaaacagatccggcatacatgcatccaccttgtttccaatcgagtacggccgaaagacggaatttgtagaattcaaatgttgtattgaagcccattctgaagtccggagatacatttcctaatactctgttttcacctaatgtcggcataccgttttcatctacgacaatctggccttcctcgtttctttgatagcttgtaccatagataaccgggaatttgtctcctgcgctcaaacgtacctgcggatcaacaaaacctcctaacatgatgcttgatacaccgggcgccagtttatcaacgtagttatcgatttttgagaagttaaatgcaaaatcccagttgaagttctttgtctgaattggattcacactcaaagtgatttcgtgtgaattggtatgtacggaaccaccattggtgatcaattcgctatatccggtagaagtagccaagggtacttcgaaaatctgatctttcacattctggcgagaataggtgtaattcagtgagatcaaaccattccagaagctgaagtctgcaccgatttcgtatgatttggtgttttggggtttcagattcggatcataaatcttgtagtatgggatatatgagctgattgatccgatagggtattgtataggagtacctgatgagaatccaccgccgtaaaccggtgttctatagtaagaaggataataggtacctgcctgacctacttctgcataagaagcacggattttaccataagtcaaaacatcgttcttcaatgcttccagttcggtaaaaatgaaaccgagtgaaactgaaggataagtgaatgaacggttgttgcgtggcatagacgaaacaatatcattgcggacagttgcattcaaatacaacatgttacggtatgctaatgaaatgttaccgaaattaccaacggtacgctcgcgatgataggttcctgtagatgaatagattgatgcgttagctatatggttccatcccgggaaattgaagttacttccgagattgtatttgtattttgaagaattatcgactaattcattaccatataacacgtttaaatcaagttccggagtgattttccagtcataagtaacagttaacaatgaatttatttcattgtttgtaacgctttgctcttcaatgctacctgttccgttggagtgtccatatccccatgtgtcggtatagttagtggtataagcatcggtacctaactggtattttacatccagtttatgattttctgtaccgaaatcggtagaatacttagcgaacgcatttccgaagaaacgttgagtacgttctttaaaagagttgttttcaactgcccaataagcaccgtcgaaaccgcctgtagaacggtatgtattttgagtataaggatctccgtctatgtgtgaaggaataccgcctaaatcatagcttgacggtgcaccgtataccgttgccatgataccattgttggcaccggtctgttttttgattttagaataaacgaagtttccgttgaaaccagttgaccaattcttgctcagttgagcttgtgcagtcagttttgcattataacgatccataccggttgaaggtacaataccgtttgctgtagtgctgcctaatgacaaagaataacttcctttatcaaggctttgtgctacgtttgcactgctgttccaggtaacacctgtattgaagaaatctttagcattgtcgtatgcacggggagtagcccatgggtccagtcctgccttggcacgttggtctacataatattgtccctgatgctttccgaatttctgagtgtaactgttgtctgtgttaccaccatatttagggtcattggcaagttctgaaatcagaggtccccatgaacgagagtcagacgggctaaaagcaccgttgaatccttgtgcgaattctttttggaaatcgggcatggtagagaccttatcgaatgaaagacctgtattgattgtaacttccggtttacctttacgtgcgcctttaccgctcttggtggtgattactaccacaccgtttgatgcacgcataccatacagagcagaagcagcctggcctttcaggatgttgatgctctcaatgtcattcgggtcgatatctaccgcacggttcgcatagtcagagcctgtaacagagttgaaagtatccaagtcagtagatgatgagataggcataccatctactacgtacaatggagtattatctcctgtaaatgaacgtgaaccgcgaatagtcattttagaagaagcacccggcatacctgatgacggagatatttccactcctgaaaccttaccttgcaaagcgctggaaaggttgctgcttgaagcctgagtcagcttatctcctttaacatcctgcacagcatatcctaacgcttttttctcttttgagatacccattgctgttactacaacttcgtcaagtgccttagcatcagtctttaatatcactttgattaccggtgcaattgctacctcagcagtctgcattccgatgtacgaaatctgcaaagtctttgcagaacttggtataccagataatgtaaatttaccatctacatcagtaataacacctacagtggtgcctttagccaatacagaggctccaacaactggttgcccgtcttcttcagaaataacaacacctgttaccttctgagtttgggcagttactagacctatacccataaaaaggcaagtcaataacagcattaattttcttttcataaattctctcttaaagtttaactttacattaattgtttctttactctaacaaaatgcaaatatattaagaaatatgaaacggacaatcatttttataaaaaaaccttgcaaatataacaaatcgttatctaaaagctcgattttatgtctaataacatagaattccgccttaaaaaacgtaaacggagtttatattgctaacatgttgcaggcactattcatatacatttttgcatatttttgtgtgtttaagccttaataagagctaaaataatgcttgtttttctgttaaggaagtttttataaatataaattagccactttttcaaaagtcgaattagttatttctatataaaaaatagcaggttttagcagatattaaatcttattcaattctaatatagtacccaagcacgtcttatttgtccatagtattaattaaaaataaaggaaatggataaaattatttacagtttggtgtataataggaaaaagagcctgaataaaaagggtatggcattagtacaggttgaggcctatttaaacagaaaaaagaaatatttctctaccaaagtttacttgagtcccgatcaatgggattttaagaagagaatggttaagaaccatcctaatgcagatgctatcaatcacatgctttacgagtttatggcagaaatagagaagaaagagttgggattgtggcaacaggggaaacagatttcattggattcattaaagaattctatggaaaatcaagacgacagcacttcatttattgcatttttccgcaacgaaatagcaaaatcttcattgaaggaaagtacaaaacgcaatcatctctcaacattagaattattaaggagttataagaaggatgtgtcattttctgaattgacttttgaatttatatcctcatttgatcactatcttcagcaaaaaggatatcatactaatacaattgcgaaacacatgaaacatctaaagcgtcatattaatgtagccataaataaagaatatatggagatacagaaatatgcctttcgaaaatataagatcaagagtgttgagaataatcatactcacctctctccggaggaattaggaaagattgaaagtctggaattggggggacggttcactaaactggaaaagaccaaagatgctttcctcttttgttgttatgcaggattacgatattctgacttcaccaacttatctcctgaaaacatagtgaaaatgcatcaagaaacttggcttatttataaatctgtgaaaacgaacacggaagtacgtcttccgctttatcttttatttgaggggaaaggaatagaagtcttgaataaatatcaagatgatcttgccgatttttttaagcttagagataattcaaatgtgaataaggaactattgatcatagcaaaattatcagggctaaataaacgtatttcgttccataccgctcgccataccaatgccacattattaatatacagtggagtcaatattactactgtacaaaagctattgggacataaaagtgtgaaaacaacacaggtttatactaatataatggacataactattgtaagagacttagaaaagtctaaaaataatcgcaaagtatcttatatgtaacaaagatttgagccttacgtaaatgtattgactattaacattgttaacacgaatcacagttctcaaatatcgcttctagaaagaacttgttttctaattgaaaatcactaattctttgcatgtaggaagttagttttaacattgagttaaaactaacttcctacatgcaaaatgtaaatgatttaattggctgtttattaaacatataagcttattaatcccattatggagaaatttaggtttgtattctctgtcttttatataaatatcaaattagtaattatcttttttcatctctaagccatttatgtgagataataataatagactgctttatgacttctttttcgtttggaactattaagtataacattcttttttcaatcgtatactttttaatctatatttcattcacaataagcggattacatttacaataatgggagaccgatatagggattatttgatttttattactagcgttcttataatatgtaattgatattcagatatataatcattaatattgtattataggtaaaagttctcggtattgttataaaactcttataataaagaagttatgatataattgtagttctgcaaagactttgcagatttcatatattggtatgcagactgttgaagtagcaattaagcctgttgtgaagattacgctgaagcctgatactgaagtattagacgaagtagttgtaacaggatatggtaactttaaaaagtcatctttcacgggagcagcatcgagtattacaacggaaaaacttcaagacgttccttctttgagtgtacaggataaacttgcaggttcagttgccggtgtacagattacatctacttccggacaaccgggtgctgtggaatctgtgcgtatccgtggaatgggatcaatcaatgccggtaatgatccgttgtatgtgattgacggagtacctgtaatgaccggtgacgccagtgaatttacttactctcagtctggtaacagcttactgtctactattaacagtaatgatatcgagtcaatgacagtaattaaagatgcagcggctgcttcgctttacggttcgcgtgctgcaaatggtgttattgtaattactacgaaaaaaggggcttcaggaaaattgaaactcaatgtaagggctgactggggattctctaacaaggctattgattatcgtcctattctgaatggtgaagacagacgtgacattttgtatatgggtttaaagaactatgctctaaattcaggtaaggatgaaacttatgccgtgaactatgcagataataatattgataaatatgctgcaaaaccttggagtggatatactgattgggaagatgttcttttcagaaatggttctcatcagaattatgaagtgaatgcccaaggaggaaatgagcggactaagttttatacttcattcggatatactaaacaggaaggtattacacttcagtccggttacgagcgtattacgggacgtgcaaatatgagccataaggcggatcgcgttacaatcgaggcaagtacgatgtttacgaattcaactcagaacgtaaactcggaaggaacaagtttctcaagccctatcatgtgtctggccatgacagcttctccttctacattcccatataacgaagacggtacattcagcacgagtttccctgctttgaatggtgccaatccccttcaaactgcaacatataattatgatcgcagtacaattgtacgtaccctgaacacactgtccgcaacgtggaatatttgggataacttgaatattaaagaaactttaggttatgattttaaccaaacaaataatcgtgtgtggtgggatccgcgttctaatgatggacgttcttcaaaaggagtatttcagcgctatatgatgaacagaagcaaattgaatactcaaactcagctgacttataacaagacatttgcggaacaccacaatatcgatgtattattaggtttcgaaactgaagattataagtacgattatacctatactaatggtaatacttatccatcttacttaccggaaattacgaatgcaggcgtttctagaggtgccagtaacattaacagttatcgaatgacctcctacttgggacgtttaaattatgattatgccggcaaatattatgtaagtggtagtttccgtcgtgatggtagctcacgtttatcgagagacagccgttggggtaatttctggtcagtatcaggttcgtggagactttcacaagaagcatttatggagtcattatctaatgttattactgatgctaaaatacgtgcttcttacggtgtaaatggtacacaacccaaagactactatggatatatgggggtatatgagtttggatataattataatgggaatggtggttcgtcagaggcacgtttctataatcccagtctgaaatgggaaaagaactatgctacaaacattggtattgaccttacattattcaatagattgactgtttctgcagagtggtataatcgtgaaacaaaagacttgttaatggataaaccgatttctgcagcagtaggtgttatcaatagttcgggtgttgctaatatgctcgttaacgttggttcaatgagaaaccgtggttttgaattggaattgaagtccactaacattcaaaacaaagaccttctttggactacttctttgaacataggacacaacaagaataaactgaccaaactggatggtgaacaacaggaaattatcagtggagtttctatccatcgtgtaggtcaaccatattactcaatctatgcgtatgagtatgcaggtgtcgatcctcagacaggtaaagaactgtattatataaatggtgaagatggcagtcgtgaaacaacaacaaattctgctgccgctaataaaacaatcattggttctatcgaacctaaagtacaaggcggattgaccaattatgttagttggaaatttattgatttcaacttgaccctgacttattcactgggtggacatgcttatgattacgccacctggctgcaatctaatggaggtacctatcattatttaggtaatgttccggcttattataaaatggaagatacttggcagaaaacaggtgataatgccaaactgccgcaatttgcatacggtaatgccaataaagcttcttctcgctggttgatgtctaccgatcatttacgtgtaaagaatatgaccttgggattcactttacctcaaagttggtcgtctaaagccggtataagtaagttaagagcttatgtttcaggaaacaacctattgacttggaagaaaaagagcttgtacgttgatccggaagttcctgttgacggattgtgtacattcgaaactccggctctccggactgttacatttggtcttgaaatcggtttttaatcaagtagaaacaatttatgaaaaaagaatttatgaaaaagatatataaatcaataacactggttgctgctattttaagtttgtcttcctgcgggaatgattggctggatagaaaacctgccgacgggattccatcagaagatgctatcactaactataatgacgctctgactgcacgtacaggtatgtatgatggcattcagggaaactccaatgctaccagctattatggtgcccgtatgttttattacggcgatgttcgtgctgacgatatgcaggcaagaactcaaggtatgcgttcatcatcgtgctatgagatgctctacactgtagatgacgctcctaacatgtggaatataccttataatgtaatccgtcgtgccaaccgtttgatcgaagcgatcaatgaaaaaaaggtaactgatgcaacggaagcacaaattggtaaaatatattcagaagcattggttgtcagggcattggttcattttgacttggtaagaatctatggtatgccttatacggccgacaacggagcttctttgggggtaccggttatcgtgaaacctttggaaagaaatgatttgccctccagaaatacagtggcagaagtttatacacaagttatcacagacttgactgatgctattaactcaggttatcttgctaaagatcagactccgggatatattaatgaatgggcagcaaaagccttgcttaccagggtttatctgactaaaggtgataatgagaatgcactcaaagttgctgaagatattataaccaattctccatataagctttggactaacgaggaatatgtaaatgcatggtataaaagcaatggagcgcatacaaacgaaatgatttttgaagttgtaaatgcaagtaatgatgactggactgaccgtaatggtattgcttatttgctgaatgaaaacggatatgcggatgcaatagtgacaaaaagctttatgaatatgttgagtcaggatcctaaagatgttcgtataggtatggtactgcctgctcaatatgataaggatcttcaagaagaatatggcgatgcgaaaatcttcattaataaatttccggcggataaagacgatgtaggtgaaatgcgtttaaataatctgccattacttcgtctttcggaagtttatctgagtgctgcagaagcggcagctaaacttggagggcatcaggataaagcagccaaatatctgaatgaaattgttcagagagcaaatccggaggccaaagccatttcggaagcagatgctacagtagaaagaattattcttgaaaggagaaaagaaatgattggtgaagggcaacgttactttgatgcattgcgcaataatgaaacaatcgttcgctataaagatgaaggtgataagggatatcattattcattgattaaagaatcgcaaagctttgaccgtacctacttcagagctatacttccgatacctgttgatgaaaccaatgtgaatcctaatttgagagctcaacaaaatcccggatattaattgtggtttaataacataatcaaaaggctgctttctaaaaaggaagcagccttttttattacacatgaattgaatttcttattaggctccattatgatatttgttgtatattaatcaaggatgtcattaatcattttacaatcgaaagttattatctgttttgagatatctatggaaagtgttttgaaaaatacttatctcataaactatctgtaattgtgatactgccataaatttctaccattgggaaaggaataaaatatctatataaagctagtcgttacttgctgccgcgggaaaaaatagtagaataataaatgggataaatggtcttattacttctgataattagattattacgtaacttttataagatatataaagtgcaactaattgaggttttcagaaaaacagatcatctgtaatatgcagataataagatatttattaaatacagtttctttctacactaagttcaatctgaatttgtaataatcatattataagatagttagcacatactacagttctgcaaagactttgcagatttc

SEQ ID NO: 5007 - DNA, 23714 bp, Unknown
  gut microbiota DNA sequence
ctcaaaagcacttgacgaggttgtggtagttgcttatggaacacaaagtgctcgtacggtgaccgcatctgtatctactgtaagagcggatgctttgaaagatgtgccaagtgtaagttttgatcagatgcttcagggacgtgcgtcaggtgttagtatcaccactccgtcagcaggtgtagggcaggccccgattgtgcgggtacgtggtgtgaactcgattacttccggtacttctcctctgtatgttgtcgatggagttcctatcgaatcaggcaatctctcttatttggctaatgccaacgcactggctgatattaatccggccgatattgtatctatggatgtattgaaggatgcggcggcagctgcgttgtatggttcgcgtgctgcgaatggagttatcttgattaccactaagcaaggacaaagtggtaaagtcaaagtaagctatgatggttttgtcggtttctcaaatgcaaccgatttctatgaaatgatgaatgcacaggaatatgtcgacttcaagaatttggccgtaaagaaccgttatgggacagatgaattgtcactgactaccggctatgtttctccttatggtaacaaagcgtttaacatgatgaaagatgccaatggtaactatgtagatactgactggaaagatgctgccttccaaaacggattgtcacagagtcactctgttgctgtaagtggcggatcggataaagtgcggtattatctatccggtaactatacaacgcaagaaggtattgtgaaaggtgataaatatgaccgtttgggagtaaaggctaatattaacgtgcaggcaaccgactggttgaaggttggaatgaataccaacgtgacaaccggaacgacatcttacgtagatgctgcccgtagaggttccaactttgcggtaggaggatttccgcgtctggcattgatcaatgcgcctaacttgccgatgtataatgaagatggtactccctactatctggctcaaggtttgggttatggagggaatacggtattcagtacattctctaatccggctgccattttgtctttgggcaatggattgagttctgacgtaacccgtttcatcggagtattttatgccgaagcaactccgttgaaggggctgtcattgaagactcagtacggtgtggactatgcacgtattgaggaacagcgtttctggtctccgctgcatggtgatggagtaaatagcaaaggtctggcaaatgcctataataccaagaacaacagatggacttggactaatacggcaacttataatttctctttagggcagaataactttaatttgctggctggtacggaagcgtctgaaagaaataactctcgttggaccgcacagcgtaaagatttacaggatgataaatttgttgtattccaaggtccttttggttcggcaactgccggtggtagcttgtccaacaataccatggtctcttatttcggacgtatcaactatgattatgcttctaaatacattgtatctcttaactaccgtcgcgatggttattccgctttgagtgagaagaatcgttggggtaatttcggaggtgtttccgctgcatggcgcgtatccgaggaagggttcttcaaacccctgcgtaatgtagtcgacgacttgaagataaagggaagctatggtgtggttggtaacactgatatttacgattatgcttcgaaatcattctattcaagctacaactatggtataaacggtacttatggcctggctcagattgccgatccgaacctgaaatgggaatcttcggaaaaatatagtattggtttcaatgcacgattgctggatagaatcagtgtggactttgactactattatacgaagtcttccgatttgattctggatgtacctcaatcaccgtccaaaggtattccgggtaatatcattactaccaatgccggaaagatgaagaatagcggtattgaactgaccgtctcggccgatgtgataagaaacagtcagtttacatgggaaaccagctttaacattacgactaacaagaacaaggtgatctcactggctgacggtgtagagaatattctgaaaggggataatggcggtttagagattacgaatatcactgtaccgggaaaatctatcggacgtctgtatctctacccaactgccggagtagatcccaagtcggggcgtagggtatttattactccagaaggtgacagaaccttactgatgtttgaaaaaggggggtggttctatgaagatggaacagaatatgccggtgaatttgaacctgttgattgtggaaatacacttcctacctggtacggtggctggaccaataacttcaagtataaaggtttcgacctttctctgtttttccaattctcgggaggtaataagatttataacggaaccaaagccagtgtgagcgatatgcgttactggaacaactctaaagatgtatataagaagtactggactccggaacgcacacatgcagagtatcctatgccgatatacggtgataattactctaatggttcggcattgcctatcagcgacttagtggaaagaggagattatttacgtttgaagaatgtgtcactgggctatacattcaatacaaagaactggtcgaaagctgtgggaatctctgcacttcgtctttacgtccaggctcagaacctgttcgtgattacaggttatagcggtatggatccggagacactaaccaacgtagagagtgcgactttgtcaggtggtacggataagaatacgttacctcaggcacgtacgtatacaatcggtgtgaatctgacattctaatatggttttatagtaacagataaaagaaactacaatgaaaaagataattttattttcgacattatgtgcttctctctttttaggtagttgcagcagcagcttcctcgatcaggagcctccattatatgtaaacgagaacgatattttcacaagtcctacccgaatcgaggcaactctgaacggcttgtatgctgcaatcaagaacacggggactaagtccttgatgggaggtaagtcctatctggtgtttgacaacaggggagatgatgttattaatatctcgaacaacctggtgactttgttcaatacctacaacatgaatgtaggcattacggatgccgagaatgccgacacttggacatacgcttatctggccattaataaagtaaatactttccttcagtctcttgaaggtgccagggaagttgccggtgagaattatgaccgctatgtgcaggaagctaagtttgtcagggctttggcatactactatttgaataatttgtatccgactccgtattctgtgaatcccgatgcaaaatctgttccgttgcgtcttactgccgaagccggaactgaaaacaacaatatgccccgctctacggtaaagcagatttatgaacacattctgtctgacttggagaacatttcggcattggataccgaagtgaatacttatacaggggtcacacatgctactcaggctgctgccaacatgcttaagatgagagtttatatggcaatgaacgaatgggacaaagccattgcagccggagaattggtgaccggatatagtttgccggaagacgtaacattgatttataaggctccgtacttcagtcaggagagtatcttctctctgccaatggcagacactaatatcccgaacactcagcagtcattggcagaatattattatgatggcaagattatgctgatcgatacaaagagcgggattatgtcaaaacctgattattcgttggctaccgataagcgtatcatagcctttaagggagagaaagacttgttgatgaagtttacggatgcaaaaactaaattgcagtgggtacccatcttccgttatgccgaaacattgctggatcttgccgagtgttatgcaaacaaagccgggggcgaagctacggccaaaagcctgttgaaacaagtcagaggccgctcggtggatgcggctaccgatccgttgaacatcgataatctgtcgggtgatgcactgaaagaggcaatttacaatgagaagcgccttgaattcattggtgagggtattcgtggtatcgacattatgaggcgtggtgaacacttcattaaagtgggcgagaatgagacgatcaatgtcggtccgtccgatgaaaaatatacttggcccatacctcaggttgagttgttgctcaataaagatattaataaataaatagtcaataaataataaagaatcgctcaggtagaaacacttgggcgattttttcttttagtatgttacgaaaatagctatatttgtcgccatattataataaggtataaagtagaatgaaagaatttgtaatatccgaagccaaagtcgaaacagctgttctggtgggtctcattacgcagacgcaagatgaacgcaagactaacgagtatctcgacgaactggcatttctggctgagacagccggggcggaagtagtgaaaaggtttacgcagaagttgccgacggctaactcagtgacttatgtagggaaaggaaaactggaagaaataaaagaatatataaggatagaggctgaagaagaccgggaagtgggaatggtcatttttgatgacgaactttcagccaagcagatacgtaacatcgaagcggaactgaaggtgaagatactggaccgtacttcgctgattctcgatatatttgccatgcgtgcccagactgccaacgctaaaactcaggtggagctggcccagtataaatacatgttgccccgtctgcaacgcctttggactcaccttgagcgtcagggtggtggttccggaagtggtaaaggcggttcggtaggacttcgcggtccgggtgagacccagttggagatggaccgccgtatcatcctgaaccgtatgtcgctgcttaaagaacgccttgctgaaatagataaacagaagtctacccagcgcaagaaccgcgggcgtatgatccgtgtggccttggtgggttacaccaacgttggcaaatcgaccatgatgaacctgttggccaagagtgaagtctttgcggagaacaagctgtttgccacactcgatacgacggtgcgcaaggtgattatcgataatctgcctttcttgctctccgataccgtcgggtttatccgtaagttacctactgacttggtagattcctttaagtcgaccctcgacgaagtacgtgaggccgacttgttggttcatgtagtagatatttcgcatcccggatttgaagaacagattgaggtggtgaacaaaacgctggccgatatcggaggaggcgggaaaccgatgattttaatattcaataagatagacgcctatacttatgtagaaaaggcgccggacgaccttacccccaaaacaaaggaaaacttgacactcgaagaactgatgaaaacgtggatggccaagatggaggacaattgcctgttcatctccgcccgtgagaaaatcaatatagacgaactgaagagtgtggtttatcagcgagtgaaagaattgcacgtacagaagtatccctataatgactttctttatcagacctacgaagaagaagagtaatttgtagtttgtaacaagaggagtatgggaaagacttaccgtagactgactgaagatgaagtgcttcagttgaagagccagtcgtgtctggccgatgactggaataaggttgcagtagccgaagagttcacaaccgaatttgtacatcacacccgtttctcgggtgaggtgaaactgggagtgttccattcggattttatcctgccgggtggaatcaaaaaacattccggcctgagacatgtcaccctgcataatgtgactgttggtgataattgctgtatcgagaacatccagaactacattgccaactatgaaataggaaacaatactttcattgagaatgtagatatcatcctggtggacggcttgactcagtttggtaacggagtagaaactgccgtactgaacgagacgggaggtcgtgaagtgctgattaacgacaaactctctgcccatcaagcctatatcctggctctttaccggcatcgtccggaactgatcagccggatgaaagagattacagactattattccaataaacacgcttcggcggtgggaaccatcggcaaccatgtgatgattctcaataccggttctatcaagaatgtgcgtatcggggatttctgccgtatctgcgggacgtgccgtctgtacaatgggagcatcaacagtaacgagtctgccccggtgcatatcggacacggcgttatttgcgatgattttattatttcctccggttcccatgtcgacgacggggccatgctgacccgttgttttgtgggacaagcctgtcagttggggcacaattattccgcttccgactcgctgttctttagcaactgccaaggagagaacggtgaagcatgtgctatttttgccgggccgtacaccgtcacccatcataaatcgaccttactgatagccggtatgttctcgtttatgaacgccggttcaggatcgaatcagagcaatcacatgtataaactgggaccgattcatcaaggaacgttggaaaggggagctaagactacttccgattcatacatcttatggccggcccgtgtaggcgctttttcgctggtgatggggcgtcatgtgaaccatgccgatacatcgaacctgcctttctcctacctgattgagcaacagaataccacgtatctggttccgggagtcaacctgcgtagtgtgggtaccatccgtgatgcccaaaagtggccgaaacgtgacaaacgtacagacccgaaccgtttggattatatcaactataaccttctcagtccgtataccattcagaagatgtttaagggacgctctatcctgaaagagttgaagagggtgtcgggcgagacttcggaaatctactcttatcagagtgccaaaattaaaaactcctcgttgaatagcggcatacgctattacgagatagccatccataagtttcttggcaactccatcatcaagcgtcttgaagggatcaactttaaagataatgaagagatacgccggcgtctgaagccggatacggaaatcggggtaggcgaatgggtggatattgccggtttgattgctcccaaaagtgaagtggagaagctgatagacggcattgaaagcggtgagattaaccgtctgaagagtatgaatgcctgttttgccgccatgcacgataattactatacttacgaatggacatgggcttaccataagatacaggaattttatggcttgaatcccgaaaccattacagcaaaagatatcatcgccatcgttcgcgcctggcgtgaagcggtggtaggacttgaccgcatggtatacgatgatgcgcgcaaggagttctcactttcgtctatgacgggctttggtgccgatggttcacgtgacgaaatgaagctcgacttcggtcaggttcgcggcgattttgagagtaatccgtttgttaccgccgtgctgaagcatattgatgataagaccgctttgggagaagaactgattaaccgcatcgggcaattggcgtgagagagggtacgagttatataatatttactatgaaaatacatatcttatttggaatgatcgggttcattctgctgtccggttgtaaccgggcagcagaaaagaaccctcgtttttatgatgccggcgtttccagggaactagccgggcaccgcaaggcccagattaagaatctgaagtatgaacttagtttcaatatcccgcgacagaaagaggttgccattgagggcgatattaccttgcgctttgatttggcttcccgacaggaagtcctgatagactttcgggaagagcgtgagaagatcaaagaggttatagccaacggagtgccgatggacaaggtgcgttttgagaatgagcacatcattctgcctgcttcgtcgacagtggaaggagcgaatggaatacggattcgtttcaccgccggcaatcagtcactgaaccggaacgacgaatacctctacacattgctggttcccgaccgtgcccgtaccgtattcccctgttttgagcagcccaatttgaaggcggagttcactttacagcttgaacttcccgcagactggaaagctgtttctaatacatacatccggagtgagacggtaaccgacgatcgtaagaccgtctgttttgcaccgaccgaacctcttagtacgtacctgttctcgtttgtagccggaaagttggagcgtcgggagtatacccgggacggacgtaccatcgctgcttattaccgggagaccgatccgaagaaagtagcccagttggatattgtcttcgggcaggtgatggcatcgctccattggcttgaagagtataccggcattgcatatccgtttgccaagtacgattttattgttctgcccggttttcagtttggcgggatggaacatacaggggctaccttatataatgataacgggattttcctgagtgaacaccctacgccggacgaggagttgaatcgggctgagctgattgcccatgaaacgtcgcacatgtggtttggcgatttggttaccatggattggtttgacgacgtatggactaaagaagtttttgccaactattttgcagcccggattgtcgaacccctgtttccggagatcaatcacacccagaataaactcaagacctttacggcagcttcactttccgaggatcgtactatggggacgaatgccatccgccaaccgcttgataacttgcgtaatgccggattgatctatgggcagatcatctataacaaggctcccgtgatgatggaaaaattggtcgacaagatgggggaagccaatttccggagtggtatacaggagtacctgaagacctactcgtacggtaatgccacctgggacgacctgatccgtattctggacagtaagacgaccgaggacctggccgccttcagtgatgtatgggtgaaccggaaagggatgcccacgttaactttccggacagacgggcaagaactggaaattcgccagcacgatccctacaaccggggattgctctggccgcaacgttttgccgtcactctttgcggagagcgcgattcggtgatccgggtgaatatgacagataccctgttccggatgcaacttccgtttgtgccttcgcgcgtattgcccaataccgatggcagaggctatggggtatttgtgcccgacgagcctgctctgcattggctggcggcacattggtgggagatagaagatgatacggcccgccaatcgctgctgatggtgctctatgaaaattatctggccaaacacatctcggcggacgactgggtcaacagcctgataacagggcttccggccgagaagaacgctttggtggcttctacagccagtggttatctggcgaatgtcatgcgggagatagctccggcaaaccgggcagaagtagaagcccgcatttatacgatgacacagaatcatccgttgccttcgtgccggatacaactgatgcgccttttcatgcagaatgccatttccgaaccgatggtgaagaagctctacattttgtggcaacagcagtccgacaaacatctgaaccgacaggattatacaactttagcctacgaactggctattcgcatgcctttggagagcgaacagatactccgcacacagcgggcacgtattgacgatccggatcgtttgcggcagttcgactttatctcacgggcagccgtatccgatactgcgcggctcgatactctgttcaacagcctgctggcggcagaaaaccgccggatagagccttggacgactgctgtcattcgatacctgaaccatccgttgcgtgaggatcagtcggtgaagtacattcgtccgggactggaggtgctggaagaggtacaatgcaccggagatattttctttcccaaaaattgggcggcagctttgctgggcaatcatctcagttcatcggcttacgaagaagtggtacgcttcctgaacgagcgtcccgattattcaccgcttttgaagaacaagatactgcaggcagcctatccgttgtaccgggcaaacaattaaaataatcaccggaatgcttggctttggcactccgatgttgtatctttgctaacagattcatgatttagattcaaattagaatgccatagaagaggaagcccgcgaagcttcctctttttttgtatccctgccttccggtgtctccaaccctgtggctttccaacccttcaagacggttgcttcgtgctccggagagccttgcttcgcccaaaacagacactggcatttgcccgaacagacaccggcatcttgcagaagagaggctctcttccggaatggctcccgcttttctgtggaaacgccttccgaacgttaataataagtaaatccgctcttgacaaaatctgccactttattcatactttggaaaactattcttacctttgcctcactaactaacattacgtaataaaattaagagatatggcaacacctccgtttaagtatcaacctatgttcgaacatggggaagataaaaccgagtattatctgcttaccaaagactatgtgtcagtaagcgagttcgaaggaacacctgtgctgaaagtacagaaagaaggtctgacagcgatggctaatactgctttccgcgacgtatctttcatgcttcgccgtgcgcacaacgagcaggtagcgaagattctgagcgacccggaagcaagtgaaaacgacaaatacgtggcattgactttcctgcgcaacgctgaagtggctgccaaaggtatacttcctttctgccaggataccggtacggctatcatccacggtgaaaaaggacagcaggtatggacaggctattgcgatgaagaagctttgtcattgggtgtttacaagacatatacggaagaaaacctgcgttattcacagaatgctccgctcaacatgtacgacgaggtgaacacgaagtgcaatctgccggcccagatcgatatcgaggctacggaaggcatggagtacaaattcctgtgtgtgaccaagggtggtggttctgccaataagacttatctgtatcaggagacaaaagcgattctgaatccgggcactctggttccgttcctggttgagaagatgaagacactgggtacagcggcttgtcctccttatcatattgcattcgttatcggcggtacttcggctgagaagaatctgctgactgtgaaactggcttctacccactattacgacgagttgccgactaccggtaatgagtatggtcgtgctttccgcgacgtagaactggagaaagaggtacttgccgaagcccaaaagatcggtttgggagcacagtttggcggtaaatatctggcacacgatgtacgtatcatccgtctgccccgtcacggagcttcttgtccggtgggcttgggtgtatcttgttctgccgaccgtaacatcaaatgtaagatcaataaagacggtatctggattgaaaaactcgattctaatccgggcagtctgattcccgcagaactgcgtagtgcaggtgaaggcgatgtagtgaagatcgacctgaaccagccgatggcggatatcctgaaggaactgactaaatatccggtagctacacgtctgtcactcaacggtacgatcatcgtaggccgtgatatcgctcacgctaaactgaaagaacgtctggatcgcggcgaagatctgccccaatatatcaaagaccatccgatttattatgccggtccggctaaaactcctgccggcatggcttgcggttcgatgggaccgactactgccggacgtatggacccctatgtggacttgttccagagccatggcggcagcatgattatgttggcaaaaggtaaccgtagccagcaggtgaccgatgcttgtaagaagtatggcggtttctacctcggttcaatcggtggtccggctgctatccttgcccagaacaatatcaagagcatcgaatgcgtagaatatccggaattgggtatggaagctatctggaagatcgaagtagaggacttccccgcatttattcttgtagatgacaagggtaacgacttctttaagcagataaaaccccgttgcggttcttgcagcaacaaataagaaatgggtaagtgactattaataatagttgtttatcattttaactcgagtgagaggcgtctgtatgctgtgttatacagatgcctttctcattataaataccttgatcattatcagtaaaacgaatcaccgatggaactacaaaagaatcctcaacacattgtctggctggacgttgtccgcttcgtagccatgtttaccgttgtctgttgtcactgcacagacccttttaacttttatccgggcatagcgcccaatattggcgaaataaaactctggggtgccatctacggagccttgcttcgtccctgtgtccccctgttcgtgatgattaccggagcactgcttcttccggtgcgcggcgagatctctgtcttttataagaaacgcattccgcgcgtcctgtggccgtttctgatctggtccgttatctacaatctgtttccctggatcaccggagtgttgggcatcaacccggaagtcattctcgactttttcccttattcgggtgaggaagtgatgcgtcagtcgctgcctgtctctttggactacattgctcagattccttttaatttctccatagtagatgtacacatgtggtatatttacctgctgatcggtctgtatctttacctccccgtcttctctgcctgggtggagaaagcatccgataaggcgaagctgtggtttctcggtgcatgggctgtcactctgttgttgccatactacaaccagtttgtggcacaatacctttggggaacctgttcatggaatgcgttcggcatgctttattactttgccggtttcaatggctatctgttgttgggacactatctgcgcaaccttgactggtctttgggtaagatcctggcaatcggtctgccgatgtttgtaataggatatgccgttaccttctttggcttccgctacatcacggctttgccggagtttagcgacgagatgctcgaactcttcttcacttattgttccctgaatgtagtgatgatgaccattcccgtgtttatgctttgcaagaaggtgaatttccgttcggaggggatcaggaaggcacttgccaacctcactttgtgtggtttcggcatctatatgatacactatttctttaccggcccttccgtactgttggtacgtgcgttaggtgtacctctgggcattcagataccggtggcgtctgtttttgccttcggtgcttcgtggctgattgtgtggactgtctatcgtgtgctgggcaagaaggcgaaatggattatgggataaaactgtaattaaagcatattatttatgaatcgtaaatcaatactattaacaattttactttgtgtcgcttcttgggcaatggcttctccggtaaccggattgttggagcgcattgacaaaggagcttcgaagaagtttattatcgagcaggtgaagtccgatgccgacttctttgaactcgaccagaaaggtgataaagtcgttattcgtggaaataactatgtaagcattgccaccgggctgaattggtatctgaagtattacgcaggtatccatctttcatggaacggaatgcaggcgaaactgccggctgtacttccgccggtgacaaagaaagaacgcagggaaacaacattgccctaccgctacgatctgaattattgtactttctcttactctatggctttctgggattggaaccgatgggagaaagagattgactggatggctctgcacggcatcaatattcctttggcggtgaccggagctgaggctgtgtggcacaatgtgcttgataagttgggatataccaagacagagatcaatgaattcatttcgggtccgggattttttgcctggtggctgatgaataacttggaaggttggggtggtcccaatcccgacagctggtatacccggcagattgctttgcaaaaaaagatcctgaagcgtatgcgcgaatacggtatagagccggtgcttccgggctattgcggcatggtacctcataatgcgaaagagaaactcggcctgaacgtatccgacccgggaacatggtgcggctaccgtcgtccggcgttcctgcaaccgagtgatccgcgtttcgaggagatttcttctctttactacaaagaacttgagaaactgtacggcaaagctaacttttactccatggacccctttcacgaagggggaaacactgcaggtgtcgacctcgatgcagccggtaaggcagtgatgaaagctatgaagaaggccaatccgaaggctgtctgggtggctcaggcttggcaggcaaatccgcgtcccaagatgattgagaacctgaaagctggagatttgctgatacttgacctgaccagtgagtgccgtccgcagtggggagattctacttccgagtggtatcgcaagaacggatacgggcagcacgattggatctattgtatgcttttgaattatggtggcaatgtgggattgcacggaaagatggacaatgtgatcgataacttctatcttgccaaagccgatccgcatgcaagcgctacgctgaaaggggtgggaatgactcctgaagggattgaaaacaatccggtgatgtacgagctggtgatggagctgccttggcgtcccgaccggttcacgaaggaagagtggctgaaggagtatgtaaaagcccgttatggcgttgatgatccggtggtacaggctgcctggaccaatctggcgaactctatttataactcgccgaagaacctgacccagcaggggacacacgaatctgtattttgtgcccgtccggcggaagatgtgtaccaggtgtccagctggtcggaaatgaaagattactaccgtccgcaggaggtgatagaagctgcccgcctgatggtttccgtagccgatcgctttaaaggtaacaataattttgaatacgatctggtagatattgtccgccaggcactggcagagaagggacgtctgatgcagaaagctgtgactgccgcttatcgtgcaggtgataaacaactctttgcactggcatcgggaaagttcctcgacctgattttgttgcaggataaactgttgggaacccgtccggagtttcgagtaggaaagtggattgaagaggcgcgtgcgttgggtgatacacccgaagaaaaggaattgtacgaatggaatgcccgtgtacagattacgacctggggtaaccggaacgcggccgattacggtggtctccgagactatgctcacaaagagtggaacggcttgctgaaagatttctattacatgcgttggaaactatatttcgactttctttctcagcggatagagggaaagacccctgcggaaattgatttctatgccatagaggaaccttggacgaaagctgccaatccctattctgccgaggcggaaggagactgcattgaagtagcgaagcaggtgatgcaagcggttgaataatacttttctaccacagattacacagatcattgtttttgataatctgtgtaatctgtggtgaaaacagttttatatacctcctttcctcagagttaaccgttgtcattcgtttgttttgttgtccctttccatatccgcatcatataatatgcacaatgcgtaaatgcgaaaacaaacgagatgatcagcaatactttactttcattccaacctacagtctgctgatgccataagccggtaatgacacaaagcagagacagtgcaatgccgatcatgttcaatgccgattgtccccggcgatttttcacaccatgttccagtttactgtgtttcatgccgtagccgacgtagatgtccagtccgatcagcatccacagtactaatcgtatccaggtatcggccggaaggaaaagcatcatgcacagacaagtgagtattcccaaaatggggacgagaggcacaaacggagttttaaatgaacggggtacgttcggcatggtctttcgcactacgaggacggctgcgcataccagtgtgaaagccatcagtgtaccaatgctggtcatctctcccgccaggcgtgctggaacaaatgcggcgagcaggcccactatcagcataaacaggaggttgctgcgcgccggtgtacggaacttctcgttgatgtgcgaaaagaaggggggaagtagtccgtcatggctcatgctcaggaaaacacggctttgccccaataaagtaaccataatgaccgaacaatagccgaacaggatggcaagaacgatggcacggttcagccacggataatccggatgaatgatgcctgttgcatcggcatgtcccatgtgttcgatggcaatggctaccggtgcgatgccctgctggccgctaaattcggtataatgggctactcctgtcattacgtgggcaaacagcatataaagtacggtacataccaagagtgataccaggataccgatcggcatattccgtttcggattttttgtttcctgtgcagccgtactgacggcatcgaatcccaggaaagcgaagaaaacgatggcggctccacgcaggacacccgagagaccgtattcgccaagtgtacctgtattggcggggatgtatggagtatagttgtcggcattgatatatttccagcccaggacaacgaatatggcgatcaccgatactttgagaaatacaacgatgccgttgaagatggagctgccttctgttccgcgaatcaggaagatgctcatcaacactacgatcaggaacgccgggatattgacgattcccccatcccatgggcaggcggtcagggcttgcggcagatgtatatcgagtccttcaagaaagacgacgagatatcggctccaactgatactgacggtagtggctgctacggtatattcgagaacgagatcccagccgatgatccaggctatcagttcgcccatggtggcgtatgaatacgtataagcactgcctgccaccggaatcatagaagcgaactcagcgtagcagagtcctgcgaagcagcatccgagtgcagctatggcgaatgaaagggtgatggccggtccggtgtagcccgctgctacggtgccggtgattgagaagagtcctgctccgatgataacaccgacgcccagtgctaccagactccaggggcctaatactcgttttaatgatttactgcccgacgcattggcctctgccaatagggcttcaaagggtttctttatgaataatcccatcttcttgttttttctttactggttatggttgtatttggaataggtaattcttttccagacttagctatttatttgaagttgcaaagataattaattcataacacatacggtcataggatgttcacttttagggattgaggaggtgtcaaaacccaccacagaagacgcagagtaacactgagccgattctaagttgttgattattcataaaaagactctgtgctactctgtggtgaaaagagtttcgacacatctctcggaagtgggtttgtagttctttttgtcagtaattaagatgcgaaccgagaagcctgctttggcgaatgtctcactcacaatgtgctgatagatagtattgtaccaacgtgaaaatacctttaaaaccaaagccccgttggtttcaaaggaaagggatcttggttttaaaccgataggccttaggctttaaactaacggggcgtatgtttgtatggagaggagtgtaaacttttgtggcttatcccacccattctccggatattcccattctattccaggtatttcgtgatctttccactgatttgtaaaagtgaaatctcacataacttggtatcgtattcagccgaaagtatgcgttcttcggcatccagcaaacttttctgcgcttcccgcatttcgatacccgaaaggttgcccagcatgtagcgttccatagctatctcgtgattctctttggcggctaccagattctgtcgttccagtttcagcatttgcagattattctggtaggcctgccacagattgctaaggtctgctttcagcccttgctccagttgttcacgttgaaggcgggcattttttatggcaatacgtgcattgtttttttcgcgtcggcgatttccatcgaagatgttgaagcctaccgttactccaaaattggctcccagattacctctttggctattagcggcaatatcgtacttattgaaggtatatccgtatccggtattcatcttcaggtaagggtagttgcgcgagtttactttcttatagtccagcatggcgagcgtgttgttttgttcagctttcaacagtgacgcgttcgtcagtaaggtagcattccacaactcttcgaatcgaagcccggcattcacttttataatgctgtcttctatcacgagcggttgatccacatcttcgttggccatcagttcgtttaactggatgcgcgaggtatgcagcaattcctgttgcttcatgtatttggcgctgtcggcgttgaagtccacttttgcctgttgatagtccagacgggagaagttaccgatgtggtaacgttcttctacgattcgcaggcgctctttcgacaaagataccgcataacggaaattctgcaagcgaattttttgctgaacatagttgtaatattcggctaccagattggctatcaggtcctcgatggcgatacgggtattggtttctccctgtagttgcagctctttcagtttctggtaattggctgtaatgttaaagccatcgaagatggtccagttcaagttcagacccacattcaaggtttggtcgaagacaccgttttcttttactgattctccggtggcccggaccttggtattagtgttgtccactgtccccttgtatcctgccgtaaaatcgagtgtcggcagatagcctgcgttgcccggggtggcgttgttcctgctcacttgctcttcattgcggactatttgcagggagtagttattctgaagtccatactccaggcaggatttcagggtatatatttgtggctgctgtgcctgcatggcaaaaggagcacagcacaatgctatgatagataagacgatctgtttcattcttgctttaatttattacttcggttcgtcgaaatataactgtaaatggcaggtacgatgtacatggtcagcagggtagataccaacatacctcccactacagccgtacccattgcgatacgttggttgcaaccttcacccgaggcgaaagccagcgggattaatcccaggatggtagaagcacttgtcatcaggataggacgcaggcgttgtaacgccgcatctttgatggctgtcatcttatcctcacccgtttcttgtttcaggttggcaaactctacgatcaggataccgtttttagccaccagtccaatcagcataataatgccgatctggctgaagatgttcattgtgatacctccaaaatacatgaataccaatgcgcctgcaatagccagggggacggtcagcataatgatcagcgggtctttgaaactctcgaactgtgctgccaggatcaggtaaatcagtacaatggccagaataaaagcaaacatcagacttgaagaactctcgcgatattctttcgaatcaccggtcaatgctgtgcggaacgtgtcgtccagcgtctctttggctatcttgtccatttcgtccaatccttgtccgatggtttttccttcggccagtccggcggaaacagtggccgaaacgaaacgattgtaacgatacagtttcggaggcgcgatgccaccggtcagttcaatcaggttgtccaattgcaccatatcgcctttgtcactacgaatgtagatcgatttcagattggcaggtgtgttacgttgctggcggttgatttctcctaagatctcatattgcttgccgttcatatagaagtagcccattcgctgtccgctcagaccgtattgcagggtctgtgcgatgttacgtgtacttacccccatgatgctggctttgtcgcgattgatattgatacgtgcctccggcttgctgaacttcaggtctacgtctgccatctggaataccgggttctcgtaaaccttcgccatgaacttgggcagtacttcctgtagcttttcgatattagtggcctgcaatacgtattggacgggcataccgccacgccgtccgccaaaagaagatgactgctggacgaatgaacgcgccatcgtctttttctgtactgctgccgacaatttttcagccacatccatctgggtgtagtcacggtctttcatgtctttcagcgtgatgcgcacattaccgctaccactcgatacacgggcggttaccgattcggcatccggtacaatcgagtctacgaggtcattgatgtcttccgtatagtcccggatgtattcataggtcacaccttcggctccacgggtattgatactgatttgtgaacggtcttccaacggagccatttctgccgggatgtaattccacaagaaggcaatgatgccaatggtaattgctacaaagggcagggcaatccaacgtttatggaggaaaacagccagtgaacgactgtagaggcggttcattccttcgaagaaaggttctgttttcagatagaaccagttctgtttctcccgttttaccagtaacttggtggctagcatcggagtaaaggtcagagccgcaaaagaggagatgataaccgaaccggaaataacaatactaaattcacggaacagtcgtcctgtcatcccctccataaagacgatggggaagaatacggcaaccagcgtaatggtggtagagatgacagcgaagaaaatttctttagccccttcgatgccggcctctttcggaggcatacctttctcaatgcggacatagatgttttccgtcattacgatagcgtcgtccaccaccagacccactgccagcacaacagccagcatggagagcacgttgatggagaagtccgccagatacataacgaagaaagcaccgatcaacgataccggaatcacgatgcagggaaccagcgtaacacgccagtcgcgcagaaaaaggaagataataatgatcaccaggatgaaagctacgtaaacggtttcttttacttcgctgatagaggcacggatgaatttggtgttatcgaatccgtaagaatacttcacgtcttccgggaggtccttctgcatcttctccatgcgttcatataccgcatcggctatctttatatggttggcacccggctgggggattacaacgattcccaccatgggtacaccattcatcttcatgtagcttttgatgtcggcagggcccagttcggctcgtccgatatcactgaaacggatgatgcggtcgttctcttctttgacgatcaggttgttgaactcttctgcagtgtgcatcagtcccaaagtacggatggtaagttctgttgtatttccttcgatactacctgaagggagttccacgttctctttgtctaccgcattcttcacgtcgataggagtgatcccgtaaccggacatcttgatggggtcgagccataaacgcatggagtatcgtttctctccccaaatggagacactacttacgtcagagatcgtttgcaactgttcttttacagtcaggtcggcaatttcactgagttccagcaaagaacgtttgtcgctttgcaaagccaccataaggataggggtggcatcggcatcggctttcgatacggtaggagggtcacagtcgcgcgggagataacgttgggcgcgtgataccttgtcacgcacgtcattggcagctgtttccaggtcgacggaaagctcaaactctaccgtgatacggctttgtccctgctgactgacactggagagtgagcggatgcccggaataccattgatgttctgttccaggggttcggtgatctgattctcgatgacatcggcatttgcacccggataggagcaggatactgaaataatagggttatctacggatggatactcccggacacccaggtagttgtacccgatcagtccaaagagcaaaatgatgatggtcagtaccgttgagagtactggccgtcgtatacttaattcggatatattcataaggcggtcggtagttaattgatattatccagtgtgacaggcagacctgtacgaagttgcagggttcccgaagtgatgatggtatcacccatttgtaggccctttatgacttgtacttcagcttcggtacggatacctgcggttatttctaccggttcggctttacccgatttatagaggaatactttatccttacccatctcaggtacgatggactccgatgggatggcgatggcattcgggatttcttcttttttcagttggatgctggcgtaacgtcccggtagtattgccccgttactgttagcatacagtgcacgaacggtcagtgtacgagtagactgatcgattcgtgattcggtggcatatacctttgcggggaaagagcttaactttccttccagttcgaagttgaggttagttcccttttttacctgactggcataacgctcgggtacggaaaactctattttcagaggaatgatttttgtcagtttggctacgatggtagtaggtgaagcataagagccaacgctgacctgccggagtccgatcaccccgtcgaagggtgcgcgaagttcggtcatggcaatattcgcttttaccaaatcaatatctgcattcagggtggccagttccgtttttacctgctcgtaagcttccttactgacggcatcccgttcgagcaaagcattttggcggaacacacggtcttcggcaagttttagttgagctacaagacgttgcaactgggcctgtaattgccggtcgttcacttttgccagtagttgtcctttctttacggttgttccttcgtcaaagttgatctcaacaatttttcccgaagtctcaaaagaaagatccacctcctcgtcaggcatcaagctaccgctgatttgaatctggtctgtcagcaattgtggttttatgattttggcgtttacgttcagaacccttttattgatctgtttgcctgtcatcactttgtcggctgctgccaactcttcatttgctttaggaagtcgggagtaaattccccaacctatcagtccggcgccaaccaagatgacgatgccccattttacctttttatccatgtcttagtattagtatatgtctgttcaaaggttagactaagagggtgggaaaaggtttaatcggaaaattaaaatatagatttattttttgtgttaaggtgtcttattgattatgttttcttaatctgtgatcaaaaatggcccgtaatggattgaaaaaacgcattaataaactcaaatcgtctgttaggatttcagcatctcctttcagttgttgcactttaggaagtcttttcc

SEQ ID NO: 5008 - DNA, 21373 bp, Unknown
  gut microbiota DNA sequence
ttggatttcttcgggagaaagaacatctttccgaagcatttggctatccactttgcaggtaacacttttgcatgggtctttcaacattacatcgtggtcaatcgcatatcgaataactttcttgaaacgctggtaaatgcttttagcaccctcacccacacttcgggattgcagataggctacaaactgctccatcatttctttggtgataagttccggtttgatactaaactcattcatggggtattgctcttttaagaagtccttaaaacggctaagcgcaatttgtaccatgcgaatatctttcttggtataactgttgatataggcttggaaatagtctaagaaattgactgttctatcttttttcaaccgatagcccaacatactttctttaaactcctgctcacgctccgcacgtatctttgtggcaagctccaatgtttctttgttctgctggcgttccgcaggggtacggggcttatctatcagatacagactaaggttttcttttcgcctgttgtgctttactgcaaacttgggcttaccttgcatctttccactatcatagtacacttgattgccgttttcatctaatacgggcttttcctctctacctaaataatactctaagtaaaggctgattctaccatccgagagcttattttgctctaacttggggttttctttcgttttattttctaactttgccattgtttagaggttttatcccgatttaggtaccataaccgggtgattacgctaaatagttgattttcttttgttttccgatattgcaaaggtacaaaagaaaatgatatttcaaagtgtactaaaagtgtactgaataacggaaaatgggcaaaatatggcaaaaatagagaaaataggaaatactcaaatagttgataataaggaagataaattcttttattttcctatgatttctatggtttgtaccgggtctgggtacgaagaaaaaagctaagtattgaataatcaattacttagctttttcttttatctgaattttcctcatattttccccatacgtgcaaaaaatacgatattaaatgaatgtttttctttggctgaacatagtaaatacactacctttaaaaagaataaagcctattaaataaaaagcaatggaacaaggcgtttggcaagagatagaacagttatgccaaaagtttcagaaacttggtatcaatgaagcggtggactatgatagtactacctgtattctcttattgctcattccacagccattgaaggctcaacgcttacggaacttgatacgcagcttctttttgacgagggagtaacagcgaaagggaaaccgcttgtgcatcatctgatgaatgaggatttgaagcaagcgtatgaacttgccaaaaccgaatccagtagccttgtacagataactcctgccttgctacaaaggttgaatgcaacactgatgcgcactacaggcagtgtacgcagtgtaatgggcggttctttcgattcttcgaaaggggattttcctctatgtggtgttacggctggtgtcggtggacatgcttatatgaactatctgaaagttcctgctaaggtagatgaactttgtgctatactgcaagcgaagtagaagacagtggggacatttcgggaacaatatgaactgagtttcaatgcctacctgaatttagtaaccatacatccgtgggtggatggtaatggcagaatggctcggttgctgatgaactacatccaattttgctatcaccttttcccgacgaagatatttaaagaggatagagaagaatatatcctttccctacgccaatgtcaggatgaagaaaccaatcaggttttcttggactttatggcaaggcaattaaagaaatccctctctttggagattgaacgtttcaatgcttcacaaaagagacggttcagttttatgttttagaggtctgagagcctatctttccgcaataaacgttgaaaattagtaattggcaaataaacacccagttttatacccaataatgtaaagccgggtgtttttgtactatttaaccaaattcctaaattcctcttttagcaattcaaaataatggcaatctgtaaatactctattcttgaaacaggcattacgatgtatgccacatttacgaaaacctattttctctaatactctcatcgatgctatgttgccagcataaacatttgcacaaatgcgcatcacatctgtatgatgaaaatagcagctaatagccaatgctaacatttgggtcataatccctttaccccaatatggttcagcaagccaataacctaattctgcattgtagcgctctacatctataccacgagcaaaacttatattaccagctgcttcctgatttacttcgatacaataattattttgttcgttttgacttgaaacggacaggatgaattgttgcgcatcgttttcagaataaggatatggtaggctatcacggcaattatcccatatctttttattattaagatatttagctaaagtggaaaaatcgtctttagaccaacttcttattttgtatttatccacatccatttatttattcaattcatttaccattataaattcgctgtatgaaataaattacttaggaaatgtttctgttatttgtttagcaacacgttttatagcacctctaatgtctgctgatacgctgaatcctaaggttgtatatgcgccacggcatgaagctatcgggcgaccagtgagataatctatgaaatttacagttacgacagattcttcttctaaaatatctactccatattttaccataagcaactttgattgttgattcggagaaagttcgccaatacgtctatcattgacaagtttaagacgggaactctctatggcatcaaatagttgtatttcatattccatcagttgagccggaatatgataagtgtcgttgttgataattgaggcatattcatacctcgacaagtccgccttttgtgatattacacttttagaggttgtacaagatgatgctactataccaattaaaaggaggaatgtgactattactttattcattgttttattgtttaggttcaacgtgtagataatacttctcttgtgtcaggtcatcgggggcagtggagagttgatgcaacatcagtatacgggtagtcttgttttcccaatacaattcagctttcacaccctcttcgggcaggcatttgaacaggttctcttttccaccagcattttgcccttcaccaatgttattctccatcagtgttttgatggctttttgcgctgctgccgggaagtctgaatccgagagttgcttatggttcactgggattattttagaaaaggggttataatcctttgccacgatgtcatacacctgatactcataatctgtgtccagcaggcaataggttgtaaggttctgtgggctctgcaacacgattgtcccccattcaatccccaagaaatcacgttcgtacagtctcacagcgagtgaggtctcatattcaacctttcctttgcgatagcctttcaggtaatttttgatggtaccgcttttgaagaagtgcgaactccattccgtagcaagatgtgtttccatccctccctccgttgtattgctttcatagactctgaacgtatgagggaaaccctcggcactccaaacaatagagtcgtaatattgtgtaaactcaggaaagcccagcggggtgtaattgtcgtttatatccgtgattctgaacgtcaccagatcgagcggtgccgggaattgggtgtcaaggtgcataaacggagtgaagtatgcctttttcatcttgaacttggcttcttcgggcagaggttccggctctggatcgggttgcccttcgtccttaaaggttctagacaaacagataattgtacttgctgttctctttccatcatttgtcgagattgtaatctcctcgtatgcatccggggcttccgaaacctgacggggaaaatgaatcttcaactgattggcttctaccttgagcgttgcccatccacaatcgtatgtgtaagaaccgcccgaaataggattgagcatatcgaaattcttgcaagtcatcacgatatatccctcattaccgtttgccttgaaacattctttaggtatccaacctacggtaccaccttcatactctacactttccggtgtcagaatctcatacgtccagagcatcggtccaccgggtaaaatatcatccttgttgcaagccgtaaaaagcaagcaaacaagcgtcataaatggcataagcaatttattcatattcgtaataatccctatggctctattgggttattaaatttataatgaaagaacgtgagccacctatgccacgtctaagtgaagttcataggaaacctttgatgcagatgtaacaagaacggtccacgctatatgcgtgagaaccactatgctatctcttacatcagtctgaaaatttcctacgttttcacctacaagataaacataacgtttcttcttttctctaatgtcttggaaagagttgcctttatccgaatacaaaattagctatttaattgatcttttgtattatatagaacggaattataacttgaatcctctactttttctgggttcttccgcagactgtcgtaagccaaagtctgcattgctgccatatccctcgtcattgatttacagcttgatgttgccgtttccgttttggataattgccaataagtctgtcatagccttcttaaaactatcggttgtaaggctcctcgttctggcagtattataaacgaaaagccactaccccgattaggatagtggcgcaaatatataatgaaaataaatcgtaaaacaatgatattcagttagataaatttgtaaaatccaaaagcgaattaaacgagttttaatcggatagataggttttcaattcttcgatggcatcatggtcttcgccaacgtcttttatcaactttttgccgtttccaagtggcgaaatgagatttttgtatgctttctgaatatctctttcatgaacgatttcttgtttattaaactggttgtacaggcatttctgaaagtcttgatgggacactgccgcatgaaacggtattccactaatgcgatcaacaatcgtactatatctgtttctgtggcatgggttttcaattgtgtgccaattttttcaattagaatgtcatgcctttctatcagaagttcgggtaacgtgcgtgggtcggctctgcgtcatgcggtataggtcgctcactcgacagcctatcagtgtttggaatataaatatatccctctgttttgccagttgcggagtggctgataggtcggcattgataattctgtccttttcttcaagtgttatgtaatgaggtgtaccgtatgtacattcttctatcgggaatttgtcgaaaggtctgttgttcaagttccgtccggatatcttgcaaaatccgtaatcgtgttacacttatccgtaatttgtatacggtagattttgttgtaacggcatacttttgcatagtgaatgtagagtactaaatattattagaattagatcaaggagaaagagttatgaatgacagaaagattttagtagcgtacttctcatgtagcggcgtaactaaagctgtggcagagaaattggctgcaattactggagcagatctgtatgaaattaagccggaggttccttatacggaggctgacctggactggaatgataagaaaagccgtagttcggtggagatgagagatgctctctcgcgtcctgccatttccggtacgttgtttcatccggaaaagtacgaagttctgtttgtaggctttccggtctggtggtatattgcccctactataattaatacatttttggaaagttatgactttgccggtaaaatagttgttccgttcgctacatcgggaggcagcggcataggaaattgtgaaaagaatcttcataaagcatatccggatatcgtgtggaaagatggaaaacttttaaatggacagataacgcgggatctggttacggaatggtttgaaaaaattaggttgtaaattaaatggaggtatgaaaaatgtatatagaaaatattaattcaccgaaagatataaaagaattgtcagttgaacaactaagtgtgctggctgaggaagtaagaactgcgttaatcaggaaattaagtgaacacggtgggcatatcggcccgaatcttggtatggtggaaactacaattgcactgcattatgtttttaactctcccattgataaaatagtttttgacgtatcccatcagagctatgttcataaaatgcttaccggaagaatggctgcatttcttgatccggctaaatatgatgatgttaccggatatactaatccggatgaaagcgagcatgatttctttacgataggacacacctcaacatctgtttcactggcaatgggacttgcaaaaggacgtgatctcacaggtggcaaagaaaacatcatcgctgtaatcggtgacggttcgttgagtgggggagaggctttggaaggactcaacaatgcggcaatgcttggctctaacatgattattatagtcaatgacaatgatcaatccattgctgaaaatcatggaggactttataaaggattgaaagagcttagagacacgaatggggagagtcctgataatatttttaaggctatggggctggagtattattaccttggagatgggcatgatgtgtcagcactcataaaattatttacgtcagtcaaagatatagaccgtgcagtagtattgcatatccatacgatcaaaggtaagggattgaaatatgcagaagaaaataaagaatactggcatgcaggaggtccttttcacatcgaagacggttctcccaaaggacccggatggccggtgaatgaaactgtcagggagtctgttttagacttgattgaaaagaggtcggatgtagttgcaattactgcgggaacaccgtctgtaataggatttacggaagactatcggaagcgtgccggcaaacagtttgttgatgtaggtattgcggaagaacatgctgttgcaatggcaagtggtattgccaggaatggaggaacaccgatttttggagttttcagtccgttcttgcagagaacgtatgaccaactttcgtcagacttgtgtttaaataataatccggctgtaatcatggtgtttatggcttcagtatatgggatgaacagtaatactcatttggggatctatgatattccgatgatttcacatatacccaatctggtatatcttgctccgacgagcaaggaggagtatcttgccatgtttaagtatgccactacacagaaagcgcatcccattgctatcagaattccaatgatgatgcctgagacgggaattgaggataccacggattactctttactaaataaatatcaggtcgtacgaaaaggttcaggtgttgcgattattgcacttggagatttctttgaactgggcgtacaaattgccgataaatataaaatcctgacgggtaatgatgtaacactgataaatcctaaattcatcacaggtattgatgaagagctgctggagtgcttaaaaacggaccatgaacttgtgcttactcttgaagacggcatagtggaaggaggattcgggcaaacaattgcaagtttttatggtttatcggatatgaaggttaaaaattatggaataaagaaatcattccccacagattttcggcctgaagaactgatgagagagaatggattatccgtagagcaaataatagaggatataaaatccgtatgcagagagcacgttatgtgagaacactcacaatctgtggaataagtaaaaaggatgaaaattcagaataaaagagatattatgaaaaagaatttgggtgcgacgctggctttatatccagcataggctgttgtcgtagaaacaatggaggagttacgtgatgtagttcctccattattatcagaaaaagtttctaattctgtgagagtctgtaattattcggagccactccggtaattcttttaaataaacggctaaagtatcgtatattggggtatcccagtttttccgtaactacacttaccgtattattagagtcgagcagcatgcttttagccatttccaaacgttttgactcgaaatattcatcgatattttttccactttcaaattttagcaggtcattgaaataatgagatgacagttgaagtatttttgcacagtatcccaatgaaggcgatgtattgtattttaattttccggatagaatataatctttcaacaatacatctgttttcttcataatctttttgttagcttcgcaacgtgtgataaactgacgttcgtagaaacggttgcaatgatctaataacaattctatgtaccgtgaaatcaggatttggctgtggcagtctatcgcatgacgaagttcctcttcgatgttgcatatgcattctgcagccttggccttctcccgttgagataggtggagtgcctcctccggattgtaaaaaaagaaggagtaatcttttatatgttctcccaaagaggtttgagaaatcaagtccggatgaaatgccagcagccacccttttgagggaagtgctttgcttttgtttattttgatagattctcccggcgtgaggaataccaatgatgcattggaataatcatagtacttgcgcccatataaaacatcatcgatctccccttccatcatcaggatggtataaaaatcaaatttaataatttgctgttccagattgctctttgacaggtcgattacacttaccagcggatggagtgttttgcagcccaggcagcagttgcattgatggacggtctctatatttaatattctttctttcataggagtcacttatttcctgcgaagataggatgttccggccaatattgttcttccttgtcactgatatccgtaatcaaggttatgaaatctgtaatttgtgtaagaagaggtatgtcttgccataatttgttatcattgggataaaagtggaatgctacgatagatagcttttggagtcttttctgttaatgagggttaaatctgcttttctgaacaacttaataaacaatattagtaacacagaggtaagtgactgacatagaagtaccttattgctagatgattataaactacttacctttgtatcatctctcaaacacagaaaaggagatctttttaatactattattgattaataaataaaggagttatgaagaattatcaaaaaatgagcgtagcacaagatgcacgtgtagagttgcatgacagtcttgccctgacgggtgccgaagtatctatcaatcatcttccggccggtgccggagtcccttttgttcattcacataaacagaatgaagaaatttacggcatcctttcggggaagggctttatcactattgatggcgaaaagatagaattgcaggctggggattggctccgtattgctccggatggaaaacgtcagatttctgctgcctctgacagtcctatcggttttctttgtattcaggtgaaagcaggctccttggaaggttataccatgactgatggagtcgtacaataaaaaatagttgataaaaccggtaaaatgaagggctgtgttcatgatgaagagtcatgatgacgcagcctttttagatatttttacggagtatggctccgaagcgtgagcaactgtagggattggatataatggaagtctatggcagtagagaaaattcggatattaatatttttagctgtggtaagatctttaggtaaaaacaaaaaatagaaagtaattttagtaactctccggctggtttcatccggaaattctgtacatttgctgtgtagggcatagattgcgggtatgtggtatgtaaggtgatcattaatttcttattaaacagaaaggaaaaaaaaatatggaaaatgttattcagatacaatattatcaatcgccatgtggggaactgatattgggggcatatcgggaaaaactttgcttatgtgattggaagatagaagaacgcaggatcatcatcgacagaagaatacaaaaagagttgcaagcttcttataaggagggcatatctgaagtaatcgcacgaacgatcggtcaactggatgaatattttgccggacgaagaactacattcgatattcctttgcttcttgtaggtactgattttcagaaaactgtttggaacgaactgttgaacattccttatggaaaaacaatctcttatgcagggttgtctcaaaagttggggaatcctaaagctatccgtgccatagcttccgccaacggagcgaaccctatctcgatacttgttccttgtcatcgtgtgatcggcagtgaccgtaaattagtagggtatggcggtgggctgcctgctaagaagatcttgcttgacctggagtcttccgataggttattctaactgttcaggcttatgaacgactgaccgcattattaatgaaaggcagtctaaactgattagaagagtaacttaagttctttggcaattctgcaagcttcaatggagttctttacctgaagcttttccaatatattttgtcggtgtcggctgacggtatttttgcttataaacagttcccgggcgatctcatgacttgttttccccatatcgatcaactgtaatattgttttctccctatcggatagcaatctgctgcaatcttgcttttccagttctatgacctgtccgtttgtcgagttgatcactctacaactcatagtagggtcgaccgacaaattgtaaagacacagagccagccacatactgtcgtttgagtgggtagctacatagaacatcctgtgtaggatagggatatatttcccggaaggatcacgcatacggagtttactcataagaaagtaatctgcacgttttttgtgtggaatctgtttcagaaaatggtagaaacgaagttcctgtacatacttttccaccaagtcatccggatggatatatttaaagacttctttttcccagattgattcaagattttgattgtctccttttcgggctatgcccaatgtctcagctgttcctccataatagatatagctgatattggtatgcatatcacttagaacggcgattgaattttctattcgtgcatagttgtatgcgattcgtttatattcattcagttcttccggcagctgttcgtttttgcagaagggttgagtcaggaactctttgttcagtttgtcaacaatgtccatatcgggaaaagaaatggttattaataagcattgtgtacttagatacaagcttttacctttgcaaaggtaatcataaaacatagttatttatggaaagtgaaaaagaaaaaatgggtacaggcaggctttacgatgctaattatgatacagaattgatagccgaacgtcaggcttgcaaagagttgtgttataccttaaatcatttgcctccctcgcagatagctgaacgggaggccattatccgtcggttgttttgcaagacgaaagaacgttttctgttggaacagcctttttattgtgactatggctataacattgagattggtgaaaatttttatgccaatatgaactgtgtcattctggatgaggctaaagtaacgttcggtgataatgtctttatcgctccatcctgtggcttctataccgcggggcatcctttggatgtggaacagagaaatcgagggttggaatatgcccgtcccattcgtgtcggaaataatgtgtggattggggcacaagtgtgcgtattaccgggcgtgacgattggtgacaacacagtgataggtgcgggaagtgtagtaaatagagatattcctgccaatgtgattgctgcgggtaatccttgtcgcgtgattcgggaaattacggaagaagataaaacaaaatatttattatagaataaacataatcaaaaagtagaaatgaaaaaagtatgtttaagcctgcttatgggactgatggtacaaatgacctttgggcagacactggaaaaaatgcaatggttcaacgaaccggaacaatgggagataaaaaataatgtattgtccatgtccgttactccgcaaagtgattactggcgtatttctcactacggttttacagtagatgacgcacctttctattatgccacttatggcggtgaatttgaagcgaaagtcaaggttgtcggagagtataaagaacgtttcgatcaggccggtctgatgctccgtatcgatcatgaaaattacattaaagcgggtattgagtttgtcgatgggaaatttaatttaagtaccgttgttactcataaaacgagtgactggagtgtgataacgttagataaaacggtaccttatatctggataaaggctgtcaggcggctggatgcagtagaggttttctattcatttgatgataaaacttacacgctgatgcgtaatgcctggttgcaggatcatattcctgtgaaagttggactgatggcggcttgtcccgatggtagtggattcaatgctaagtttgaatacttccaggtgaagcatctgccggaccagcgcagagtggaatggctgaagaagaatgcagaataaataagcagaatggaagatagacggttcggaaagtcatatcttccatttttttgtggttgggctatatcaagcagattgtctgttatcgcatttatttataaatcaaacgacttataaacagatagcctccgaatatttgcagagccattcccggcagaccgatacggaaatcctgtacggcactgaaaaaatcgttgacaaggatccattcgcctaaagtgccgaccacctgataggataacacgaccaggaggaggatagggatggaaatgcgtttgtagcggtgggctgcataaccggcagctatcgctagaagtgtcgattttaagagtatggcgggtaagatcaccggttgaggcatgccgaacaataatgagtttaaaacaggcgatagaagtgctgtcagtaaccctactttccatccgtatttataagctccgatcagagtaaaaaaatagatgggtaaccaagtgataccaccttgcggaatgagatggaaaagttgggggagtgccatattgcccactacgaatagcagtgttgccagatacgttttcgtatcattgtaattcaatgaataaagcttgatagatgttgtttccataattatgatgtaataattaaaagttaatattaattcctcccatacatgtagctttcggcatggggtaacctgcgtttatttcataacgttgtgccagcagattctccccttttacaaacaggtcggcaatagagcaaatgcgataactgccgcgaagattccacaggaggaagttttctttcttttcctgagggacgactgccgtatagagtcctgtcacatattgtattccggtggagaaactccatttcttctgtgtgaaatcgatgcctgtatatagtttatgttcgggtgcggctatcaggggatgctccatatgaagccaactgtagttagctgtcagtctccacatggggtgaatgtgatatgctatgtcggcttctgctccccaattctcgactttgcctgtgtttacgttcagtgggcgtccgtctgtgcgaatggtctgaatcatattgtccccgttgatgtaaaaaaggttgactccgtaataaaaagtacctttgagtaagcgttgtgaataagatagttcgtaattccacagccgttccggcaacaagtcgggattggccggtcggaacatatacagttcacgaatcgttgggttacggaatcctttactggccattgctttcaggcttgcgtcttgtggcaattgtaccgacaaaccgacttgtggtatccattccgttccggtgacggtgtggtgatctatacggagccctgcatccattgtcaggtaactgccgattgcctggcggaaatcgagatatccggcaatctcattttccgatttatccgagataccttctttatgtttgtccgcaatgaaacggttccaggcttcaccgccgaattgcatataatctattcctgcagtcagtcggttgccggaaaataaagaggcactctgataccaggagattcccatcatccggtccttggaattgaagcggtagtctagcggttcttctcccgtaccatatccgtcattaatgtgatgtttgccccaattatagaaaaacttgagtgcccccgatgtacgttcgtatctgttttccagagcaaaagaagtcatgccgcgtgtaatgcgcgagtcattatcaaaaaccggtgtactgacagttcccggattggaagcattgaaatgtgtcaggttcagatcggccgatacgttccagctgtgatccagttcataacccaacctcgtatatcccccatattgctcaaattccatattggggcgatgaccgtttgtccggttataagatccggtgataatgctgttgaaacgtcctttttttacttggttggtagcttcggtcatccatgtgtcatacgaaccatatcccagtcggactccggttctcactccgtcttcccgttgccggcgggttacgatgttgattactccacccatggcattcgagccataaagtacggatgcggggccgcgcacaacttccactttctcggccagcatcgattggtaagcatcagcaatgggatgtcccatcaatcccatgtattggggatgcccgtcaatcaataccaataatcctgtagtggggctgccacctataccacgcaggctgataccgcctgccgcaccgtttgacactccatatcccatcacgccacgactggtggtgaacaatccgggaacctgttctgtcaatgtggggagcagggaaggttcggagcgttgcctgatggtttcacggttcaccacggagattgtcattggcaggtgacggatatcggtttcattcctcgtgccggtcactaccacgccgtctatttcataattatgccctgcttgtgtcgtatctttccggacttgtgcttgtaaagatgaactgagaaaagcgcataccaatagaatgccgagcaggtttttcttcatcctgatcttggaaaggaagttttcgatgatccggaatatttcctgtatggattctattccatagcaagctgtttccaacggacaccatccgcttttatcccggttttcgatgaaaggcaccagccgtacataacttacctctatattggcattgtgcaggagtgcaagtgcaggttggctgataacatccgcgtatacctgtcggattcctcccaataccattagacctgctgctgcttttccaattaccttgtcggcgatgcaggctcctttcataaaggaggggtcttgccgaaataagtcatataaatcggcaacgccccgttgggtgaaggttcgtatctctgttccgtttccgatgacacaggaatatcctccggagtgtagaagatcaattatcttttccatcatagtgtcccctgcttgagctgttctacaaaacgatcgatgcgatgcagttcttccggtatgtggatggattgcggacaatgcggggtacattggttgcatccgatgcaatgactggcttgtcgcaatttaggtacactgcggtcgtagcctacaaggaaagcgcgtcgtgcttctttgtagttttcacttgtctggctttgcggaatattcccttcgttgacacacttgttgtaatgtacgagaatggcaggaatatcgatgccgtatggacagggcatgcaatatttacagtcattacaggggatggtagggtattgcatcatcagttgcgcggtttcttccagatactctttgtcgtcatcggtcagcggaaccagtggtgaataagtgcggatgttatcctgtaagtgctccatataagtcataccgctcaatacggtcagtaccaattccggtgaaccggcgaagcggaatgcccacgatgccacactgtcttcgggacgtcgttgttttagccgtcccacgatgtgctccggtacattcgataaccgtccgcccaatagcggttccatgatcacagcggcaatattccgtttggccagttcgccgtacaggtattccgcatttacattgtttccggttgcgtggcgccagtccacatagttgagctgaatctgtacaaaatcccatttcaccgtatcgtgcatggcaagtacctggtcgaaaacctcaacgtcaccatggaatgaccagccgagatgacgtatgcgtccggcctctcgttccttgagaagaaagtccagcataccgttatcgatataacgctcattgaataccttcatcccgcctccgccaatggcgtgcagcagatagtaatcaaaatactccacttgcatatccttgaatgattgatgatacatcgcaagtgagttttcgcgtgagaagttagagaaattcgatagcttggtggctatataaagtttctcgcgcggatgcctcttgagagcgataccggttgctttttccgaccagccctgtacgtatacaggtgatgtatcgaaataattcactccatgagcaatggcatagtctaccaattcgttgacagcttcctgattgataaggtctccttttccttccggtgaaggaacggtaggccaacgcatacagccatatcccaggagggatactttatctttgattccgcctactgagcggtaagtcatctggtctgtcggaacaggagaggaggcattccgtccctggctgcttttagttccggagccgcagccataaagagctgctgtcgttgtagcggcactgatgcccacaattttcaggaatcctcttcggtctatatgattattctgtttttccatatgtctttatttttgagatgtgttatatgatacgatgcctttcgtgcccctcgacgtagatggcactgaacggacgtgccggacaaagattctcgcatgctccacagccgatgcaacgctcggtgttgatcgccggaatttggggagaagtctctttttccggttcggcgacaatcatctgaatagctcctgtcggacaatgacgggcacagttgtcacatttcactccatcggtcagcgacacgcagtttgctttgatccagacagcatgtccgatttgagtggaagatttgtcggctgttgtaatggggtgtatggctcctgtcggacatacctgtgaacagtcattacattccggacggcagtatccgcgttcatatgatatttcaggttgcatcagattcatcaggttagtggaaggacgcaatacttggttggaacaagctgatacgcacaattggcaagctgtgcaatgtgctgccatgtttcgtgcactcaacgaaccgggaggtgtaatgggagtctggcggttcgggatctttttatcttctatggccgccagtcctccgtctacttttttctcttgtgcttttagggctgatgccgtagcggccattgccgttacggtaaggaaattgcgacgtgcttcattgacttccttggatgaggctgcatgagcattttcttctgcttttgctggccgggccttggttgtccgcaattggtaactgagcgctttctgcttgcatttaccaagacaatccatgcaaaccacgcatcggctgtaatcgatcgtatgttctttagcattgatgcaggccgctttacaatggcgtgcacaaagtccgcatttattgcatttttccgtatctattgtgatgcggaacaaggagtaacgtgaaagaaatcccagtaccgtccctaccgggcagattgtattgcagtaagtgcgtccgttccgccatgccaataatatcaggatgacaaaagtagctgcggctacaatgaaagtaggcagactttttatccagatgtctacttcataaaatgcatagctgccggcccgttcggctaaatgggcgaacaggttgtttccccacagccaaatgggttggaacaggttgtttgcgatacgcccgtaagcactgtagggagcaaatagagttgcgatgaaacttactcctgccaccagggtgatgatgaatattgccaatgccccgtagcgtaggagggagagagcgggagaataggagtagggtaactttttccgctttttgccaatccaggctgctacatcttgaaatacccccaacggacaaatcaccgagcaatagattcggccgaatactcctgtcaggatgattaaaaggactactacccctacgttcaatgccagtactgcagggaggaactggatctttgccagccagccgaaccaaccgtgaagggttccggtaaagtcaaggaatagcaaggtgatcagtgtcaggcagatgatgccacatgttaatctgatttttcgtaacattgcgtttgtttttattgagtttgttatttatcgtttacaagccatgttttaaattccgatgctttgtttttgctgacataaatacgttccggtacttctgtatcgagcgtgataagtagacggttgtcgaaccagatggttatatccgttacgctatccctcgctacgataaactgcttattggcccggatgaagtcttccgggttcagtgaggaagcaatttgttccaaagtcttggagtatggataacgattgccgtcttttaagcatacatacgtatttttgccggttgcgtaaaaataagaaatattttttatatttaccggtaacagcttgtctttgtgtgcaatcagtaacttgtctttgtatctgggtgcaggtttcaatagagtcagttgtgacaaatattgtaataagtcctgccgggtcagcttactgtatttctccaatgcgtgttctacatcttccactttgaccggctttaataaataatctatgctgttcaccttaaaagcttcgatggcatatcggtcataagcggttgtgaatatgatgggagtctccagttctattctgtcgaaaatagcaaaagccgatccgtccgataaatgaatatccatgaatatcagatccggagccggattagattgtaaccacccgacggtttgtgtgacactttccgtatttgccatgatccggatgtcgggagttatctctgtgagaatatccgttaaattttcataggcagcagtttcgtcttctacaatcaatactttcataacagccactatattagaggtaaatatacccggaacactttttcatcagtttctatccggatttgtttattcattaataagttgaagcggttttcaaggttgcttaatcccgttccgttggtgtcgggaggtgacagtttggggtaaatgggattggataccaccagttcgtattgttcgttcagccggatggagatatccattttgtgttcactgtctatcctgttgtgtaccgtgacgttgtctaccaatggcaggagtgagagtacaggcagtgtcagtacatctttctgtgcttcatccacgtcgatagtaaaactcagtttattggcaaagcgtacctccattacgtatcggaaggactggatgaactccagttcttctctcagtgtaaccactcctttgcggtcgctctgcaagatataccggaaaatatcggatagttggttgacatacgtcagcgtgttttcatcgttcttctttcggatcagtgaagatattccgttcagtgagttgaagaagaagtgcgggtttacctggttggccagtgcatcacaacggctttgcaagttttcaaaacggagacgttctatttcctgttctttttctctttgccgggtataaagcatggagatgtatcctaccaaagtgcataaaaagcagagcgtgaagaactgggagattaaagtgcttcccagaaaatccgtatggaaaccatgcgaagagatggtgtacgaaacggatgcgaagaacagataaccggtcagtgcaaacaggaagttgtgagtcaggcgtttcctgaacagcgctgtcgggatctgccgcagattgtagtttatcaggaaaccgatcatcccccaaaagaagaggaaacggtatatgaagtaagaaaagaaaccaaggtattccgatggttccaaagagtttagctcccacggggtgcaggctatattgggatatatgatgaaaaccgcactgatcaggctgaccagcggaaggttccgggatatatatttatcaaaggaatccatgatgctcttctttctcactgcaaagaaaagcaaaataatgattccttattttgtaatgtcatgtcaaaacgaaaaaagaagcataaaagcgaaactttttcattttttcagcataaatacgatatagtctctacataaaataagaatgcagaatgacaagacgagagaagcgatcagcataaattctttcataatgtttgttggttttataggttctttcctataaagacaacatccgatgagaaactccctacgctccaaggctttttatttagatctgtttatgttctgccatgtatttccaaagtggggctgcatgcagtgactgcatgatctgtccgttttccagtagttcttttacctcttcaaggctgagcagatgtactgtaagcgcctccgtgtcttccaggtgttgtgtgtcgatttgctccacatcagtagccagaaagcagtgtgtcagattggtatgagtactcggattggccgaaattaccatatactctttccagttgcctttgccgtatccggtctcttcaagtagctcccgttgcgccgaaacaagtggtgaagcgtcttctttctcacatacgccggcacagagttcgtatagctgtttacctattcccggacggaattggcggacgaatacaaactttccttctttggtgatggcgatggtgttcacccagtcgggatactcaaggatgtaatactccggaatatgattgccgttgggcaaaagcatgtcgtcacaacgtacggttagccatgggcgccgaaatagatatttactgctgactacctgccagatttcgtcttttttttccattattgggatattagataatgatttaaagtagggcaaatatagtgctaattctttgacgggtgcagaatcattaataaaatatcgaagaaaaatgacgatgtgataagttcacaacttaaaatattgctaaataatctctatttttttactatatcccctttttattaccatttattcttcttttccttttttatat

SEQ ID NO: 5009 - DNA, 7120 bp, Unknown
  gut microbiota DNA sequence
gatatataatataattaaaagttcttgtctctccgaatcgccaaatattaaagactgtacagggacgtttttagcagcattgcatctcgtcacatgtttttacgtgggcgagatgcgtgctgtttttattttgagggaattttttgcaacttgcttttttttatctatttttgcgaatattgctaagttaagtgaaacttagttgtgttagttaacgagcgtgagctgattcttgtctctgaaatcgccaaattttgagactgcacaagaaaaatgcttcaacgattgtttaccttatattaccgtatctgtgtttgtgttttgctttggaagtaaaatgcaaatctgttttatagtaaaataggcgcaagcaaagttggtcattgagtgcagaggtgtttggcgatacctgagagacaaaatgactgatgaagcttgcgctttttgtgttaaatttgaattggaaaacacacatgtatggtagtatcgataagaaacaaatgacttgtagaatttcttgggtcattttattttgtttttgtgatataacatttttgctttcgcaagaacagggaaaatttgtatctaaaaaacttgaaaatatagccttccagctttcttcacaatatcaggctgattgttcggtaaaacaacgtatcttattaaagcctttatgcccggataaacaaattattgttactactgacttgtatcgtacggttaatcatatcgggttcgaactattcgatcgtacggttatggaacagaatccttcccctgtatatacatttgttgaacgttatttattggagttattgttaacagataatgatgaagggatgcggcatctcttagaagaaagtaaagtgatggttcgtttgggacaaaataatcgtttgctcactcatgccagattattgtcagtgttaagggaaatgaattcagcccattcttttattattactactgataatagtcgttatactatggtatggtatcatgataaagaaatgcttttttctttgcgtttccctattcaatatgaattaatttggggaatgaataaagttgaagcagaaaatctgttttacatgaatttggaaaattatcgtcttggtcggaggccctctccggcatgcataccccaatcattgaaagctttaaacgactcttgctatgtgacgggggaagacttttatggcattgaagctatttcttccagtcaatattataaaaaaggaactgacggtaaatttactccgattttagatattcattcacctgtagaatctatctctaatttatttacgattagtgcggatgaaagatgtaaagtacaggtgacccaatgtatgtacggtaatcggaaaaacagctttgaattaccgttgtgtgagctggttgattattgtaaaaatagtggttgcgatgtatacgtaggtatggaacgttctgttggaaatcatttttggggaatagcttttatggtaaatcgctctttggggtataatcatttgctctattttgatacggatattcgtattttgctgtatcccgatagatataaaatgaatatgcaattgtacggatttgttcctatacacaatttgcgtaatttatttggtggacaaaattaataaatataagataattatggtcagaggtattacactatttttagctatgggcctagtgccactccttgtgtattcacagggaattactgtttctcaggattctcttcgcgaaaaagtgagagatatcaagttaagcgagaagtatgtatatgcagaagctactactccagtagggatgtcagaggctcagcaatattcgttggacttacttcatgtacatgtgattgggattttttctcaacggtttaagatggacccaaaagatgtagaggagatttgggatgtgattgaggacaaatgtcagaatgtagtgattaagaatggggatttatttagagtatgtacttatattctgaaagatgcttttgcttttcataaaaatccgggcaaggcactggagaaatggaagagagcggaggctgaacgagtgcaacaagactctttaaagcaggataatgcggaatcggaacttaagttgacggctgatgatacacgtaaagtaggtggtatagtcagtctgctgaatcaagtaggagttgagacggaagatggctcggtagtaaataagccggagcaggtggtggctgatacggttcctaccctatattcatctgctccaactacagttgttatgactacgcccgaagcgccttccaaagtgataactccggcaactactactggcaagacctcaagtgtggagtcaccgattgaaatagaagagcttccatctgcagtagaatctttgcctgacacagaccggcttcttgttacgaacttattggctctgaactctttcgatgaagtgctttcattcttggagaaagggcaaagagaaggtaaattaatatacggtaatgtgaaaaccataaagaatcctcaagcctcttatctggttatcattaaagataagcggttgataacagttttgaataaaggggctaaagagcgtacgaatcttaaaacaaatacggctgatgctttgaaaaattataaagggcatggagtcatttggtttcaagttttttaaatgaatggatcataaataaaaagaatatagtcatgaaaacgatacaaatcaaatttatcttattaattgcttttcttcaattatctgtctttgctaaagcacaatatgctactgattttcatttgacagatatggataatgcaaatttaaaagaagctgtacaagttaatatcaccaatttattaacggaaataaatagtgcttacgttgaaaagcgtttgcctgatttttcaaagatcagcatggcgatggaggtgcagaatagcattcgcatgctatgggaaaatactccttttcgttgtgccgaaacagaagtgatagaacgttgtctgaatatgaacggaacttatcaggtacgtaatattcctcttttcttatcgcagcctgacggttcgaaagacgaatatcaagagggagtgattggttttgactctcaagctaagattactgattttcatttggctattagcactaatctgtatactaaagttctagtggcagggaaagaggtggcggattttcgttaccgtcagttgattctggattacgtcgaacagttccgtacagcttacaatacgaaagatcttattttcttgaatcagatattcagtgatgatgctctgatcattaccggtaaggtgattcgttctgtaccttctgagatgaatcattttgtagcctctgagaaggtggtctataacaaacagtcaaagaaagaatacctctcgcggttgaaaacgatttttggagctaataaacggattcatgtgatatttgatgaaataaatgtagtgaaacatcccgccaaagagggcttttatggagtgactttgaagcagggatacacatcagacagctatcacgacgaaggctatctgtttttgttgtgggattttacaaacgaggatgcacctaaaattcatgttcgtacctggcaacccgaaatgctgaatgctacaacgaagctgcccgaagaggagatatttacgtgtgatgattttgaagtggagtaatgggctaaatgtgaaatataataattgaatataaatatgaaaaaaatatggaattggttgaatgtgattgtctttgttgtactgggagcgtgcagcagtgatgatcgagataattcggtgtttaagcccgagtttgacaacggggagatagagcataacaatgtagggcgttcggaggtcgttttaagggggcgtatcgtcattcccgatggattgggttcttttgaatgcggatttatgtattccactgcttccacagtgcctacaaaagatgcgatacgagtttctgccactcctgatacgggtgggctttgcgaagtagctttgaccaatctggaacccgatactaaatattattattgtatgtatgccagtaatggttccgctattattcgaagcgcaccgattaaggagttcagaaccttgtctaattcggccccagaactggaagagcctttggctatcgggattggggaaaatagcttgacgatcgagtgtaagataaaggattcgggtagctctaagcttcagcaattcggaattgcttataaggtgaaaggggaggtcggagagcccactcgaaaagcaacctctaaattcaaggatggaaccaatgatacttttgagattacgattgaaggtctgtcggctgaaacaacgtatgagatttatgcttatgccatcaacactaaggacgagggaaagagcagtgtgatctaccaagcgaccagctctcaggaagctgctcggctcactacacaggagataagtgaggtaggggccaattgggtaaccttgatggcggttatcgaagatccgggtaaaggagaaatgattgaaaaagggttctatctgagtgagaagaacagtccggataaagagacgacttataaagtcgaagagaaatcggacgacaatatatatagttataaagtgtcgggtttggttcctaatacgacctactcggtgagggcttatgcgaagaacagggttggaagcgaggtaaccaaactggcttttggcgggcggaaagaatttacaactcagtcattgaaggcaccggttgtgagtgagccgacctatgatatggacgttgataagatgactctgactgtttccgcccgcatcatggatacaggaaacgggacgatcagtcgggcaggattttattatagtaccacccaccagactccggatcaggaggatactcatttggagggaaaggtagaaggagatgtgttcactgcagtgataaaagagttagcgaagaatcaagtgtattatatccgtccttttgcggtgaatgatgctgagcaaatagggtttggagaggttttgaaagtaacttctgttcctgtcagtgtacctgctttgggtgagataacttcttcaacccaaggaaaagagatgaaactgagctctaaggtaactgatgcaggaggaggaacggtgagcgaaaggggattttattggagcacggcttcggtctcaggatatccggaaacggacatccctaaaatgaataaagtagtggcggaaggtactgatgcgactttcagcgccttggtaaaagacattaaggcaaacacggtgtattacgtgtacgcatatgcggttaatgaaggcggaaaagggtatagttattattactcgtttgaaccgaccaaggcggttgttcctgtggctggaaaactttcttacacatgggacaaagctactccggacgtactcacactctcgtcatccgtagttagtgccggcaatgtagaaatcagcgagaaaggtttctattggggaaccggctggaatgatgatattaactctatgaccaaagtgcccggaacagataccgagaatggcttcaccgccagtatcaccattaagccgaacacggtctatcatctacgtgcttatgtggtaaactcggggaatatgaccggatatagcgatacggagacattcggtggtgatcagtgggtgatcaatgatccggtcctttcgcaagtgaccaccagtgtggtaaatgggattatgacgctgaaagcgaaggtgaccaatactgggtacggatctttggctcgcaaaggtttttattacagtaccaccggcgagccttccgcaagtagtgttttcttagagggaaccggtggcgatgacgggtttacagcaaccatccaattggaagtgggagtaacgtatcgtgtgagagcattcgctcaaagtcagttcatggacaatggttgctttggaagtgtgacggaattaactccatggatgaaacctactttacggaatgatattaattttagcagcaccggcagctcaattaccgccagtacctatataaataataatggaaccaatgcggtgggagagtccggcaaaggaaccatctccgatcagggattctgttatagcacttccagccaagagcctgtggtaacgactgagtcgaacgcggaaggaggttctgttacggcagcggcaggaaatgagataaaaactaccatttcggggttgaagttaggtaccacctattatatccgggcctatgcaaagaatgaacatgggctaagttatggtcctgtgaaacaatactcaacgaaaagagcgccggagccgggtgacattgacaatccaagtaaaaattagaaaagatgaaacgaaataatttatcattacttattttgctgttagcaacagctataggaagcttctccgcatgccagggtgatgtggaggaatgggtcaatcctgatcagagtacatctcaaccggtgacgaaggcagctttggtggagaaaaccgtggcgatgacggaagccggtaagtttgcatcgttttttcaggagggagagctggaaacgatccaaaaattgagggtatccggccctttggatgcgagtgatatcgatgcgattcgttatcaaatgcctagactggaggtgttggatatgaaagaggtagagttgatagaaagtgataaaacgtatggcgcggaggatcatcgggagcattataaactaaagaaaggagttataacccccaaaatgctgcaatgtttttctttgttagtgactttggtattgcctaaagatataaccgagatagaagattatggcatttacggtaataaaaaccttgtttcgattgaaattccggtgactgtgaagaaggtgggagcacatgtatttaaatcttgtagcagtttgcaaaaagtagaccttccgaatgtcgaaactttaggtgaaagagtttttgaaagttgtggcaaactgactaaggtaaccttgtctcctgacttacaggttattcctgactatgcttttcagtattgtggtagtcttgctgatgtaccattaccttcgtccttagttagtattggagtttctgcttttagggattgtagtagtcttgttgatgtaccattaccttcgtct

SEQ ID NO: 5010 - DNA, 150358 bp, Unknown
  gut microbiota DNA sequence
gttgaactaccgccttcaccagtgttagctaatgcttctacattggccattgctatatcggataataattctgtactctgtactttatacacattatatccaataaaagacactgctatcactgctatgaacgcaatcattgctttaactttctttttcatttttttcattttagttgattatcattttatttatcccgcttatcatttccacggaaaagcaatccaattgccttctaaatcaaactttttccataggctaacattctccataattttttaaggttaactattagtattcttcatcaatcgcattaccccgaatcttcaaacgtattggagaggtgggagtattacaatatacagtaatggtcttctcaaaatgttcgggatgttctgcacggtaagtaacctgaatatcggcagacttccctgaaggtacaggctccttactgtaagtgacggatgtacagccacacgaagcatttatgtcctcgataatcagaagatgatcgccaagattccgcaaactaaaagtagcggtctggggaattttccaatcaaaatcgcccatttcatcgaggtttttatccaaaaccacatttgtttgggaagaggtagcgactccggtttgccgtccggtaataatttgcaaataaaggtcacgcacctttttattatggacaggattaccaatcgcaatcaccttgttctgactgtccaaaaggaaagtttgaaagttcacatccgaagggaaatgattcaaagcatcaaaacctcccttttcatcgataaaaaccggataaaggaatcgatctctcttcaatagaaaagagatttcttttttgtttttcggatggaaagcaaagagaaaagatacctttccattggccattgtgtcgaccatagaaatgaaatatttccatgtaggaagttgcaatttgcaactggtgcagcccaccgaatccacgtaagtcattatggtatattcattttggggaaacgaataaccggcactgtcctttcctaaaacactgaatgtcatatcagcgggatagacaatcgttctaccctcccatttgtgaatcaaacgggatatttgctgctctttggtctctttacatgagcaaagtgccatcagaaagcataaatagccgataattttaatgggacggcccattattcttcacggtatactacttcaactttcagatatgtgaacggacagtccacagatccgtcaccgatacaggctatatctccatcggggaacgactctcctgtagccaaagcctccacattttgcaatagcaaaccggcttcttgtacctttccttcttttctcacagaaacaagacctattagcaatagcccgataagtccaatagtaatttttgcgtttttcatactctatgtttttattgcaaaggtatggcttatcccggccaccgccagtgagaaagactgatttctcactgatttttcactgatttcttactattttctgaacgaaagtggagttgatagcctccatttaccaaagtaacaccaagattagcccctattttccttaaatcagtacgtaaatcagtaatcagtcggttcctgcgttccatacaagaatctacatcctctaattctttccagaatagttttttcaaatcttcattcaacagcaaatggccgggtactttaagaaatgccagcaatacctcaacaacttgttttcggagtatacaagtctgattatgataagtgatactcctctgcagataatcaaatgtaagtccattgacctcccaaacaaattcacttttttgttgaacaagcggttgcgacgatttaacatgattatctactattctgaacttagataaaacttgaacaagaaaaagacgaacacccggaacataaaacaaacaaaagatcagtgaaaaaagaacatagttccaagtccagatattattccaatgcgcttttaaaacaacggtcgcccaaaaaggtcttataaaagcatccatttttataccataaccgacccctgtactataggctaataaaaaacaatcgggttcatttagcccactcgatgccgatatccgctctccgttctttagagaatttgttagttttattccggtattagcacagattccatccatacgaagtttcaactgccatttctgattcagagaatccacattaatagagtttcgctctataaggtaagattgtttaactctatgcacaaaagatgtatccgtataaacagtatcaatggcaaattgacgtacattgtgagtcccgctcttatctgtaagggttactttcttattctttgtatgtttctttccggtaacgtacgcctgattgggtttcaattttcggaatctacattccaagtcttcatcaattgtacgcaacaagagtttttgtgcacttgcatttacaataggcagacccatacgataaagataggatccaaaagtaattgtaacccctatccaaagtaaagcaaataagatactatagataaatttcattgttcatcattttcttttgcaaagaaaatcaaaaaaagagttgattgcaaataaaatataatttttctacctccagtttcatctataaatcttatcaataacagtctggtattatccaactggggcacatgcaaatatactattggttcattgctcttcacacaatttcctaaagcccttattccctgcgcaaataaagaagaaaacaacttgatccccccatatcacaaacctttatgaacaagataattaccatttttcatacgatctctactccgccccgcataccggggctcatcggcccacatactcgggctattgggcacagacatgcgggcccgaataagattcagaccattttcactaaagtaagttttcttttactcatggaatctaattcagttttcggaagtgtaagccctcttttatagttgacaaaaaagcaagtatcccggctttcgcccgaagagtccatccgtgaggtgaagaagcgaatcttagactaaaccatctgaaaatcaacatctttaaaaagtaagatttctgtcctcaaaagctttgttttaacactgagttaaaacttgttctttggatgtgaataacaagttctttaaatgcaaaagacttgttatttgcgcacaagaacctgacaacctgcaaaagacgttaacaatgttaattgaagaaaggtgtaagaatgaagataccggttcagacagcgtaaattcacttccggaacttgagctatcttattcagccggtatctgttttttcttattaaagcaggccaaaaggacaattatcaacttgaaaataaagaaataaagaatttaccagcaaatttgaagaagaaccattttttgtatgagagcgtgatatttagctttcctttgtcagcaggctttccagttcttcggcactctgccgcaaatagaactgaccgcgccatgccacagagatggctccggtttcttcggaaacaatgatggccaaagcgtccgaaacctgcgatatacccattgccgcccggtggcgaagtcccaattctttgggtatgtccaggttgtgggataccggaagaatacatccggccgctttaatacgttttttactgattaccattgcgccatcatgcaaagggctgtttttaaagaaaatgttctcaatcagccgctggttaatattggcatcgataatttcaccggtacgaatgacatcgtcaagcggtacattacgctccataacaatcaaagctcctactttctgctttcccatactgatgcaagccatcacaatcggcatgatatcatcatgctggagtttttcttttttgttgccggtaaggaagcgtaccaaggcactagcgtgctggtgcgaacccagagtcagcaaaaagcgcctgatttcatcctgaaacagaacaatcagcgccaagactcccacactcaccaatttgtcgaaaatggagcccaggagcttcatctcgagcacctgcgatacaaccagccaaataaggataaacaccaggataccggtgaacacattaatagatccggaggctttcatcagcttataagtgtaataaagcaggaaagccactaacaggatatcaataaaatcttttatgccaaattcaaaaaacacgggactaaagtattaagggttaagtatacgggtatcaggaacaagccgatacactttttaatttctctatcagccgaaccgactcgacagcttcacgcacatcatgcacacggagaatatcggcacctttcatcaaagctaccgtatcgagtactgttgtcccgttgagtgcttcctgcggtgtggttccaaacaaacgataaatcatcgacttgcgggaaactcccaccaacaagggaagttcgaaaatgccgaactcttccagatgcgccatcagttcgtagttatgctccaacgttttgccgaagccgaaaccgggatcgagaataatgtctttcactcccaagtcacgcaattgctgtactttccgggcaaaatagatgaagacctctttcagcaaattttcataatggggctccttttgcatgttttgaggagtaccttgcatgtgcatcataatgtaaggtacattcaggcgagccaccgtcggaaacatctgttcatccatctcaccggccgaaatgtcattgataatagccactccgtactccttcacacattcctcagccactccggcacggaatgtgtcaactgaaataatagcacccggatgattccggttcaatatttccagaccggtacgcaaacgccgcatttcttcttcgggcgagatgtgttcggcattcgaacgtgacgaataagctcctatatcaatcatagaggccccttcatcaagtatctgacgggcacgtgcagcaatatcggcttctgtccggcttcggctacctgcataaaaagaatcgggtgtaacattgagtatacccataacctgcggaatggaaagatcaagtaaacgaccgttcacattcaggcttttgaaaatcgttgaatccattttctgttattacggttgattgacgcaaagataaagaaaaataaatgtcctaatgctatcagcacactaaaaataaagttatctttgcagctatcaagactactcaaaaatatgtcctccaaaccgtaccgtcacttcatagcactcctgctggttttgttttgttcgcgattcgaagcccaagccgaagacctgttcgctaaaacggacagtactcttcaacaatacttgatcagatgtaaggcacaaatcaaagatccggactttctgcaaacaaatgatactcttacgcgcatggctcaagaaaaaaatgacaaacggatgcaggtgattgccgtggccctgaaactggattattactactatcaaaacaatccggacagtatccttgtcatggtagaccgcgtgaagaaaatcagccgaaggaataatgaactgaaatatttctactttgcatggggaagccgattgattatctattatatcaaacaacaccaaaccaacactgccatttacgaagcccggaaaatgcttcagtcagcggaggctgataatttcattcccggaatcgtacaatgttaccgtacattggggacggtctacatgactcaatcgaatcctaaactggcttatgaaaacttccggaaacaaatagccttgattgaagaaaatgaaatagaagatatcaatctgcccactcaatatgcttcactcgcccaatgcgctcttgaaatgcaccgccccgacgaagcgctgaaagcactggaaaaaggatcgaaatgtacccggagttcatatcagatattcactgtacagaaagcctatattctatattatctggaaacaaaagaatacgaaaaagcccggaaaatacttgtggagttggagcaattgttcgaaaaagataaatcactcgcactctataaaagcggattattctatatacagatagaatactaccggaacaccggacagtaccggaaagcacttgacgtgatagaagagatcaagaatgattcatcgagcattaacaaatacctggactatacactcacccagaaacaaggcgacatctattgggaaatgaaccagaaggcccgggctgcccaatattatcgggattatatcctggcaacagactccatccgaagccaggaaatacaaaactcaaccaacgagttctataccattatggaagtagaacagctacacaaagaaaaaaatgaactactgctgcacatgcaggaagaaaaattgcagaaaatcaatatcgcacttgtctcactggtcattattctggtggcaggaacgatgttacttttccacatctcaaagttgaataaaaaactgaagagatcggaagccaaagtgatacagcagaacaaagaattggtagaaaacggagaagaattacgcaaagccaaagaacaggcggaaaacgcaagccggatgaaaacaacttttatccagagtatgtcacacgaaattcgcactcctcttaattcaatcgtcggattctctcaggtactgagcaactatttcaaagaagaagataatgatgaaatcagagagttcgcctcgatcatcgaaatcagcagcagcaatttactgcggctgatcaatgacgtactcgacatctcttacctagaccagtcggaaatattgccctacgataagcccgaagacatcaacaattgttgcctgctcagcatcgaacgaacccggaacagtataaagaaagaggtatcactccgtttcgaaccgtcatgcggaccacttatgatattgaccaacccggaaagggtagcgcagatactgacccacttgctacacaacgcaattaaattcactgacaaggggaatatcacgctggcttacaccatctcgcccacagaaaaacagattgtatataccgttaccgatacagggaaaggtatcccagtggagcaacaagagtatgtattcgaacgttttgccaagctgaacgatttttcgcaaggaacagggttagggcttcccatctgtcggattattgccgaaaagctaggaggtagcctcatcatagataagacttataccaagggatgccgcttcatacttacattgccgctgataaaagcagactgataataccccaaaaaggttgcccctcaggcggaaaccgccctcggagcaacctaaacaaaaaaacggtaaagcgttaccgctacttctaatcgacgatggtcactctcgcaccattgaatacattcaatcccaatttgttcatgatgtacttaatggccaactgtgctttcaccgagttgcccgagccatccaaaggaggagcaaaggcagatacaccgaatacacccggcaatactcccatcacaccaccacctacaccggtcttggcaggaatacctgaagtatacatccaatcgcccgaatgttcgtagaagcctacggtagcaatcatagatgtgattttaggagtcagttcggcatcgaacacctgctttttagtcacaggattcacaccgccattggcaaccgtaccggcagccaccgacaacatctgtgcagttacccccaaagagcactggcgagtataaaggtccagtgacatattgggatcgtcatagatacgattatagttcttcagtaaccaggcaatagaacggttattgaaattggtagctgtctccgacttatagagttcttcgatcaactgtggagcagaaccgcaaagatcggtaatgttctgtacgatagcgtcccatttcttatctgaattaccaatcggagtcaccatggaacaagctgagatggctccggcatttaccaacggagtagacggatggtcattctccaacaagatggcaatgatagagttaaaaggaagtccggtagcatccgcaccgatcatctcaagcactttctgtgccccgtattggcggagaatcagaatggctgtatgcactttagatacggattcaataccgaaacgataatcaaagtcacccacggtaatggtctgaccgttcagcaggcagacactgataccaaaaaggtttttgtctatattggccagataaggaatataatcggcattcttaccgcctgtattaccttttacctgttcgtaggcctgctgcacaacctcttttatttgggaaatagatatttttttgtccatactaattcatattatttatttcttggcagcttgtggtttaccggtatggttaaatactttggcttctaccggcagattcttctcctgggcaatacgagtggatgtcgggtattccagtttttccagttcggcaatagcattcttaatgtcgcccagcaacatgtcggccatatcacgactgaatccctgacggacaacgacacgcataaccacataatcttgcagcttggcaggcaatgtatatgccggaaccatccagccatgctgagccagcttatcctgcaaatcgtaaagagtccatttggcgttctttgcatattccggcttcatgtaccaaatgaacaacgggtttactacatcttccgagtagttgacgaacggagtcatcttagcaatctggctgtggatgtatttggcaatctgcaaagagttgtattgtacttccttgtatccctggaatcctaaacgaataaattgataatattgtcccaaaatctgagctgcaggacgagagaagttcaaacctacctgagtaatgttagctcctaagtagtttacgctgaaagccatttcttcgggcagatattctttgcctttccagacaacccaacccaaacccggatatacgagaccgaacttatggccggatacactgatggaaagaacccatttcagacggaagtcccatttggtatcaggatacaggaacggcaggatgaaaccaccgctggcagcgtctacgtgaataggaatatcataaccggttttagcgttatacgcatcgagggctttgtcaagggcttcaacatcatcgttcagaccggtccatgtaaccccttggattggaactacacagattgtattttcatcacacatcttcagggcttcttccgggtcaagtgtggtcttgtccagcgtcaaaggcacctgacgcatctcaatctgccacaactgagcaaatttttcccaaacaacctggaaaccggttgaaatgacaaagttaggtttatcaaatggtttaccctgggcctgacgttttttgcgccaacgcaaccaggcagctacaccacccaacatacaagcttctgaagaaccgatagccaatgcaccggttttccaggtatctttttccggagagttccacaaattagcaacgatattgatacatttaccgttcatcacagcaatgcgaggatattctgtctcatcaatgtagttgatattgatagcttcgttcatcagcttcgttgcatagtcatccatataagtagtcacgaatgtagcaagattcagacggggctgagtttgagcaaaagtttcgtccttcaccatctgataggcgatttccggagtagtaggaccatcaggtattttctctaccggagagggttgtaacattctgtttgaaccaaatgcttctgttttagcatcaccttttctgaaatttaaatcttccataattactcttatttttaattaggtttaggcgatggggattttccccgtcgaatttcccacaacaacagtgagaggatatgaaagttcttcggttttacattatttggggtttattaaaaaggggggcgacggaaaagttaataagttatctccagccctaataggaagatatcccaacacactttctgctgcttgtgtgccgaacattctaacggatcgtttgttcttcacacacctaaactttataatacctatataactatgcgtattcaaactggccatgggactattccccttattaccctcatcggcatctggtctatctcggccctgaatgccctaccggggctggcggtttctcctattctggggaagctctccgccatctttccacactccaccgaactggacatacagatgctttcgtctctgccttcactattgattatcccatttatccttttggcaggtaaactgacggaacgggtcaatttcatccgtctgctccaagccggacttgccatctttgctctaagcggagtgctctacctgctgtcgggacagatgtggcaactgattgccgtgagtgccttactgggcgtaggctccggactgatcgtcccgctatccaccggattaatctccaaatacttcgtaggttcataccgtgtgaaacagttcggattaagttcggccatcaccaacataacactggtagtagctacggcagtaaccggataccttgctgaagtcaactggcatctcccattcgtcgtctatctgcttccaatcatttcactcgtactctcggtatatctgcaacgcagcatggcaagcgaaggcagtacctcgcttaccaacgacaaagccccggcagacaaagaagaagatgtagataccggtaacagcaaatacggcattcacgttcgccatcttgccggcattatgggtgtttacggactggctacctttctggtactggtagtcagtttcaacctgccattcctgatggaagaatatcatttcaccagtggtaactccggtattatgatttctctcttctttctggctatcatgactcccggcttttttctgaaccggatcgtaggcactctgaaagagaaaacaaagttttacagttttttgagtatcggcatcggactggcactgatctggatctcacccaaagaatgggtgatagctccgggatgtatcctggtcgggctggggtacggagttatccaacctgttgtctacaaccagacaacccatacggctatttcacgcaaagtgacactggcactggcattcgtaatggcgatgaactatcttgccatcctgctatgtcccttcattatcgacttcttccagtcgactgtattccacatcaaatctcagcagtttgcttttgtattcaatctatgcatcagcatcgtaatgcttgtcatttcctataccaagcgaaattctttcttgtttaatgataatctgaaatagaaaatgtaattttgcacccacaacagagaaaaaccgattattatgaaactttctgctctctaccagatattcctggattgtgccgtagtgaccaccgacagccgcaactgccctgcaggttcactgtttattgccctgaaaggcgaatcattcaatggaaacgcttttgcagctcaagcattaaaagacggctgtgcatacgccatcgtagatgaagccgaatatgctccggaaaacaacagacatatcattctggtggacaattgcctgcaaactcttcagcaactggctaattatcaccgccgccaactgggtacaaaagtgatcggcattaccggaaccaacgggaaaacaaccactaaagagctgatttctgctgtcttgtcgaaatctcacaatgtactctacacagaaggaaacctaaacaaccacattggagtgcccatgactctgcttcgcctaaaagcagaacatgaactggcagtgatcgaaatgggggctaatcatcccggagagataaaatttctggtacacattgtcgagccggattatggaattatcaccaatgtgggaaaagcgcatctggaaggattcggttccttcgaaggagtgatccgcaccaaaggagaattatatgactatctccgtgaaaaggaagattctaccgtctttatacaccatgataatgcttatctgatggacatcgctcatggcctgaatctgattccctacggaagtgaagacgcactttatgtaaacggacatgtgaccgggaattccccttatctgactttcgaatggaaagcaggcaaagatggtgacttgcacaaagtgcaaactcaacttatcggcgaatataacttcccaaatgcgttggccgccgttactatcggtcggttctttggagtggaagccggaaaaatagatgaagcactagccggatatactccccgcaacaaccgttcacaactaaaaaaaaccgcggataatacactaattatagacgcctacaatgccaatccgaccagcatgatggcagctctgcagaacttccgtaatatgactgtgaaaaagaaaatgctgatattaggcgatatgcgtgaattgggggcggaaagtgcagctgaacaccgcaaaatcgtggacttcctgcaagaatgttcttttgagaaagtcctgctggttggagaacaatttacagcaactcatcctccttatcacacctatgccaatgcacaggaagtgataaaggaactgcaaacggaaaagcctaaagactacaccatcctgatcaaaggatcgaatggtatcaaactgagcacggttgttgaatttttataaaagtctactttttacttaatatacgtggacggataataaaatatcctatcagactggccaataccgcacctgtggtattggctgcaaagtccatccagtctcccccacgataggtcgtacaatattcctgcaacaattctacacatccgctgaacaacaccggacaaatgaatgctcctacccaagcatgccacaccggagtgtggtctctacggtgtgcccgtaaaaactccagccatagcataccggacatgccaaagtacatacaaatatgaacgaccttatcgatattaggaattttactaatctccgttgaaggaggtttgaagaacgacagatagatgaccgcaagaatgataaagagcgatacgggatatttcttaatatacgatagcatacctaaataaattacagatgaatcgcaaatataaggaacattttctatatttgcacgtttaaagcgagaaaatctatcgaattgtaagataacatatactttttatgacaaaaaaagaaagaggaaactttggtagtaaactgggtgtgatattagcttctgcagggtcagccgtcggactgggcaatatatggagattcccttatgaaacgggaaatcatggaggagctgcttttattcttatttatctgggatgcatcctcctactcggactaccgattatgatagctgaatttttaatcggacggcactcacaggctaatactgcccgtgcttaccagatactggctcccggcactcaatggcgttgggtaggacgaatgggagttttggcaggattccttattcttggctattactctgtagtggccggatggacattagaatatatattcgaagctgtcagcaacagttttgcaggtaaaactccggcggagttcatctcttctttccaaagtttctccagcaatccctggcgtccggccctatggctcacgttattcttactcgctacccatttcatcatcgtgaaaggggtagagaagggaatcgaaaaatcatctaaaattatgatgccgaccctcttcatcattatcttaatactggtgggatgctctgtcactttgccgggagcgggcaaaggcatagagtttctgctaaaaccagatttcagtaaagtagatggcaatgtatttctgggagctatggggcaagcgttcttctcactcagccttggaatgggatgcctgtgtacctatgcctcctatttcagcaaaaacaccaacctcacccgaacggctttcagcgtaggaatcatcgacacatttgtcgctgtactagccggttttatcatctttcctgcagcgttttcggtaggaattcaaccggacgccggacccagtttaatttttataacccttcctaacgtgttccaacaggctttcagcggaataccgatactggcatatattttttcagtgatgttctacgtattgctggcactggcagctctgacttctaccatctcattgcacgaagtggttacggcctacctccacgaagagttcaactttacaaggggaaaagctgcccggttagtgacgacaggttgtattctgttagggatactctgttcactctctctgggagttaccaaggagttcaccatcttcggactgggtatgttcgacttgttcgacttcgtaactgccaaactgatgttgccattgggcggattactcatttccatttttaccggatggtatctggataagaaactcgtttggtcggaaatcacgaataacggtaccctgaaagttcctacctataaactgattatctttattctgaaatacgtagccccgattgccatttcagtgatcttcattaatgaactggggctactgaaataaaaatgtggaaagacttcttttacttcacacgtgcagaacggcaaggtatcctgatacttgccgttttgtgtattctcgtatttgtggccggatggttgatccctgtcaaagagaacacggcaaaaaacgatacggaaaagtttaaaaaggaatatgccggttttatgtcctccatccgcgaaaaagaacaaaagatatattcacacaataaccgctttcagcccccacgaacagtccgtctgactacatttgaccctaatatcaccgactctgtcggattccttgatttgggactgccggcatggatggcaaagaacatcctaaagtatcgaaataaaggtggaaaattccgtcgggcggaagacttccgaaaagtatacggattaacgcaggaacaatacgaaatgctcctaccttatatttatatagctacgctcgcaaagcccaaagatacacttcgcctctatacccgaaagatagaagaagacacactgaaattttttaaatatgcagccggaacagtagtcgaactgaacagtgcagacacaacggaactgaaaaagatccccggtataggtagtggaattgcccggatgataacaggatatcgcaaccgtttaggaggattttatgatatagcacaattgaaggagatacatctcgatgtagaaaaactccgcccctggtttaacgtggcaaccggcaatacccgacggctgaatatcaaccgaaccggtatcgaaaggctcaaagctcatccttacatcaacttctaccaagccaaaataatcgtagaatacagaaaaaagaaaggaatattaaaaagtctgaagcaactttctctctacgaagagtttacgcctcaagatctggagcgaatcagccactacatctgttttgagtaatcaaatgatatttccatctaccatatggatcgtacggtcggtgatttttgctaatgcttcatcatgggtcacgatcacaaaagtctgtccgaaacgatttctcaagtcaaaaaagagttgatgcaattcttccttattatgggaatccaagcttccggaaggttcatcggccaagataactgccggttggttgatcaatgcacgggctacagctacccgctgtttctctccgccggagagttcattcggtttatgagatgcccgttccttcaatcccataaaatcaagaatctccatagcacgcatcgaagcttccttagtcggcactccggctataaatgcaggaatcattacattttcaagtgccgtgaactccggtaacaactgatggaactgaaagacaaatccaatgtgtttgttacggaaagcggaaagctctttctccttcatccggcttacattggtaccgtcaatgtttatcatccccgcatcgggactgtccaaagtacccattatctgaagcaaagtagtcttccccgctccactgggtcccacgatgcttaccacttctccttgggttatctccaaatctatccctttcaatacttgtaaagagccgaaactcttggttataccttctagatgaatcataatcttacaatcttttgataacgtactctgccaaataacaaccaaacaccgccggcatatagctcacagttccgcaagtggatttcttgttcctctcatcatcagtcagcaatactgctttcgaatccgcctgttccgtactgaacaccacgggaagcttacgctttacccccattttttgcaaacgcttccggacggccttgctaagaccacaatgataagtatcccaaaggtcggcaaaacgcacttgtgtaatatcactctttgctcctgcacccatactcgatattattttaatgcgtcgctgaagagcatgataaatcagataacactttggacttatggtgtcaatggcatcgactataaaatcataacgtgcagcatccagcagttcgggtatgttatcgtctttcagataaacaggcaatacagtcaactctatttccggattaatatctctgaaacgtgcttccaacaccttcgctttttccatacccaaagtggcatgagtagccggcaactggcggttaatattagtgggctgtacaatatcagcatctactattgtcattcgccctacgcctgcacgacaaatcatttcggctgcataagcacctactcctcctaatccgacaaccaacacatgcgatttccgcaagcgttccatcttctccgctcctaaaaggagttctgttctctgttgccagttctccattaattcttctttaaccatttatagaaccatttacctaccttatcgtaatgttgagactcgttgtagccacgcggatcagagaatgaaacaatttcctgtggttcaccaaactgatcgggatacaatataatcagactgttgtttgagaaatattttccgagctgattgggtagacgttcgaatgaagggtcgtatgagatagatccgcgccgtgcactaataaccaccaacagatggtcaaaatttacctgcccggtcagcagaagcagatcgtcccactcgtccaacctggaaaattcagtgggtgtactaccatgcttcttctttaccaactgctgcagccgcatcagggtttgctcgttggcaaagaaatgtacccgacatcctaaaagacttcccatgcggcagaagtgctctacccatttggaaaatccggtttcatattcagcctttggcggcacagcaataataatacgccgaagtgtattgacgggcattaagaatttggcgatgatcacttcccgatgggtacctttcagcaagctttcggccagattaccaaaaaatgaatcgacaatatttgccttacggtgcaaaccgatcactacatctgtagcatcatactccttaatggtatgaataatgcccgaagcaatattaagatcataacgactcaccatattgaccgaaacatcggcagaagcagcaatcattgccgccttttccagattccgcttaccctgtaactccttattttccgaattgttattatcattgattacattgagcgcaatcaattctcttttctgtttagtatctctgatgaccaaggcaagattaatcagatcttcaatggtatccggatttgctaccggaatcagaatctgctcctgttctgtcttctctttattatcttcaaactgcatctcttcgtgcagagcaaaacgccttgccgaacgttcggttacaagcgaactgatgacgcacgtaaagagaatcatgactaccgtgccattgagcacatcgtcattcagcaaccgctctccattttccataatgatttcatgccctatcaatactgctgccagcgtagcagcagcctgcgcattgctcaaaccgaacatcatgcttcgttcattgggctgcatatgataaatcttctgtgtgatccaagctgccaaccatttacttagagtagcgaatacggtcatcactacggcaacctttagagcttcaccaccggtaaacagggtacggacatcgattatcatccccacaccaatcaggaaatatggaataaacaaggcatttccgacaaactccaaccgattcatcaaaggagaaacatgcggtatcaagcgattcaagacaagtccggcaagaaaagctcccaaaataccctccataccgacaaactccatcaaaccactacctaaaaagaccatcgcgagtacaaagacaaattgcattacgctatcatcgtacttacggaaaaaccatcgaccgatacgcgggaagaagaaaacgatcagaaaactcaaaaatgcaactttcaccactaacagaacccaaaacataccgtcgacagttcctttgtacataccaccaatgacggcaagaataatcaaagccaacgtaaccgttaccgccgtaccgccgatggttatatttacactcctaagtctggacaatccataacggctgataatgggataggcaatcagtgtatgggaagcatacatactggcgagtaataccgctgtagtaaatccatatcccagcaattccatactactccatacccccaatgccatcggaatgataaatgtaaaccatccgaagaccaatccttttgtccggttcttcttaaaatcctccatatccatttccagcccggccagaaacatgatataatagaggcctacttttccgaacaattcgaaactactgtcccgctcgagaacattaaagccatattcaccgataaccactccggccaaaatcatgccgataatatgaggtatatgcagacgtcctaatatcatcggtgcaaaaagaataatgatcaaaaccaagaaaaacacccacgtggggtctgttatcgggagttgtaaactgaggtcaaaccaatgcatatatcagtatttttgtatttatctgcaaaataacaaaaaagttatcacaccgccaattcataaggaaagagattttcaaagagaaatcttctctctaaaatgctgattatattgcaaaatgttataattttgcagccaaatccttacgattggcttgaattgtaaggagagtattcacataaaaacaaaagaaaaagatgaaagtagctattgttggcgtaagcggagccgtaggacaagagtttctacgcgtgctcgatgagagaaatttcccgttggacgagttagttttgttcggttctaaacgtagtgccggaactaaatatactttccgcggtaaacagatcgaggtcaaacttctgcaacacaacgatgactttaaaggggtggacattgctttcacttcggccggtgcaggcacgtctaaagagtttgagaagactattacccggtatggtgcggtaatgatcgataactccagcgctttccgtatggatgccgatgtacccttggtagtgcccgaagtaaatgcagctgatgctaaagatcgcccacgtggtgtgattgccaacccgaattgcacaaccattcagatggttgtcgcactgaaagccatcgaagagctttctcatataaaaactgtgcatgtatctacttaccaggcagcgagcggtgccggtgcagcagctatggacgaactctacgaacagtatcgtcaggttttagccaatgaacctgtcactgttgaaaagtttgcgtatcagctggccttcaacctgattcctcaaattgatgtattcacagaaaacggatatacgaaagaggaaatgaaaatgtataacgaaacacgcaaaatcatgcactctgacgtgaaagtaagtgctacttgtgtacgtgttccggcacttcgtgctcactctgaaagtatttgggtggaaacagaacgtcctatttcgatagaagaagctcgtgaagcttttgccaaaggtgaaggattggtattgcaagacaatcctgccgagaaagaatatccgatgcccttgttcctggcaggcaaagatcccgtttatgtaggtcgtatccgtaaagacctgaccaatgactgtggattaaccttctggattgtaggtgatcaaatcaaaaaaggagccgcactgaatgctgtccagattgccgaatatctgattaaagaaggaaatatcggataaattaaaatccggatttaaccgcagataaccattataagatttaatatttcaattcatctcagccaggtagtcaatccggctgagattttctttttataaacttcatacaatctattaaataagaatgatttgatcaggtccgacacaaggataaaaacaaaagattgttccgcacaagcattcaaagagggaactacatttccgaatgcatttatttgatatgaaaaaactttccgatcaaaacaaatcaaattacaaaaaatattatatatttgtatccaaatcaaaaaggctgcgaaatgaaacttattgcggaaagtggttctacaagaacggaatgggcattggttgaagacaatcatctcgtacaacgtgtgtttaccgaagggctaaaccctttcttccagactagaagagaaattagcagaagcgtcaggttgggactaccggaatcattcttcaaaaaaaaactggatcaagtatattactatggtgccggatgcagttcatatgaaaagaaaaatatcttaggtgcctctttagtggcacaattcaaaactcccattcaggttgaaagcgatttgctggcagcagctcgtggtttatttaaatgtgaagccggaattgcctgtatcttgggtaccggatcaaattcctgtttttacgatggtaaaattatagtcaaaaatgtgaaagctgccggatatattttaggagatgaaggcagtggagccgttcttggaaaactttttttagccgaccttcttaaaggactagctcccaaagaattggcaaatgaatttcatgagaagtttcgtatctcggtcaatgatgtcatggaatctgtatataatctccctttccctaatcgttttttaggaaccattgcgtatttcttaggagattatatggataatgaatatgtatataacctattaactaacaacctccgtagtttctttaaccgcaacgtatgccaatacgattatataaactatcccatccgctttgtaggctcactagcttatgcgtatccagatattttacaagaagtagcacaggaattcggagtagagatagatgttatagaagagacacctatgaatggtttaatcgagtttcactccatgaacatcgaagagtcctaaaagcgcgcacaatatctaaaaaatgtttctaaaccttaagaaccatcgcttataaatgtattcacagatcatttttataaaacagagaagcgtcataatgtgaatatacaaatataaatctaaattatataaaatatttgttcttgatattaaaataaaatatatctttgccatagtagaactccaaagagtttctaaacctttgttaataataaacaatttatctcttaaaagaatcaacaaagccaattgatattaattaaactggccaaaaacaaggattaacaggacttattaaaaacaaatagagataacataaaaattaaaacctttaaatgaaatgcctatgataaataattatccaaaccaaggatagcttagcctaccctcctattttacctttacctgcattttcctgagaaatcaaatgaaaaacaaaacaattaaatcatctatcttttatgaatgaagatcgcaagaaacgaggattagcgaacagcaacctccttatagccatggctattactgccttaattataggtagcagcaatgcaatggctaatcaaactgcttccggcagtagttacaaggtgactgaacaaatgcaaatacaaaccgtgacgggtgtagtagtagatgcaaacggcgaaccgattattggtgccagtgtcgtagagaaagggacaaccaatgggattgtaaccgacatggatggcaaattttcactaaatgtaaaagtaggtaccactctgcaaatcacatttgtaggataccaaccgcaagatgtgaaagcaactaaaagcatgaaagttgtcctgaaagaggacaacgaattactagatgaagtggtagtggtaggttatggaacccagaaaaaggcaaaccttaccggagcagtatccactgtagatgtcagcaagactttggaagcccgcccacaatccgatgtgtccaaagctctgcaaggtgtagtaccgggattgaccatcactaataccagtggaaaactaaacagcaaaccaaccatgactatccgtggtaccggaacactgagtaacagtgcaaccagtaacccgcttattgttgtagatggtgtgccaatggacgatatctcatatttaaatacacaggatatcgataatatatctgttttgaaagatgcagcctccacttctatctatggtacaagagcagcatttggtgttatattagtaacaacaaaatctgcaaagaaaacagataaagtcacaatcaattataccaataatttctcctgggatacaccaaccatacttccgaactatccggatgtagctacacaggccagagctttgcgtgcggccaacactcgtgccaatctcgagaatgaattgttcggtatgtacatggatgacaatttcatagcaaaagctgaagcttggaagcaaagacacggaggtaaaaaagccggatatcgcgaaatgattccgggtgatgattttgatttgggagaagatggtagcgcactatattatgcagattgggatgtggtcggaattatgtttcgagactggaaacccgcacaaagtcacaatatatcaatacagggaaccagtggaaaaacatcctattttttgtccgttggctataatcacgaggaaggagtaatgacattcaacccggataagttgaataaatacaacgctaatatgaatgtcacttccgacataacaaattggttacaaatcggtggccgcttcagttatagtgacaaggcatacaccacccctaatacccgccgtaatacttatacgtatatgtggcgctggggaagtttcttcggtccttatggtacttatcagggaatcgatatgaaaaatgatatcgcataccttaaacaagcaggagatgacaagactaatgactcttatactcgtataggtgccttcttaaaagcaactattatcaaagggttaaccttaaatgccgattatacatttaatatcaacaataaaacgaccaaatcagtaggattacccgtaatatgttggaactcttggggaggtaaactaaatactcctactaccgcagcaggagctaatggagatacatgggtatatcagaattcagtccgcgacaattcttacgcattaaatgtattcgctaattacgaactaacagttgcaaaagatcatcatttcaactttatgatcggtgccaatgctgaagaaggtgaatatcagaatcattggtcacaacgtaaagggctattggatgataaactacctgaattcaacctggcaacaggagatcaaactgtaggtggaacgcataacgaatggggtactgccggatggttcggacgcatcaactatgattataacggtatctggttgttggaattgaacggacgatacgacggttcatccaaattcccatcaagtgatcgctgggcattcttcccttccggctctgtaggctatcgtatcagtgaggaaaaattcttcgaacccatcaaaaaaatagtcagcaacaccaaaatacgtgcctcatatggtgaaatcggtaaccaggcagtaggtagcaacatgtacatttcaactgtctccaaacgaacagacggcaatacacactggttgaacggcagtaacaaagtggtagcttacgatcttccttctttggtctctccgaccttaaaatgggaacgtattcaaacactggatatcggtggtgattttggtttcttcaataacgaattgaacatatcttttgactggtaccaacgcacaaccaaagatatgttagcaccgggtcagacgatgccggacgtgctaggtgcaggtgcaccgaaaatcaatgcaggtaccttacgcacacgtggttgggaattaagtattgattggcgtcatcatttcaatgaaataaacgtatatgccaatgccagtataggtgatttcaagactgtcatcaccaaatgggataacgacagccaactcttgaatgaaaactatagcggtaaagtatatggagatatatggggatttgagaccgatcgatattttacaaaagacgattttaacgctgacggttcttataaagaagggattgcttctcagaaaaaattagaacaagacggatttgtttacggtccgggggatattaaatttaaagatctgaataacgacaaagaaattaatggaggtgaaggtacggtaaaagatcacggagacttaaaggtgattggtaataccactccccgttaccagtacggctttcgtctgggtggcgaatggaaaggaatagatattgatatgttctttcaaggtgtaggcaaatgtgatgcatggacacaatcagctttcgtaatgccaatgatgcgtggtgccgatgcgatttatgcaaatcaagctaattattggacagatgaaaatccggaccctaatgctgatttcccacgcatgtggccgggtaatgcaggaaaaggtacagtcagcgtacttgatttaggtaatcataacttctatccgcaaagtaaatacctggtaaacatggcctatctacgtttcaaaaatttgactataggatataccttaccaaaagattggacacgtaaagtttacatggataaagtacgcgtttatttcagtgctaataatatttgcgaacttataaataagagtaatgctcctgtagacccggaagtaaatacttctgaagctatagccaatggcggaagcagtgattacggcaatggaacttggggacgagtagacccgatgtatcgtaccgtatcgttcggtttacaagttactttctaatataccataaacaattaatagcgaattatatgaaaaaaattaaatatatagcatgtctgctgtcattggctgtagtatccggttgtgacagtatcttagacaaaggtcctctggactcttttaccaatgataacttttggaccggtgaaggaaatatatccggatatgcaaatgcattctacgaacaattcttaggatatggtaacggcaatggttacggtgatttctatttcaagacattatctgacgatcaagccggaatgagctttgccaaatggacttatccggacaatgcaccctcaacaagtgctacctggaaaaatggctggattgaggttcgccgcgctaacatcatgctcgagaatgtaccgacagttgcttcattggacgaagcaaccaaaaatcattggctcggagtagcccgcttaatgagagcttggcaatactatcacttagtacgtatgtatggtaatctaccttggatagacaaagcacttaacatcaacgacgaaggagaaatatatggcaaccgcgaggatcgggatatggtgatggacaaagtgctggaagatctggactttgcggtaaccaatatcaaagatatttccagtaaaacgacttggagccgttcattagccaacgcaatgaaagctgaggtatgcctctacgaaggcacttttcgtaaatatcgcaaaaatgaagatggacagcaagcccccgatgcaacaggtgctgccaggtacctcacagcctgcaaagaagcatgtctggccgttatgagcaaaggttataaattaaacacctcttatcaggggaattataactcgacagatttaagcagtaatccggaaatgattttatacaaagcatacaaagaaggattactcatgcactccactatcgactacacatgctcatccactcaaatcagcggtatgagtaaaaatgcgttcgaatcctacctgtttaaagatggtaagcccatggcattgacttctttgaataaaagtgacgaagcacctttccaatacggacatttatctttaaaagccattctcgctgtccgggataaacgactggcccaaacaattgatacagtactcctgtataatggcagaggatttacacgatttaacaccggcatggaatcaacttcttcgacaggttatggagtggctaaatacgataatgaagctatcccggaaggttttagaagtcaatcaggaaagaattatactcatgctcctttattttggttgtcagtaatttatttaaattatgcggaagcctgcgctgaattaggtaatatcactcaagatgacttggataaatctatcaacttactaaaagaccgtgctggattaccacatctaaaccctatcgtcggtttcagtgatcctgcaaataaccatggggttagcgatttaatctgggagattcgtcgtgaacgccgttgtgaactgatgttcgataatgataaccgatattgggatttaatacgttggcatcaactcgataaattggatacaaccaaataccccgatatcatcttaggtgctaacgtagccaatgacatggatggttgtgaagccaataaagttggtaaatatattgacggaagtaaagatggtagtcgtatatacgataaaaaacattatttatatccgattccaaccggacaaatagctttaaatccacaattagcccccaataatccgggttggtaatcaaccatacctggtaaatacagagattcttcctgtttccatagtcttgatagctatggaattaggaagaattttacacctttagctaaaaagttttactctgtaacaaccaatctgtaaattatcaattataatataaaatatttctaaataattgtttttgatattaaaataaaaagtatctttgctacaacaagaacttcctcctaatactatttttatgaaaaagatcctactcatagtcgtcttattatgtagtactctctttgctcaagcacaaaagagcgatgtaattataggtgctgagcagactaaagcatattttccaattctaaaaaataaacgaattgctatattttccaatcacaccggaatggtgggaaataagcacttgctggatatattattggaaaacaactttaatgtagttgcaattttttcaccagaacatggtttccgtggaaatgctgatgccggcgaacatgtatccagtacaatcgattcaaaaacaggagtacccattctttctctttacaacggaaagtcgaagaaaccgagtgaagcctccatgaaaaagttcgatatattgattgtagacatacaagatgtggggttacgcttctacacttattatatatctatggtgcgtttgatggatgcctgcgcagaatatgaccgcaaaatactgattctggaccgaccaaatccaaatggccattatgttgacggaccaatattggatatgaaatataaatcgggagtaggcggattacctatccccattgtacacggaatgacactaggcgaacttgccttgatggtcaatggcgaacgatggctaccttcttcacgaatttgcgacgtgaccgtcattccttgtaagaactatacacaccagacaatgtatcgcctgcccattcctccttcgcctaacttaccgaacatgaaagcgatttatctatacccttccatctgccttttcgaagggactccagtaagcttgggacgtggcaccactctaccttttcaagtatacggccatcctaatatgaccggatacaattacaatttcactcctcgtagtattccaggagcaaaaaatccgccgcaacttaacaaattatgccacggagtaaacttgagtaatcttagtgacgaagaaatttggaaaaaaggaataaacttagactacttaattgacgcctatcataatctgaatatgggagatcgttttttcagacctttttttgaattactggtcggtaccgactatgtacgtaaaatgatagaaggaggtaaaagtgctgatgaaataaaagcaagatggaaaagagatgtcgaaaggttcaagatacaacgaaagccttatctactctatcaagacaactgactagccctaataaaatatttcattcattaatctgaaaagcatgacacctgtagcggtattaatcactattgcctcctacttcctgatcctgtttaccatttcgcacattgcaggaagaaaggctgataacgaaggcttctttgtgggtaaccgcaaatcagcttggtatgtagtggctttcgccatgatcggctccagcatatcaggagttacttttgtatcagttccgggtatggtaggcatcagtaatttttcatatctacagatggtattgggatttgtaaccggacaaattattatcgcctttgttctgatacccttattctaccggatgaaccttgtatctatttatgaatacttagaaaaccgtttcggtacctcttcctataaaacaggcgcatggttcttcttcatttccaaaatattgggagcagccgtacgtttatacctcgtatgtctcacattgcaacttctggtttttgaacctttccacatgcctttcatcatgaatgtaattctcactgtggcattggtttggctctacacattccgcggaggagttaaatcgttgatctggaccgattcactgaaaacattctgtctgatagtatctgttgtattatgcatttactacattgccactgatcttaagctcagtttcacagaaatgttttccactgtttcagatagtgctttgtcacacatgttctttttcgataacgtgaatgacaaacgttacttcttcaagcagtttttggccggtgtgtttacaatgatagctatgacaggactcgaccaagacatgatgcagcgtaatctgagttgcaaaaactttaaagactcacaaaagaatatgattaccagtggcatttcccaattttttatcattcttttatttctaatgctgggggtactgctctatacattcacatcacaccaaggtatcacaaatccggcaaagagcgacgaacttttccctatgatcgctacaggagggtattttcctatcatcgtaggcatcttgttcattattggactgatttcatccgcttattctgcggccggatcggccttaacagcactgacaacctcgttcactgtagatatcttgggaatcaaaggaaagacggaagacactgtacgaaaaacacgtaagaaggtacatgtcggcatggccatagtcatgggaattgtcattttcatattcaacttactgaataacaccagtgtcatcgatgctgtttatatccttgccagttatacctatggccccatcctgggattgtttgcttttggcattctcacaaaaagacaagtacgcgatcgatacatcccattagtatctatcctttcacccatcctctgcttcatcttacaaaaaaattcggagacttggtttcacggctatcaattcagttatgagctattgatattcaatgccttgtttacttttataggtctgtgctttttgattaaaaaaacaattaacttaacataataatgaaaccaatccttacctccctgattctgctgcttacagccggcttattcccacaagccgcagcaacccaagagctatctaaggaacttcgttcacagataggagactttctgaatgaaactgcccggaaagaaatctctgtaggcaaaatccatatcgattctgttaatacagaaggaaatgacttgatacttttcgctaacataaactgttcgtatattcccttccgcacagacaatgttagcaaaatttatcaaggtatcaaagcattactccctccagagctagcaaaacgcaagttacagatccggacagaccaccatgccatcgaagagctaattcctctggcacttcgtaatacaagagggagaaaaattccgacattcagctacaaagcagatacacctctgattacccgattatctgttccttatacccccacaaacggattgcaaaaccgtcacattgctctatggcaaagtcacggcttttattacgaatccaaattgactcgctgggaatggcaacgtgcacgaatctttcagactgtagaggacctttatactcagagttatgtacttccatttcttgttccaatgcttgaaaatgccggtgcaacagtacttcttcctcgagaaagagacccacaaactgttgaaatcattgtcgacaacgatagatgcagagacggacattcggtttattcagaattaaacggaagtaaaatgtggaaaaacggggaagaagcaggattcgcccacttaaagagaatgtataaagacttcgaaaatccttttcgtgaaggtacctaccgtcaagtagaaaccaccaaaaaaggaactgtaagcgttgccgaatggatacctgaaattcctcgggcaggacggtatgccgtatacatttcttataaaacagtaaataacagcacggaagatgccctttatactgtctatcaccaaggcggtaaatcacaattcaaggtaaatcaacagatgggtggagggacttggatttacttgggaaactttagcttcggtatcggtaaaacagattgtaaaatcgtccttagtaaccaatcggccaaagaaggacgcttggtaacagctgatgcagtaaagataggcggcggttacggcaatattgcccgaagtatctccgaagaaggagctacggtaaatacaaaaagttcggacacaatgataaccgatacctatcatccgaaagttcaggtgaactatccatacgagattagtggctatcctcgtttctgcgaagcagcccgatactggatgcaatgggccggcataccagacagtgtttattcagacagtcatggtaagaacgactatacagacgattacaagtcacgtggaatttgggtgaattacctcgcaggaggttctgctgccaaccctacagaaaaaggactaaacatcccggtggacatggcttttgctttccattcggatgccggtaccacttatggtgacacaattatcggcacactcggtatctttcatacttcggcttataatggtgcatatgcaaacggtgcctcacgatatgcctcacgtgatttatgcgatctggtacaatcaaatatcgtgaaagatgtccgtaccttgtatgaacccgaatggacacgccggggaatgtggaatcaatcttattacgaagcgcgtgtaccgcgagtaccaacgatgttattagaattattgtcacaccaaaactttgccgacatgcgttacggacttgatcctcgtttccgcttcactgtcagtcgtgccatttacaaaggaattctacaattcatctgctcccaatataaaatggagtacgtagtacaacctttacccgtcgatcacatgagtctccgctttgaagaaggcaaccgaatcaaactttcctggcaaccggtagacgatccgttggaaaccaccgcaaaagccgaccagtatattgtgtatacgcgtatcggggacagcgacttcgataatggtgtgattgtaaattctccaacctatcaaacggttatcccttcaggggtggtttgcagtttcaaagtgaccgccttaaacaaaggaggagaaagctttccatcagaaatcctttctatcggaaaaacttttaacgacaaaggaaccgtattgatcataaacggatttgaccgggtctgtgctcccgcagattttacggcagacgcagatactttagccggattcttagacgagctagaccacggagtaccctacaaaaccgacataagttacatcggtccgatgaaagagtttcgccgacagataccatggatggatgacgacgcctccggatttggtgatagttacggtacacacgaaacaatggtaattgccggtaatacatttgactaccctgctatacacggggaagcgattttgaaagcaggctactcgtttacatcttgcagtgacgaaagtatcgtccatccagactcttctcctaaagagagagaaacacaaatctgtatgaatgactataaatacgtagatcttatattagggaaacaatgccagacaaaaatgggacgtggtggaatccgcccattggaatttaaaacatttagtaaagagatgcagaatgccatcacaaactactgccaggcaggaggtaatttcttcgtatcaggcgcctatgtggcatcggacttatgggataatcgtctggtgaaagccaatgaagaagacaaaaagtttgctatggaggtattgaaatacaaatggcgtgtaggacaggctgcccgcaacggaaaagtgaaaagtgtagcctctccattcccggaaatcacaggaagctacacttattatcaagatctaaacccggaatcatatgtcgtagagtcgccagatgctcttgaaccggctgcacaaggtgcattcactatactgcgatattcggaaaacaatctgagtgccggcatagcttataaagggaattataaaacctgcgtactgggattcccattcgaagcgatacgtacagtcacagaaagagaactattgatgaaagccatactgactttcttcgaacactaaaacagaagattcttaacctcctttttataaggaggttacccacaggatctaaagttatataaacagtaaagttataacaaataaaatcatcatctatgaatagaagactttctatattcgtaatcattttgtttttcctgttacctgttgccgcacgggcacaggtaacaggttctttccgcttcgcacagttgacagacatacatctcaatcccaacaatccgaagccgacagaagacttgaaacgttccgtcgaacaaattaacgccacaccgggagtagactttgtattagtcactggagaccttaccgaagagggtgatcgcacgaccatgttagttgtaaaatctatcctggaccgactgaaagtgaaatattacgttataccgggcaaccacgaaacaaagtggagtgattcaggttgcactgctttcagcgaaatattcgggggagaacgctttaaattcgaacacaaaggattcttgtttttagggtttaattcaggaccactgatgcgtatggcctacgggcatgtagtaccgcaagacatcacatggatgaaacaagaaatggataaagttggaaaagataagcctgtaatcctggtcacccattatcctatgcaggatggggatgtggacaattggtatgatgttaccgatgccgtacgtccatacaatatccgcacttttatcggaggacactatcatcgtaatcgcttcctctcatacgacggtataccaggtattcttacccgctcgaacctacgtgacaaaaacggttcaagcggctatagcatttttgatatcactccggactctatcattacttacgagcaacgcatagatgaaccaatgaaacgctggactgccctatcactcaccaaatcttattataaccgtaccggaaaggcagtgaaatatcccagtttttcggtgaataaagagtatccacaagtaaaaataggctggcaggtgcagaccggtgtcggcatctattgttcacctgccctctggaaaggcagagtttatgtaggtgatgacttgggtttcctaacttgctacaccctgaaggaaggacgtaaattatggagtttccaatcagggaaacgcattgtgggcacacctgccgcaaccgacgggattgtggtttttggctccgctgaccacaacatctacggattggatgctgtaaccggtaaagaacgctggagggttacggttgcccaaccggtattgggagcggtaactattgaaaaaggtatcgcttacataggtggcagtgattccacttttcgcgccattcgtatcaaaaatggtaaagtagtatggacttataccggtatcaaaggttacatcgaaacaaaacctctggtagaaggtgacaaggtcatattcggtgcatgggacaatactctctatgctctcaataaatccaacggcaaggaactctggaagtggaccggcggactgacccgtatgcacttctcccctgctgccgtatggcctgtagcagcacatggaaaagtattcatcaccgacccacaacgtgccatgaccgctatcagactaaaaacaggaaaaacagtttggcgtaccttccagtcaatggttcgagaaacaatcggtctatccgcaaacaaaaatcagatttatagcaaaacgatgaatgacagtgtcgtatgctattccaccatcagcgacactccgaaagagatctgggcatctaatgtaggctttggctacgaacatgctccatccatgcagatggaaaaagacggtatagtattcagtagtaccaaagaaggacttatctttgcattggatgcaagtaccggacaagtattgtggaaacataagatcggcaattcactgattaacaccgtactccccatcagccgccatcaagtactgtttacagccaccagtggtgaaacaggcttacttgagtggaaagaataaaacaaatcaaaacataagcatatatgaaatcaacaatcaattgcttcatcccttacgcgggagcagtacaagcagaaagaacagttcaaggattacaagcaacaggtttggtgaaaaaaatctaccttcttgtcacctcacccagcttcgatccactaccaggatgcgaactactttatgtagacaagcttaccaacagcgcctccatgtacgccattgctacctattcggatgcaagctacacattactttataccaaatatacatcacttgaactgggactatttgcccttgaacggatgattcacattgccgaagattcggctgccggcatggtatacgccgaccattatcaagtgacagaaggtaaacagagtaatgccccggtcatcgattaccagttcggaagtctccgtgacgatttcaacttcggttctgtcctccttttcaaagcctcagccttgaaagaagccgccaaacgaatgaaatccgactatgactttgccggattctacgatctgcgccttaaactttcacagaaatatccattagtacatatcaatgaatacctttattcggaagtagaaaacgacacccgaaaaagtggtgaaaaaatattcgactatgtagatcctaaaaatcgtgaccgacagattgagatggaagaggcatgtaccgaacatctgcaagagataggcggttatctgaagcctgaattccagaaaatagaattcaacaccggcaacttcccatacgaagcttctgtgattattccggtacgcaaccgtattcgtaccatacgcgatgccatccgttctgtactcagccagaaagcagatttcaaattcaacctgatcattatcgacaatcactctaccgacggtaccaccgaagccattgatgaatttaaagacgatgaacgcctgatccacttgattcccgaacgtaatgatttgggtataggcggttgctggaatctgggagttcaccatcctctttgcggtaaatttgctgtccaacttgacagtgacgacgtatatgcccacgacggtactttgcaggtcatggtcaatgcattttacgaacaaaactgtgctatggtagtaggcacctatatgatgacagattttgatatgaacatgatcgctccgggcattattgatcacaaagaatggacaccagaaaacgggcgtaacaatgcactacgcatcaacgggttaggtgctcctcgtgcattctacacaccaatactccgtgaattgaaggtacccaataccagctatggcgaagattacgcattaggactgaatttctcacgccagtatcagatcggacgcgtatacgaagtcgtttatctatgccgccgttgggatgataactcggatgcctctctcgacatcgtaaagatgaatgctcacaacctttacaaggaccgcatacgcacttgggaattacaggcacgaattgcattaaataagaaacaaagatgaacaaagaaatagaaactctactgagcgaacagctctcctcttgggagacggcacaaaacaattacgctgccctgaaacgggtacgaataaaagatgtgaaagtgaacggttgcctgtacagaatacagttcaacccggcacgtattgtttcttctgctgccaaagtagatagtaaatcgattcaagagcgtaaatgcttcttgtgtccggccaatcttccaccgatgcaaaaaggcattcctttcggagaacactaccagatattggtcaacccatttcctatctttcccaagcacttgacagttcccgagctacaacatgttgaacagcgtatcttacatcgctttagtgatatgctcgacctggctacttatgccgaagattatataatcttctacaatggtccccaatgtggtgcatcggctcccgaccatctgcattttcaagcaggtaataaaggttttctacctatcgaacaagagtggaaagagaaaagaggagagaaagtaatcacctgtaaagatgctactctttgggcactaaacgattacccccgtgcaactctgctaattgaggcgggaagtaaagaaacagctatcatgttgttcaataccgtataccaggccatgccctcaacatcgggtgaagatgagcctatgatgaatgtattggtatggaaagaacagaaaaattggattgtctgcatctttccccgcaacaaacaccgtccctcctgctacacagccgaaggggataccaatatcctgatcagccctgcatcagtagacatggggggagtgttcatcactccacaagaaaaggattttgaaaaaattacagcaaatgatattgccgacattctcggtgaagtatgcctgagaccggcagccttccgcatattgatagaacgcataaaacaacaattatgaaagaacccaaagtacaggtcggcattttattcgaacctcaaatcaaattcatactgctgaccccctatcatatcaacggggaagaggtcagcggcaaacaggttgtgacctatgataacggacacatcctctggcaagggcattcatatgacgaactgctgtttgagcccctacacgaaaaaagcgatgcttttgaactgcaggatgtcaccatcggtatcaattttcattgggaacgaaaggaaaaccagcgttttatcggagcactgaaaattattgtagaaaataaaaagttaacgggaatcaacgtaattcatgtggaagattacctgaccagtgtgatctcttctgaaatgagtgcaacggcaagtctggaattactgaaagcacatgctgtgatttcaagaagctggttattagcggggctttccctaccctattccaaagatagagaaaaaagtaataccactcccgagaaagtgccctactctacatcttcttttccaccccttgcacaagaggccgaaaataaaattctaatccgctggtatgaacgtgacgcacatactcacttcgatgtctgtgccgacgatcattgccaacgttaccaaggtattacccgtgcctcaaccgacatggtgaggcaagccatctctgccacccgaggagaggtacttatgtcggaaggaactatttgtgatgcgcgcttctccaaatgttgcggtggtgcttttgaagagtttcagtattgttgggaaaatatcagacatccatacctatccaaacaaagagatagcaaaaaagcaaccgatctacccgatctgtgtaaagaagccgaagccgagcgatggatacgtacttctcccgaagccttctgtaatacaaaagacaagaaagtactgtcacaggtactgaataactatgatcaggaaactaccgacttttatcgttggaaagtagaatatgaacaggaagaactgtccaaactgattctgaaacgttcaggaattgactacggacaaattctcgacttggtaccagtggaacggggaacttccggacgacttgtcagactcaaaataataggtactaaacggaccatgatcattggcaaagaactggaaatacgtcgtaccctctccccatcacacctctatagttctgctttcatcattgataaagtaaacgtcacaaacggaataccggatcgctttatccttactggggccggatggggacacggagtaggactctgtcagataggagcagccgtcatgggcgagcaaggttatacatacgacaccatcttgctgcattattacatcggggcaacgatagataaactttattaaacacacaccattatcatgaaaaacaaaaatatatcaccgtgggcatggattccgactctttactttgcacaaggattaccttatgtagccgtaatgactatctcggtaattatgtacaaaaatctgggtatctccaacacagatatcgctctttatacctcttggctctatttaccatgggttatcaaacctttctggagtccatttgtcgacttattaaaaaccaaacgttggtggatagtcagcatgcagctattggtaggtgccggactggcaggaatcgctttcaccatacctatgtcaaacttcttccaaacgacccttgccattttttggctagtggcattcagctcggctacacatgatattgctgcagacggattctacatgttggcactcaacgtacaggaccaggcactttatgtaggtatccgcagcactttctaccgcattgccacaattgccggccaaggcttgctggtgatgctcgcaggtggacttgaaatatggacaggcagcattaaatatggatggagtatcacgttctttattctggcaggactcttcctcgccttctgtctctatcataaatgtatattgccaaagcccgacagcgataaagcagtagtaggtgaaaatagtgccagtgctattttcagtggattcatagaaaccttcgcttccttcttccgcaaaaaacaagcaggagttgctatccttttcatgctattctaccgttttccggaagcacaattagtgaaacttatcaacccattcctacttgatcccattgacaaaggcggactggggttgacaacagctgaagtcggattggtttacggtactatcggtatcatcgggctgaccttgggaggcattatcggaggtatctgtgcagcaaaaggaggacttcaaaagtggctttggccaatggcatggagcctttcattgacttgtctcacctttgtatatctaggctacttccaaccacaaaattttgtgataatcaacctatgtgtatttatcgagcagttcggttatggcttcgggttcacagcctacatgctttacctcatttactactccgatggtgaacataagacagcacactacgcgatctgcaccgcttttatggcattgggtatgatgctgccgggtatggctgccggttggttgcaggaactgatcggatacgaaaacttctttatctgggtaatggtttgttgtaccgcgacaatagccgtatgcgcctttattaagatagatcccaactatggcaagaaagcagagggtattccccaaaaaacaaaataaacccatttctatttaccggatatttaaaacatactgagaatatgacatatagaagaagtatattaaagttattactcacttttttcgtctttatgacctccactctcctctcacgaggagctgaaccgggagcaagacctccgagaatctgtataaaaaccggaattgaggtcctgaaagagcaaaacttcaaatgccttgaaggaaagcgcgtaggattaattaccaatccgaccggcgttgacaatcatttaatatccaccattgacattctgcacgaagcacccaatgtcaacttggtagccctttatggccccgaacatggtgtacggggtgatgtacacgccggtgataaagtagataacgccaacgattccagtaccggattgcctgtttattcactttacggaaagacacgcaagccgactcccgaaatgctaaaagacatcgatgtgctggtatacgacatacaagatatcggttgccgttcattcacctatatcagtacgatgggagtagcgatggaagctgccgccgaaaataacaaagaatttatcgttctcgatcgtcccaatcccataggcggattaaaaattgaaggaaatgtggtagaagatggatatatatcttttgtcagccaatttaaaattccgtacctttacgggcttacttgtggcgagttggctctgatgctcaatggcgaacagatgttgagtaaaccatgcaacttgcacgttgtgaaaatgaaaggttggaagcgcaagatggactacgttcagacagggctgcaatggattccttcgtctccccatatcccgcatccgcattccgctttcttttatccggtatccgggatactcggtgaactaggttatatgtcaattggtgtaggatacaccattccgttccagatgtttgctgccccttgggtggaagcagagaaactggcagataacctcaatcgcctgcacctgccgggagtaatattccggccgatgcatctcaagcctttctactcagtaggtaaagaagagcatctgcaaggagtacaagtgcatattgtagattttaacaaagcctcactaagcgagatacagttttacgtgatgcaggaagtaaccgccctctatccggatcgtgccgtattcgaccatgccgataaagagcgcttccatatgttcgatctcgtcagtggctctaaagagatacgcgagcgcttcagtcaacgcaaccgttgggaagatgtccgcgattactggtacaaagatgtcgacgactttcgacagctatcgcaaaagtactatttatataaataaaaaactgggctgagtgccgaacaaacagagaaacaatgagaatggaaagaaactacagtgcgttcttgcaagatatcggacgatttatcccgcgagacagattatttactgacgaactccatcgtttggcgtgggggacagatgccggtttctatcgactgattcctcaaatcgtaattcattcaatcaatgatgacgaagtaatagaaatcatctatctagccgaccggtacaatataccggttactttccgtgcagcaggaaccagcctttcgggccaagccattagtgactctgttctgattatagccggaaaaggttgggaaaactacgagctttcacccgaccacgaaaaaatctatctggagcccggcattgtcggacagcgagtaaacgagattttagcaccttacggacgtaaatttgccccggacccggcttctataaaaagtgccatggtgggtggaatcgtgatgaacaatgcttcgggtatgaactgtggaacacatgccaacagtgataaaatgttgctatctgtacatatcatatttcctgacggatattatctcaatacagatagtcaggagtcacgtgagaattttaaagaagattatcccgaattcctccagcgcatctgcgaactccgcgaccagatacgcagtaacgagaagcttagcgcacgcatccgccacaaatattcaatcaagaacgtaacaggcctgaatattctcccgttcctcgtatacgacgatcctttcgacattatcgctcacctgatggtaggttcagaaggtacactggctttccttgccggtgtaaccatgaaaacagagtatgactatccgtataaagccagtgccatgctctacttcagcgatatcaaagaggcatgccgtgcagtggtagctatgaaaagactcgtcaacgcaaatggagaatggattgtaaaaggtgcggaattactcgactggaaatccttggcttcagtcaatgatccgacaggagaagggttgaccgctgtcctgaccgagaccaaagcatgtacacaggaagaactcaatcagaatatcgccatcatcgaggaggcattaaaagcagtcgatacatatattccggtccattttacggatcaacccgaagaatattcaaaatactgggcaattcgggcaggtattttcccatctgtaggtggaacacgcccttcgggaacgacttgcctgatcgaggacgttgcttttcatatcgaggatcttcctgaagcaaccgccgaactgcaacagctcatcgcccgccacggatacgatgatgcctgcatttacggtcatgccctggaaggcaattaccattttatcatcaatcagtcattcagcaatgaggctgaggtaaaacggtacgaagccctgatgaatgatgtaatagatttggtagtaggcaaatatgatggttcactaaaagccgaacacggcacaggaagaaatatggctccatttgtagaatacgaatggggagaagaggcctacgcaataatgaaagaagtaaaacaactcttcgaccccaaaggattatttaatccgggagttatctttaatgatgatcctcaatgccatatcaagcacttcaaacccctctctccattgacaataggacaagatacccaagtaacccgacagatagaccggtgcatcgaatgtgggttctgtgaagtaaactgcctgtcatgcggatttacactctcctcacgacagcgtatcgttattcaaagagagatctcacgcttgaagaaaagcggtgagaatccccaattactggaaacgttatctgagctataccggtattctggtaaccggacttgtgccggcgacggtttatgtgctatgtcttgtccgatgggtatcaataccggtgacctgacccacatcctgcgtcaggctgagtttcctcccggaagtaccggttacagagccggtaagtttgctgccaatcattttgcaggaatcaaaagtactttgcgcccagtattatcacttgccaatgcggcacatagtttactgggtacatcaacaatgacctccattacccggaaaatgcacagtgcgtggggactcccacaatggacaccagccatgcccaaaagctataaaatacggaaaagcgatcagactccggcaatgaataacaaggtagtctactttcccagttgcatcaatcaaacgatggggctggcaaaagattctcctgtagatcaacctttggtaaaacaaatgctctccctgcttcaaaaagccggatacgaggtcatcttccctcctaaaatggaaaaactctgttgcggaaccatttgggaaagcaaaggtatgctggatatcgccgacagtaaatcgaccgaactggaagccgctttatgggaagccagcgaacagggacgttatccggtgctttgtgaccaaagtccttgcttacaccgcatgcgtgccactatccaaaagataaagttatatgaaccggcagaattcatttatactttcttgcgggacaaactggaatttaccccaaccgaccgaccgattgccatacacatcacatgttccatgcgcaaaatgggattggcgaatatactgatctcactcgcaaagctttgctcaacccaagtattcattccggaagaggtcggttgttgtggttttgccggagacaaaggattcacgcagccggaactcaacacttatgctttacgcaagctgcgtccgcaattgacgaaagccggtatcggtatcggttactcaaatagtcgtacctgtgaaatcggtctcgccaccaataccggtatcccctatgtatcgattgcatatctggtcgatcagtgtacccggcctataaaacaagaaaataacttaacacttaaataaaaaacacaatgaatcaaacagtcaacaaacgcctactcgctcttgatgtattgcgaggcatcactatcgcaggtatgattatggtcaacaaccccggcagctggagttatgtatatgctccccttgggcatgcggcatggatcggcttaaccccgaccgatctggtatttcctttctttatgtttatcatgggtatctctacctacatctcattaagaaagtataactttgagttcagccactcggccgctttgaaaatccttaaaagaaccatcgtaatctttgccattggtttgggaatcgcatggttctccatgttttgccgtacctggaattcactctccagtgaagatatttcattcttctcccgtctgtatgagtcgatctggactttcggccacatccgcattctgggtgtcatgcagcgattggcgctttgctacggtgcaacagccatcatcgctttaattatgaagcacaaatatatcccctatctgattgccatcctgttgatcggctatttcatcatcctgatcaacggaaacggattcgaatacaacagcagtaacatcctatcaatagtagaccgtaccgtattgggtgaagcacatatgtacaaggataatggcattgatccggaaggtctgttaagtaccatcccttctatcgcacacgtactgataggtttctgtgtgggtaaactcctgatggaagtaaaagatatccatgaaaagatagagcgtctgttcctcattggcactattctcactttcgccggattcctgcttagctacggttgtcccatcagcaagaagatatggtcacctactttcgctatcgtcacctgtgggttggcatccagtttcctggcattacttgtatggatcatcgatgtgagaggctatacacgctggagccgtttcttcgaatcattcggtgtcaaccccttatttatttatgtgatgggagccgttctctccattctcctgggcagcatactgataccttatgacggaggtagcatcagcctacacggattcgtgtacaacgcaattcttcaacccgtgcttggagactatcccggttctctggcattcgcaatcttgttcgtagggctgaactggtgtatcggatatattctgtataagaaaaaaatatatataaaaatatgatattaatagcagacagtggttctaccaagaccgattggtgtgtggtagaacatggacagttgatccaacagatttttacgaaaggtaccaatcctttctttcagtctgaagaagaaatcagtaatgaaatagcaactgcactgattcctcagttaaagacaaacaagttcgaggctgttcatttttacggagccggttgtgctttccccgacaaaatagagacaatgcgcaaagccatagcctcgcatctgcaagtcagtggagaaatcgaggtttgtacggatatgctcgctgctgccagaagtttgtgcggtcatcaaccgggtattgcctgtatcatgggtacaggatcgaattcatgttattacgatggtaaaaacattgtcaccaatgtatctcctttaggatttatactgggtgatgaaggcagtggtgcggtattgggcaaactgctggtaggcgacatccttaaaaaccagatgactccgggacttaaagaaaaatttctggaacagttcaatctgacccccgccgaaatcatcgaccgggtgtatcgtaaaccattccctaaccgtttccttgcaagtttctccccatttttagttcaacaccttgacgaaccggtcatacgtgaattggtccttaacagcttcaagaaattcctgaagcgcaacgtgatgcaatacgattaccagcacgccccggttcatttcatcggttctgtagcattctattacagagagttactttccgaagcatgtaaaataatgggagtacacttaggaaccattatccaaagtccgatggaaggattgattaagtttcacgagtaaaaatatgaataaagaacaaaaacatgaatagtaatatagaaaaatcagataaaccctccttcatcaaaatctctgagcagccctcactttacgacgatcttgaaaagaagtcggtccgcgaaatactggaagacatcaataaggaagaccagaaagtagctattgccgtacagaaagcaattcctcaaatagagaaactagtcacacaaatagttccccgaatgaaacaggggggacgcattttctatatgggagccggcaccagcggacgcctcggagtactcgacgcttcagaaatcccacctaccttcggtatgccccccacattaattattggcctgatagcaggcggtgatactgctttacgcaatccggtagaaaacgctgaagataatactacccggggctgggaagaactgacagaacataacatcaatgacaaagatacggttatcggtattgcagcctcaggcaccaccccttacgtaatcggagctatgcatgcagcccgcgagcatggtatcctgaccggctgcatcaccagtaacccgaactctccaatggcagcagaggccgatatccccatcgaaatgatcgtgggtcccgaatatgtaacgggtagttcacgtatgaaatcgggaacgggacaaaagatgatcctgaatatgatcacaacctcggtaatgattcaattaggacgcgtgaaaggtaacaaaatggtcaacatgcaactcagcaaccggaagctcgtagaccgtggtactcgtatgattattgaagaactcggacttgaatatgataaagcaaaagccttgttgctgatgcacggttccgtgaaaaaagcaatagatgcttataaagccggataaccgaaccactctaacccacaataccattgagcatggaaaacaaaatcaacttttctcctccctcaacaagagaggggaaaggtgtgaggtttttactcactaccttttcaatattgctttgtagcctgcaagctgtggcacaatctctgccacgtgtagctcccgaacaagtgggcatggactctcatcgcctgttacatgccgatgaagctattcaccgggcaatcgatcacaaagaaataccgggagccgtactcgctgtcatccgtcatggcaaaatggcttatctcaaggcttatggcaacaaacgaatctatcccaatgtagagccgatggaaataaacactgttttcgacatggcttcctgcagtaaatctatgtcaacagctgtttcggttatgattctggttgaacgaggacaacttcgtttgctcgatcgtgtcagcttttacctccccgacttccagaaatggcggggagaaaacggggagaagaaggatattcgtatcatagaccttatgacacatacttcaggtctccctccttatgcaccggtatccgaactgcaggaaaaatatggttctcccaaccccaaaggactgatggagtatatttccacttgcaaacgtgaatttaaacctcagacgaaatttcagtatagttgccttaattacatcactttgcaacatatcatcgaaaccattaccgggcaaagcttgcgagactttgcaaaagaaaatatcttcgatatactgggaatgcaatacacggattatctgcctaccatacaacagcaggacggaaagtggatcaatacggtggcctgtccctggatggaccggattgcacctaccgaaaaacaaaaagacggaagcgtactctgcgggcaagtacacgatccattggcacgtatcctgaacggagggatctccggcaatgcaggtatcttctctaatgcaaatgacattggcatcctcgcagccgctcttctcaacggaggcgaatacaatggtcaccgcatcctcagcccgctgggagtaaaaaccatgtgtacagttccccgtgagctaaccgcatttggccgtactccggggtgggatattttctctccctatgcctcaaacaagggtgatcttttcagtccgaatacctttggccatacaggatatacaggaacttccatcatcatcgatccggacaacgacacggccgtcattctgctggttaacgctgttcatccggaagaccggcatagcatagtccgtctccgttcgttggtagccaatgcagtagccgcctctatctgtcctcccgcacaggtatatacagatcattattacaaacgcttcctgcaatttgaaacagaaacacccatcagccccaaagatattgtgatggtgggcaacagtctcacggaaaatggtgggaattggagcaagcgcctaaataaaaaaaacataagaaatcgggggatcatcggtgacgaagcattgggaatctgtcaacgtctttttcagatcttaccggggactcctcaaaaacttttcctaatggccggaatcaacgatgtgtcacacgacctgagcaccgatagtgtagtcactttgataaccaaagtcattgagaaaatccaaaccgaatcaccacgcaccaaactctatatacagagtcttctgcctatcaacgaatcgttcggacgatataaaacgatgaccgggaaaactgacctgatacccgaaattaaccgcaaacttgaagcacttgccaaagaaaagaaaataccttttatccacctctttccattatttacggagaaaaacagcaacgtgatgcgaaaagaactgactacggacggattacacctgacagaagaggggtatagaatctggagtaaagcactgaaacggtatctgtagcagataccgtttcagatatattctttgagtgccgccatatcttccaacgtcactactttcttattgatcgaaatcagcccctctttcatcatcttatttatctccttcgagagtgccggacgcgtcactcccagatattctgccaattgaacctgattgtgctccagcaaggctgtatccggagaaatcttatgctccataaaataatagaccaaacggctgcgcagcatcttataagacaggatgcgcagacgggtaaccgtacatttgttgcaattacccgtcacacacaagaagcgatgcaacaaatcgggtacagaactaatcaatttaaaaacggaagtacgggtagccatcaacaatacagaatcttcactggcagtaaacgtagcaggtaaaagattcttatcaccaaacaaatgaggagtggcaaaagcacggggagcacgaatatcttctacttttaccaggtttcccgccacatcgacaatattaacctccagttcccctttcagtagcacatataaatgattgcaataggtatcctgcttcaatacgatctcttttctggcaacctcgtacaccgaaagttccagctcttgtggcagccgacgttgcaaactgttatccatatccttaaacaaagatatctgccacaaaatcttttgatattcgtctgtaaactctacttttaccacgatgcttgtcttttgagcaaagatagcattttctcccgtaccaatcttaccacttagtaaataaaatgcgtggattgatattcagtgtcaaccagccccagtcctgccaacttttatggttgcctccctttactatatccatatacttagttccaagcatagtagaataaccggcagtcagttttacgtctttcatcaaagtataatctacctgcatatccaattccgaccccaggcagcgtccttccttaccatctgtagccataacgtcatatgtagtagagaagtgatgataattcaacgagaaactcaatttcttagtcggtttaaagtctacgctcaaaatcttatcccacaaccccttattgtaagccgatgcatagaaatagtccatacctccgtaaaatttatgatgtgttccatataacgggtcaaaagtgctcacttttttactatcgggatcgccgctaagatagtccgtacccagacttacgctccacttcggatcaattttataaccggctttcaagctaaacatataagcagatactttcttgtcagccttattctttccgaactgataataagcgctgccattgaacagccacgctccgggcgtgtatacccaataagtgcccattgtctgcatattagctgttttaccatttccctccgtacccgtttcaaatccggtattcataaaaagcagcgaaacagtgaaatctttagcccaatgaccgttataccaaaccgtttgcatcgttttataaggttgcgctccggaagcataataagtgcctccgtatgaacggttttcatcattctgattgaaagccaatatcaaatgcaacttatgcagtttactttcatatcccaattttaatgcatcgtgaaatcgcccggccacattccagtccagtccgccaagcagacgctcatcatcatacgacaacggttgccttcccaactgcgcaaataatccttttgagaagtcaaggcgagcccacgcttcatgcaaaataaaccttccattcttatcaatctgaggatcctgcccccacactcctacgtgctgtgcagaaagtctcatctgtaacctgtcacgctgataccccaaagaaagccgggcacgctcgttaacaaagaaagtgggttcttctccttccggacgaggattcaatactccattgcggtattcaccacgggtacgtatctgtgcatcaattgtaaacagattctctttctgttgctgtgcaaagacagacagtggggctaaaagcacaactgtccaaaatagatttgtgattctcataactcggttctaaattagtagttaacgatttatcaattcagattatacgtatgtacgctggtcccctgtgccgatggcagataattaatgccataccagcacatctgcagtaatacgaagcaaatgagaagtccgacaagcgccgtacgcactttttgcctccggttcatccgaaaatgtatatagcaaaggtaaccgagccacgtagcagccgcccacgtttctttgggatcccaactccaataatgcccccaagcttcttttgcccacaatgcaccaaacaacattcccagcgtcataaatgccagtcccacattgaccagattgtcacacagttccatctcacgttcttccggagttttctttttgatccaaagcagataaacagccatgacagccgccgctcccaacatagcgtaagcaaacatataaacaataacatgcggtgcaaaccaaggactctgcagagcaggcattaaagttttattgtgtatctcaggcttaaacagattgatacagacgaacaccagcgaaagaataaaactgaaactcaaaatccatttatatcgccagcggctatacgttatgatacctgccaaaggtaaaaagaaagagtaccacaaacgggtttcacccatcgtacgcatcggaggccgttccagagagatccacatcccgagaatgaaggcaaaaaagacagccaatcccgctaatgtagccgtatagaccatccattgccgctttcctctccaggcggcaaccgcaccgattccccagcataaaagtgctacaatggcaaaaatcacaaattgatcccaactcatgtgttgtcctcctttcttttctgtgacaaggcaaacaggcagacagctcccgctatcatcatccagataccggtataaacgaccggcaaccatggatcacgaaccagttcgaatacgctgatatcactccaacgccctttcgactcgtcataactcaattgatatattttccacccttccaactcaaaaggcttattcacctcaatcgtagccgaatcacggcatcccgattccgtataaaccttgacttcggatgcaaaacgacggggttcacgttccggcatcaccagactggtctgatcgtcaagccggatagctttataaggaaacataaaactcccgcaactcacccatccttcacgctgctgtcctgtcttattattcacagctttcagataaacagcataagtagcccccattgaatgaaattctacaaaattcaacgtatcctgagtcgctacactggcagccagaggtattttcttctcgataccaatttcccaatcaagcaatcgtccggtatgaaaattttcttcaatcaacaggttttccggtttctttgacggtaatgcctcacctgtttcattatttatcagcatcaacttcggggggtattcatcaatcgtaaagtcctggagttctattgccagaggtaactcccgcattttctggttctcgtccaacgcgcgccattctgcctgtcctgtttttgtagtcatccgcaaacgctccatatcggcattgcccaagatagcaccggtcagtgcaaggaacagtcccaagtgattcaatacaaaaggaaaatcacaccagcggaaatggtgtatcctccgaattgtggtcagtcccaacaaagtgatcatccaaaggaacaacagcacaaacgaacatgccgacaacatctgcgaaaaccccagccagctctcagcaccaaacagaggtacatcggacttcacttggcgaatcagccccatcactacagtcagcatcgcgactgataccatagatgaaacggcagcctggcagcttcccatccaccggatgaaataactcttttgcgaaaaggcgtagatcagtaacaagataacaagatacaatactcccacgcacacattcatagggtatgaaagaatggaaagctcacattttcctatcgttatttgcaggaaagtgcctgtaagaaagagcccgccacagatagcgaacccttctttatatccccaaggtttctgccacatagtctacagtttagccagacgaccgttggccctcgctttctccaaccactcaggtactattgttttcaggaatttgtctttcgccttacgctccttctccatatccagaccgatgtattcctgtgctttttcctttgtcgaaatatcaggcatcggaacgtcagccgtgtagccgtgctgagccagtactttcgaaatagccaaccgggcctgcaaagccttgtcaagcccatgccccagaatacgttgtatctcttgcggagcatggaatgcgcctccatgcgaagctactccgaaatcccatctccactgagcctggcgaatcaactttaatgcctctgccatttggacatctgtcgcacccttgtcccatgcaaatttagcctcaatatgtgccttagccaattcctgctccaaacggccacgaatttcgttcgctttacgctggcgatcatatacattatttcttaaagtctcttcactctccctatgacacacctggcaagtccggtcgatcatagccaacggactttgaatgtggtgatcgctgaacttcatgcctccctcacttttgtagggcatatgacaatcggcacacgatactccgcgttgggcatgaatccccatctgagaaatttcataatccggatgctgcgctttcagtatacgggctttgctcaacgcatgtgtataatcagcgaagtcggcctcatcatagtaggcttccatatcttctaccgagaatcccttatcccaagggaaagtcagatatttaccatcccccttaaaatagtactctacatgacattgcgcacataccagcgaacgcatctcctgtggagtcgctttgtctatatcttttccctggcgggcaaaagcctcccgtaaagccggacggctgatatgcaatttcatatttgtcggttcatgacagtctgcacaacctatcggattgacaatctcactgccgaaagctccccacttgttgttataaaacgagtccactccaatcgcctccatcatgcgaggcacatccggactcttacaagtccagcaggtagaaggctgcggaccacttttatcatccatcggcgcaccggtacggagtgaatgagtaatgtcctcaatggcatgcatgtgcccccgtggagtcgagtaatcctttgaaaatgcatatccggcccatagcaccaccatctcagggcgctgttcaagcacatctaccgcttcattgccattaaactcgcttttgaaatcggtttttgccgtttctttccacgtctcgtactgccggggataattttctccaaacacttcgttccgggcttctattccggtaatctccacccgtttgttattgaaaacacttaccgtttccgccctgcgctccatcagtgaagagactacaagcccgagtacaaaaacgactgccatcgctccgcagaacaacagccatccctgccatgatttcagtttcttttccataatttgttatcttgattttttatttattctatcatctttctcaaccactccggtgtgggagaatccggataaggtactaatgcgtcaggagtggaggcagcactgttgcttccgccatgcggtacgtcccgatgacagtcccaacaagctttcccttcacctacctgagacatcatataatctattcgtcccgtatttacaaattccgtattcagttgtgtatggcaacgaatgcaattgttcataatcacctccgcactctctttattggcccgaagcacatccttctcgccccgtgtcagaaatacagcaacgtgacgcatgccatccattcccttgaacacccatttcttcacaggattttcgtggggaacatgacagtcattgcacgtagcattcctgctatgcgaactatggaaccaggttgcataataaggtcccatgatgtgacagttgacacaggccgaaggatcatcagccagataagtatgtgcccggagcatataaagaaaaagagctcctccacctacaatcacacctgttataatgatcgcaagtactctccacttacgcgaagggagtaaccattggatatattcttttaccttcatagtatgtattatgctatgtatttatgcaaagaaaaggattttcatttataaaagatgtaatccagattacatttgcgaaagaaaaataacccatgctaaaaaaacaaaagataaataaaggagagataaggtaggggcttcttaataatcctgacagggctgatttattttcttacacttaccggatattactttaataacaagtttcaagacgtgggtacgatgaaaagacttttctatatacttcaaccccacctttttatcttctgaagaatatttatcaagcagaagttccaatgcctttcgcttctcagtttcttctaactgacaaatcatagtcccgttaatcacaatactttcatactcggtactaaattgattggaaacaacgcgcgtgcgtcctaccacgcaaaacgatgcctgattacagttttgaagtatacaaagcttatgcccttcgggagcacaatgaaaatagatagactgttgtttatcccatacataattaatgggaatgccataaacaccttcttcagttgaagaaatagataacactccgtattctccattttcaagtaaactcattgcttcgtcttccgataaaaggcggtctttccgtcggattaaatcgttgatatattccattctatcaaaattttaaaagtaatatcaattattatttttacaaaatttgttacctttaccttccgaataagcaaaaatataaagatgagacaatatttactaaatataatactgttatttttaggattcactatcatttattcttgttcacggcatcagcaaataaacagaaccatctttctagcagattccattatggaatatcaacccgatagtgcgtttaaattattaaaaacaataaatcaaacagatttatctgtttcagaaaacgcaaaatacgcattattattagcacaagcacaggataaagccggccatcaattaatcaacgattcattaattttgattgctataaatcattatgatcacttatcaaaagataacaataaagcaaaagcatacttttatttaggacgattttatcaaaacaataatgattatgcaaaagccattaactcttatctcattgcagaaaaagcaacatcagatcatgacacattattaactttgatatacgataatttgggtacatgctataaaaaccaagatttttatgacaaagccttagaagtatataaagacgcatactacatttataaacaatacaatagcaagaatatcctatacccacttcgaggaatggcaagcatatatgctattcaagaacagtttgagaaagctcttaaatattaccaaacagctctcaccattgcatcaagtaccaatgactctacatggcagtctatcttattttgtgatatttcccggatttatgacaataaaaacctctatgaagcggcatatagttatatatatagtacgctctattcaatatgctccacgcagtagcgatctatctgctatgtatttttggaaaggagaaatattacacaatctgaatcaattggattctgctttttattatatcaatttagctaaaaaaagttcagacttaaatacacaggcatcggcataccaagctctatatgaaataaaaaaagaacaaggagaattaaatgatgcaattctatacaatgacacgtctctcattctatatgattctatacaagatttaaaccatagtgcggaaatcagtcacatactaaagcaacatgcgacagagacattacaacaggccgaagttataaaacggcaaaagcatacagcttttcttattgtaactacattattactcattgcgtgtatcacatttatctttctttataaagataataaaagaaaaaaagtatacattaaaatacaatgtgaattaagaaataaccaaatagaaaaagatgaattaaaagagaaaatcaaaacgctaattgatagtaatacatatattgcggaaaggaataaagaattaaaaaaagaagaactaaagcagcaacaagttgaattatggaaaagaacacttcaaatatgtacacgactatttcatacttccacatcatataaaaaattacatgcaatagaaacagccaaatttaaaaaagaaagagaagaaaaacagaaagaaattaattccatacagaaagagataaacgaagttttcatcgaagcaattcaggagttacgagaacaatatccaaaactaacacaagaagacctcttctattgcattctacaatatttgcgtctatctacctctacaatcaaattttgtatgagagttgaaagtaaccaagcactcacccaaagaaagtatcgcataaaaaaacaaatcagtccccaaaccttttctataatctttaatgaaagctctccttcagaaggagttttatgaacttttatcacacggctcctcctccttgttatatcaaaattcataaacaactgattatcagcaatcataaatccttcaattgttatctcacatcagtatcatcacttgggtattggactatctttgcagaaacataaatttatttatcatgaaaaagttaacctgtctaattaccctattcttattcattagtgttggctatataaatgcagaaacaatggcctcaagaaagaaaattaaaatgaaagtagaaactcagcaccatcaacgttctctgcccccaccttgtcccgcagaagcttttatctgcggaaatacggttgatcttattttcagagaaacaaataaaactgcagttgtcacaattatgaatttagatacgggagaagccattcattacaatgtttcaacaaacgattgtagtatctctatcgatttaggcaacaatcaaagtgaatcaaactataatattgaattaatactggatggcaaagcatataccggagaatttacaacaaatgaaatctgagattttatttttaaataataacaagctctttctctcaaagagcataaatctttttatatatgaaaaccatatctaaattatttttgctattgtcaataattctactttcatcatgtgatgaaacagaattggatcaaacggtgactaatcaagtaaatccgcaaaaagaagaagattccagaattgtattcaatagtgcaaaagagttttataacacccttgatacactatcttacatgacttatgaagaacaaacagaatggattcgtgcctcgggtattaaatatccgctatataaagaccttgaattttgcgaagatgaaatcatgacagaaatgcctagagcatttcaagcactattcaaccataaaatggaaatgcaaataaatgataccgtaattgcatttgaaaaaggaaatatgtacgtaaaatcaattaaggagaaaattctacccgttcctgttctatatgggcaagtaggagttaaccaagaggaatcagaagtaacaacaagaactgtatatgaaacaaaatatggaaagattggaacatcatatcaatatgaattcaagattccagaaggtaaatccaaatacaaatatgtacatgaacttaaatccgttattattaaagagaacctcccaccatataaatcatggagtaatttatttttagttttaaaattagaatggaaaggtaaaaagaaatggaaagttgcagaaaaagaagaaagaaatatctcaatagatttaaatgtgtgtaaacgcaatttagcaaaagtaaagtataaccaagaaatccggatagatgttcaaaatatggattctaaatcacactctataaatatagaaggttatatcatccatgaagtagttggaataccaagtaccaaaatgtttaatggatggagttatccattagtggagtggcaaccccgataaaatcaactatttagtaaagtaaaaccactgcatattaaaccttaacatacaaaatcctccctgattattcttccattgcattaataatcagggagattctattacatattcttattcatccaatatttcttccaattgcatatcaaagatcagcgttgaatagcctggaatatcgtcagttccacttgctccgtaagccaactcccacggaatataaacaagccatctttctccgacacgcatacgttgcaatatctcagcccaaccggagacaccaccaaccgtaataaatgtttggataacaaatttagtaggtgaatcaaaaggccccggatcagctcccgtaaagttctggtcaaatgtttcgccaaaaataaaacttccacgataaaacacattcacagaatctgtataaaggggaatagcacctgtatcattcgagatcttctttttataataaatccgtaacttcggatttatctccggctcaaaagctttcagttccggatcggttttttcatcaaataccgtcttcaaagaatcgatatatccttcgttacgtgcccgccagttatcaaacttcgtagcttctttcgtctcctcacaggaaacaaagataagagctagtaacagcaacggcaataaatagatttttttgttcattcgctaaagggttattggattgttttcaacaacgaggtaatacttacccggtcggcaatgatattattcaattcagagattgccacacgttcctgctccatagtgtcgcggttacgtagtgtcacacagttgtcttccaatgtctgatggtcaacagtcacacagtacggagtaccgatggcgtcctgacgacggtaacgtttaccgatactgtctttttcatcatactggcaatggaagtggaacttaagattgtcaatgatctcacgagccttttcaggcagtccgtctttctttaccaacggcattacagccagtttcaccggtgccaatgcagcaggcaatttcaatacaacgcggctttcaccattttccagttgctcttcgcaataagcagccgacataatactgaggaacatacggtcaacaccgatcgacgtttcgattacgtacggagtatacgattcgttcagttccggatcgaaatacttaatgctctttcccgagaatttttcgtgctgagaaaggtcaaaattcgtacgggagtgaataccttctacttctttgaaaccaaatggcatcaagaactcaatgtcggtagcggcgtttgcatagtgagccagtttatcgtgatcgtggaaacgataatgatcgtcaccaaagcccagtgccttgtgccacttcaaacgaatttctttccatttcttgaaatattccaattcgctgcccggacgaacaaagaactgcatctccatctgttcgaactcacgcatacggaagatgaactgacgagctacaatctcgttacggaaagctttaccgatctgagcgataccgaaaggaactttcatgcggccggtcttctgtacgttcagataattgacaaagataccctgtgccgtctccggacgaagatagattttcatcgaaccatcggcagtagaacccatatcggtagagaacatcagattgaactgacgaacttctgtccagttcttagtaccggaaatcgggcaagctatttcttcgtcaacaatgatctgacggagctcttccagattgttatcgttcagcgcttttgcgaaacgttcgtgcaatgcatcacgctttgcctgatgctcaagaacacgcccattggtgctgcggaactgagcttcgtcaaaagcttcaccaaatcttttggcagctttggccacctctttattaatcttatcatcgtacttagccaattgatcttcaatcagcacatcggcacggtagcgttttttagagtctttattatcaatcaacggatcgttaaatgcatccacatgtccggaagccttccagatggtagggtgcataaagattgcagagtcaatgccgacaatgttttcgtgcagcaacaccatgctgtcccaccagtattttttaatattgtttttcagttcaacacccatctgtccgtagtcatacaccgcgcccagtccgtcgtagatatcgcttgaggggaacacaaaaccgtattctttgcaatgtgatactaacttcttaaaaacatcttcttgtgccatcgtcttatttacaatttaatcatttacaatttacatttcgtacatctgcctgtaagccagactcagaaataatctgcaaagtaaatgatttttttcaattaaattcgtatttttgcctgcacatcacccaataatggtgtaaaaaagataatttgttgttaaaaccagagggaaatttgattttatgagcgaagagaacaacgagattacggaaggacattctgactataagccggcggactcacataacgaaagcattaaacatcaacttacaggaatgtaccagaattggtttctggactatgcttcatacgttatcctcgagcgagccgtgccccacatcaatgacggactgaaaccggtgcaacgccgcatcctgcactccatgaaacgcatggacgacgggcggtacaataaggtggccaacatcgtaggacataccatgcagtttcaccctcatggcgatgcatccatcggtgacgcattggtacagctggggcagaaagacctgttggttgactgccagggaaactggggtaatatccttaccggtgacggtgctgctgctcctcgttatattgaagcacgcttgtcgaagtttgcactcgatgtagtattcaaccccaaaaccaccgaatggaagttgtcgtacgacggacgcaacaaggagcctattaccttaccggtaaagttcccgcttttgctggcgcaaggtgtagagggtatcgccgtaggactttcatccaagatactgccacacaacttcaacgaactgtgcgacgcatccatcagctatctgcgtaacgaggaattcaaactatatcccgacttccagaccggaggttctatcgacgtatcgaaatacaacgacggcgaacgcggtggagcagtcaagatacggtctaagatcaataaagtagacaacaagacgctggctatcaccgaaatcccttatggcagaaccacgacttcggtcatcgactccatcctgaaagctgtcgataaaggaaagataaaaatacgcaaggtagacgacaatacggcggccaacgtcgagattctggtccacctggcaccgggcacctcgtccgataagacaatcgatgctctttatgcatttacggactgcgaggtgagcatctcgcccaactgctgcgtcattgacgaccagaaaccgcacttcctcaccatcagccatgtgttgagaaaatcggccgacaatacattgtccctgctccgccaggaactggaaatcaagaaagacgaactacaggaaaacctgcatttcgcctcacttgaaaagatattcatcgaagaacgcatttataaagataaagagttcgaacaatccaaagacatggatgccgcctgtgaacatatcgaccgacggttgactcctttctattcacaattcatacgcgaagtgacaaaggacgatatcctccgcctgatggagatcaagatggggcgtatcctgaagttcaactccgacaaagctgaagaggcgattgcccgcatgaacgaagatattgccgagatcaacaaccacttggccaatatcgtggaatataccatccaatggtaccggatgctgaaagagaaatatggcaaaaacttccctcgtcgcacagagttacgcaacttcgacaccatcgaagccgccaaggtagtggaagccaacgaaaagctctatatcaaccgtgaagaaggtttcatcggaacgtccttaaagaaggacgaattcgtggcatgctgttcggatatcgacgatgtgattatattctatcgcgacggacgttacatggtgactccggtagccgacaagaagtttgtgggcaaaaacgtgatttacgtcaatgtctttaagaagaatgacaaacgtaccatctacaacgtagcctaccgtgacggcgcagagggaacacattatatcaaacggtttgcagtcacttccatcgtacgtgaccgtgaatacgacgtgactcaaggcaagcccgattcacgcatttcctacttcagcgccaaccccaatggggaagcggaaattatcaaagtcaccttgaaaccgaatccgcgtgtacgacgcatcatcttcgaacgtgactttagtgaagtgaccattcgtagccggcaaagccagggcatcatcctgacacgcctgccggtacacaaaattgttttgaaacaacggggtggttccacactgggcggacgtaaagtatggtttgaccgtgacgtgctccgcctcaactacgacggacgaggcgaatatctgggtgaattccagagcgacgacaacattctggttgtactgaataccggagaattttatacttcgaacttcgacctgagcaatcactacgaagacaatgtaagcatcgtcgagaagttcgatcccaataagatatggacagttgccctttacgatgccgaccagcagaattatccgtacctgaaacgtttctgctttgaagccactacacgcaaacagaattacctgggcgagaacaaacacaatcgcttgatcctgatgacagacgagtattatccaagattggaaatcatcttcggaggccatgacagtttccgtgaccctgttgtcgtcgacgccgaagagttcattgccgtcaaaggttttaaagcgaaagggaaacgcctcacgacttatacggtagaaaccatcaatgaactggagccaacccgcttccccgatccgccacaaaacaacgaagaagatgacaccggggaagagccggaaaatctggacccggacagtgataaaacagaaaacgacatactcgacgaaatgaccggacagatgaaactgttttagcacaagtccaagataaaactgcgtatgaaagtaaaaacaagcatactgctattgctgatgatagcaaccgctctcccctctttcggggggaacggaaatggcaacggcacagactcacttcaggctacccgctatgtgacacgcgccaccatgtatggtgtgggatacaccaatgtattcgacacctacctttctccgcaggaatacaagggaatcgagttccgcatcagccgtgagaccatgcgtatgacaactctgggtgacggcaatgtctcggttcagaacttttttcaggcaaacctggcatacactcacaaccgggtagataacaacaacacctttgccggactggtgaactggaactacggattgcattatcagttccgcattacagacaactttaagttgcttgccggaggaatgggagatttcaacggcggttttgtctacaacttacgtaatacgaacaatccggcctcggcacgcgcctacatcaacctcgacgcttcgggaatggccatctggcataccaagataaaaaattatccgctggctttgcgctatcaggtcaatctgccggtaataggggtcatgttctccccccattacgggcagtcctattatgagatattcacactcggacatgccagtggagtggtccgcttcacctccctgcacaatcagcccgcattgcggcagatgctatcggtcgacttcccgatcagatataccaaaatgcgcctcagctatttgtgcgatcttcagcaatccaaactgaacggaattaagacacacacgtattcgcaagtattcatggtgggatttgtacacgacctgttccgcatccgcaacaagaacggcactcccctgccaccggctgtcagagcctattaacagaaaagcgccatgaagaatccgatcatttatagaatactgcaacagggtttctgcctgattttctgcctggggcttctctcttcctgcattcgggaagaggagtttgtcaataatccacagggaaatttcgagcagttgtggaaaatcatcgacgagcaatactgttttctcgactataaacagatagactgggacgagattcacacccggtatcaaaagcttatcaccccgaatatgggcagcgaaggactatttgaagtattgagcgaaatgctctacgaactacaggacggacatgtcaatctggcctcggctcacaacgtgtcttattacgacgcctggtatcaggactatccccgcaacttccgtgcagacctgctggaagattcctatctgggacgcgccagtacggattatcgcacggcagcaggccttaaatacaagatactgaaagataatatcggctacatacggtacgaaagtttcgccgacccggtcggtaacggtaatctggacgaagtgctctcctatctgtcggtatgtaacggactgattatcgacgtgcgcgacaatggcggcggaaatgcaaccaactccgcccgtatcgcttcccgtttcaccaatgaaaagatattgacgggatacatctcccataagacaggaatcggacacaacgacttctccaagccttatgccatctatctggagcctgccaacggagtacgctggcaaaaaaaggtagtagtgttaaccaatcgccgctctttcagtgcgaccaatgactttgtcaaccacatgcgttgtctgcccaatgtcaccaccatcggagacaaaaccggaggaggttcgggtatgccttttacttccgaactgcccaacggatggagcgtacgtttctctgccagcccccattttgatgcggagatgaatcacatcgagtttggcattgaaccggacatcaaagcagatatgctgcaagaagatgaattaagaggaaaagatacgctgatagaaatggcccgtaaactcctcagtgaataactttattactcataagtttgcaaaatcagagagtaaatatttattaagcgaatgtggtatgtataaccggtagtcgcaccagacttaggatctggttatacgactacataagtatttctactcattatccgatatatctgacggctcagaaagcattaatgcggattttgcaccatattcgggttagcatctatctctgcctgcggaataggtaatgctacccgcggatcagacggactaataactgcagcagctgctacagaaggcaaatgccagccaccggtgcggcttacagacaaaccattacgcatagcatcgaagaaagcatgtccctctcctaccaattccttacgacgttctttcagtatacgctccaggctcaactccgtttctttcacggacttcacaggattggcacgactcactatggcattaaggcaatccaaagaaaactttaggttctctgctccccccaacttaaaggcagcctcggcagcattcaggtaaacttcggagagacggataatacagatgtcgttatcctgcggattatctccggtcttgcccggatacttatttagatatttaggataacccttggaaccttcgggcaatatgtcctcttccggtttctccggcaaacgattcaatgaatgacgcacgtcatccggatcttctcccaacagatcgaggaatgctttggtcagtacaaggttgttccagtcctttacattatcggcataaaccattggagcaccttctccccccgtcccaccatcaggttcagaaagagtgtagtaaaattcaaacagtgactcagaactgaaatcttttccccatacagtagggtattcatcatgtgtgaacaactgatacaatccaccgttattcatcacttccttggccaatgcaagagccttttcattatcattcatataaagatatacccgtgaaagtaatgctttgacactccatacattaagataaccgtttttcttatcagcagagagtgccgagagtttcaatgcacctgtcatatcgtctatcacctgctgataacattcggctaccgtattgcgggcaggctggtgagtaggcaaagtcgttttaatctcgatgggtactcccaaagaagttccgttattcaaggtatagggcatagcaaacagacgggtgagatcgaacaaagccaatccacgtaaagcaagcgcttcagctttgatgcagttgagagcaacagcatcatcagtaaccaccgcaccggactctattctttccagcaggctatttgcctgatgaatgacactataaggctgattccatacacgggtaatattcaaggcatcatctgccgtaacattaaactcataataaggtgatacacgttttccggctcccttgctgacacgcgcttgaacatcttcaccacggcaatcggcataatagagataattgtcgccataataactatgtgaagcagcaatgcgataaatgccgttcaaagctatttgcgcctcctcaagcgtacggatggcttgtggagtagtcacagaagtagatggattcaaattcagccagtcgccggaacaagaagaacccacaagcgacatagcggcaaacatgtatataagtgtacgtttcatatatctgaatattaataatgatgaatgattagaaagttatctcaaccccaaaattgaaggtacgcatgggaggagcctcgcagaacacctcaccattaaccggtacttcaggatcatattgtttccatttggcccatgtcagcagattacttcctgagaagtagacacgtgcattctctatcaatgccttttgtacccatctgccaggaagtgtgaaaccaagtgtcaggttcttgaggcggatgtggtcggtactgtgaatatagcgggatgaattttgtggtccggctccctgttccaatacaaaacggggaacatcagttctatctcccggcttctgccaacggtccaaagcatatataggcaggttgtatgatttttctttactaccgtcagtttctatcagagtacctgtcttgtcaaaagaatatcctcccagcgaataggtaaaggtaagtcccagatcaaaccacttataagaaaggatgttagtaaaccctcccgatatcttaggatcagcagatttatacggaatagcttgcgctttagaagcatcatcagtcatctccctattataattccccttttcatcttgcgtattgagataataaagccctttcccggtcgacgggtctactccggcaaactctttcacataaaaactattgtaaggaagtcctattttatgaataaaccaagagccctcgacagattgctttatatctccgtccagtgccacgattttattacggttatgtgtcaagttcaacaccgatgtccagttgaagtcaggaccggcaaaattaattgtacgcagttcgaactccacccctttgttgttaagctgaccgatatttgcaagataattcagaaaaccggtagtggaactgatagggcgattataaagcaagtcctttgtatcgcggttgtagtattcgagattcacaaagatacggtcaataaaagtcaggctaagcccaatattcagattatagttcttttcccatttcagtttgggattggcttgagcagactcgtatgaacctgctgcccccatatagttctgcccataactgtataaccccatatatccgtaaaaagctcccggctgattaccattgacaccataagaagcacggattttcacatcgttcaataccggcttcacagcctccataaaaggttcactactcagatgccacataccggaaacagaccaaaagtctccccaccggctttccggagcaaggcgtgaactgccatcgcggcgataactacctgcaatgtaataacgattatcgtaatcatagttcaaacgggacagataagaaatcattctgtatgcctgtgtagaagaaacaaagcttttcagcacagcggcattatccggttcaagcaacacatccgaagggagcttagccttctctcccatagctttatcactctgatagctttccaattcataggcagccaaaatgtcaaggtgatgtttagcggcaaatgtatgggtataattgagtgaagtagatgacaataacttaccatattcggtaaatccctttgaggtctgagcatcacttccgctcttggggcctgccccgctaagcggattcaaatagcgggaatctttctgtacagtatagtcatagctcagagtctctttcagtttcaatcctttgatgatatctaccgaagcataaccggtggaaaacatacgggtcatacgactgcggttatagtcagtacggatgtcacgaagcggattcacattggtgcctgcataggaccccacatagttgcccgaagcgtcgcgcacaggcatagaaggtgtagcagatacagcaacacaaagaaagggattgatattggaaccgcgctcctcgttcatctcctggcttatctgggtgaacatcatgttacctcctacttcgacacggctacctattttatgtgtcatgttcaggcgggcagagtaacggtccagattagaattctcgaccaaaccttcctgacggttaaagccgagagaagcataaaaagtagttcgctcgttgcctccggaagcagtcacctcgtagttttgattatgagcggttcggatcagttctttcctccagtcagtatatcccagttccggtattcctgcatatgtatcaatattggcatttgcatatgcttcgggagattggagccccttgtctactgcagagttgtaaagaccttcgtaaatcatttcacggcgttgttcaccgttcaatgtgggacggaagttgacagctgcattagaaaaacctccgctggcactcaaagtgactttagtccgtcctaccgctcctttcttggtagtgatcagaatcactccattcgcggcacgcgagccgtaaagagaagcggcggcggcatcctttatcaccgtaatattctcgatatcggcaggattaagggtactcattacatttgttttggcattattcatataggcggcatcagctcccgtaccggctcccatactgccggaagtgaccggtataccatcaataacaaaaagcggttcattggatgcattgaatgaccccataccacggatacggatgctctggttagctcccggctgaccggaaccggaagttatgtttacccccgttgtcataccttgcaacttctgttctacagaaagtaccggtacgtttttcagcatgtcggcccgtaaggtgttagctgatccggtaaaggatgactttgaaaaatttccgtatccggtcaccactacttcatccagattaagtgattcgggttgcaacaccacattcaagactccattcttcggcactttgacctcagacgatttcattcctatataggatatgacaaggattttatctgatggttctattttcagagtgtaacggccatccatatccgttaccactccccttcccggtaccccttttacggcaaccgtagctccgataagcggctgtttatcctccgatgaagtcactaaaccttttatttccaactgttgtgcttgcacatgtataccacacagacacaacaatacaatcaatatcgctttcaaatttctcattggctaatccttttaaatctacaaatacctatttgcatttatactccaataattatacctcaaaaaatactggtgaagtaagcaaatcataaacatcagtatataaaagaattaagtcttcaagaaagagccggaataaaaagacggattgtagaattgttccacatttatgaggagcagttctacaacccgctttacaaaacatcgatatcacaaaacaggaaccaagcattaaggtagatatgctgcaagaagacaaaatgagaggaaaaaatatattgatagagatcgcccgcagattcctcagtgaataactttattgcctataaatttgtaaaatcggaaaaagtatctatctttgcagcgcaaaactccaaacgagtgagcatttagtgagcggatgtggcgtaattggtagccgcgccagacttaggatctggtgtctcgcgacgtgtaggttcgagtcctatcatccgcacaaactttcaatgttttacagacagaaacccgctaaaactgtagttttagcgggttttttatctgtaacagataagctatccgaaaaatacaaacaaaaaatagacaccagctaaataagatagctcaggtttcggaagtgagtttacgccgtctgaaccggtatcttcatccttatacctttcttcaattaacattgttaacgccttttgcagttgtcaggttcttgtgcgcaaataacaagtcttttgcatttaaagaacttcttattcacatccaaagaacaagctttaactctatgttaaaacaaagcttttgaggacagaaatcttacttcttaaagatattgattttcagacgatttagtctaagattcgcttcctcacctcacggatggactctgcgggcgaaagccgggatacttccttttttgtcaactataaaagagggcttacacgtccgaaaactgaattagattccatgagtaaaagaaaacttaccaccaaatttgaagaagaaccatttttcgcctttcgatcttccatcttacacccgccgttttgggagcacatcaggaactaattcactgacttacaacagaaagaagttcacttttcaagtaaaaatatcgtttagagcattttgttttcctttaatgtttaaccgaaaatggtatactatgttatatcagcccgggtagcaggactcatcataaaacacttagatacaatccattaaagagtttatgttttaagataccaactgccttgtttcttccagattcttatttgatattgatttgaaaactcactaacctgaccgataatctatcttaaggttaaacccaataacgtcacttagtctgataattgcaaagcaaaaagaaaaccgctgtcctccggggggatagagtgacagcggttcggcaagctaactggttaggtgagcgggatttagattcaaggccaattataaaagagaattgatcatgaaaaattaaagtgctatagtccgtctataatgacaggcgttttgtgataacggctctttttgcacatttggttgattcgggatttatatttaggagtagcataggcataacttggcgtaacttttaaatgtgaatatttcaccttgtgaatttctaaaagaagttcggccacaaagacaatcatttctgaacgttcgaccatgcagggggagcagaaacaaactaaatattcagggtcacgagtggaaagcacataacatagagtcttcttacctcgctggaaaatatattccaaccgataccatccgcttgcgttgattctccgccgatggaaatacaggattttaataataggtttgcccatagcacaaacgtataatcgggcagggaagaatgaacggccctgctgacccgctgaactatcaaactttcaaagccgaaacaaagaaagaaaaatatgctaacccattacaagttagacacgggggcaggagccgtttttatccagaaactgtaggtatataaaattatacacctacagttagtgtaaaacaaaggtgatttctctcctttgtttccgccttacaaaaatttgatagttcaccacaaagatggtgattatttttgaattaccatagcaaacggataaaaaatgtacaatgaaacacttttgacaggaagattgtttgctgaacgctctttgtatagggggaatttaacgagaagagaacggttctacttacccgcttgaactacatcaatttcaatgcgaaacaaagaaagaaaatatgccgacccattacagtatcaggcacgggagcagaaccgtttatctaaagctatcaaatagccgtctttcatcagccgccaagtaaccggcaatgctgacgtttggggaacacacaaagttgcacataatttccggtatcaccagcgcagcccctacacatttttccttttttcgaaaactctcccgagagtacggacggacagccgacctgtccttgtgtgaataaggattataataaatcagtgattatcttggctggcatttccattttagaaaaagcaaaaagttttttgccaagatccttaagtgaagctcctatatgatagacctctaaattatctataattaaaaatcgatcatgtgcgtgctggtaggtacgtatatctattggggggtattggctgttgtgctttgtcaaatctaattctaactgtggagttatttgcttggtatatatgatagaagtcactccgggcaaacgtttactcaatagtaagagcacgctttcatcgacaaagttgtcaatcaatactaaagatgactttgcagactttatcaactgagcggaaaagacataggcatcgaaaatctgtccgttgaaaaagacaccttcaataggaggtaatgaagtccggacgaaaaagtcgactttgtttgttaactcttccagttgccggtcatgggtgtttgctttgttttccaactgctccacgcgctgattgattgcgtagccttttaatagatattctttaagtactcctgttgaccattggcggaactggactcctcgcttggaattcacacgataacctacggaaataatcatatccagattataatattcaagaatgcgggtaacctttctattaccttccattcgaactgttcggaatttccgaacagttgattcagcagataattcatctgagtcatatatatttcttatatgctcactgatattggctttacttgactggaataagttaacaatttgtgcttgtgtcaaccaaacggtttcattctctattcgcacttccagttttatagtattgtctggttggtatagtattatttctccgtgttccatattagtatttgccatatttttcaaaattattttttcgtaatcaagtgattcacggctctgttgccccattacgaaattaatatgggtgtggaatcacacacaaaggtgcacataatttccggtatcaccagcgcagcccctacacattttttccttttttcttaaacatccatcaagacacagacgggcagccggcaatgaatttcggtagaaaataccgtacgacgcaggagcgcaggatattttgtgctgaaatagcgtagcggtcattgatgaatgaacgtctgcgccctatctttgtgcgagaaaagaggaaaaagtacgtctatcgcttgccttcgtcttccgggttgaaagggtagttgaatcataaatctttgtaattgctgaacttttcgtttgtttatatgtaatatatacgttaccattgtcgaatggtaaagaaggttagggaactccttttgcataagtcgtactttatatggagcaatctccaaaagtacaaaacaagattactaaaatcttagaaatcttagaatatatagaatgtatcccgacgaagtatcttaaacacatggagagcacagacggtctgtatgaaatgcgtatcaccttagggagcgatatattttgtgtcttctgttttttcgataagggacgattagtggttttgctttccggttttcagaaaaagacgcagaaaacccctaaaaaagagatagataaggctgtccgattgatagcccaatattatgatgataaaaaaaggaggtaatgatggatataacaacattagatcaatttaaagatgaaatttacggtgtaaaaggtacacccagacgagacaatttggagcgtgagctggaaacactgcgcattggcgttcaaatccgcaatgcccgtcagaagaaagaaatgacgcaggcacaactggccgagcgcattaataaaaagcgtacgtttatctctaaagtagagaatgatggaggtaacttgaccctgaaaaccctgatagatatagttgaaagggggcttggcggtaaactgaatatcgaagtaaaaatttaaacggtttcgcccggatgatagaaatatcacccgggcgaattatttatggccggtccattcaaagagctatatataaaacatacaactcctatcaaaaatctattaaggtattgatagccgccacggaatattactcactcatacggggatatctcggtgttgagatcgttacatccggatagaaactcaatgcggaagccaaaggcgtacaataatctacgaaagcattggcagtccagtcactgggcgctgtaccttgtaaacgattcaggcgtagtctggcatcagcacttgtcgttccctcgacagcgggaaatacctgaccgacatctgttttgatattagccataaaatagagatactgtgcagagctgggcacaccgctgatagtacccccttttccacttgtcgccgcaaaggaagtgttggctagcgtagtcacttcttccggtatcaactggcgttggaaaatactggtataagcattatcgaggacttatcatcacaagcaaacagtgccccaactaacattgtcagtaaaatcgttttttttaatcataactagttttttatgagttgataatagagatttcgccattttggacaccatctatcatgaaaaaattttctagcatcattgtttattttatccagcctagacaattaacaattagataatagatgcaattcgaaaagctctttaattaaagcacataattccatacaattatatagaatccaacaaccatcataaggtaaatatatcatactagaaatttcttctacatttgtcggattccaagtccgatatatgttaaaagtgcagggagtttccatctgttcacatctttttcgacttttatttgtttcattggatacttttgccgtcgatataactatcgagtatctgaaagagagctggcagaaggtgtgttaaatcaaaatagttatacaatggtaaaatttaatgcaatgaagactaaacctttacgacttcttcggcagaagagagcctcctggctgaaaagtgtatttgtcctgacttgcctgctactgagcacatcggtggccatggctcaaacgaagacagtgacaggtactgttacagattcatttaacgagcccctgatcggtgcatctatcctggtaaaaggcacttctaccggggctgttaccgatatggatggcaaatactccatttcggtaacgcccaacgatgtactcgtattctcgtatgtaggatatgaaaagcaggaaatcaaagtggggcagcaaactgtgataaatgtcacgcttaaagacgactcacaaatgcttgccgaaacagtaattatcggttacggtagtgccaagaagcgcgacctgaccggttctatcaccaacatcaagggttcggaaatagccaacaaaccggcaaccaacccgttatcgtccctccaaggaaagatagcaggtgtacagatcgtcaactccggacaagccggtgccgatccggaaatacgtatccgcggtacgaactccatcaatggttacaaacctctgtatgttgtagacggactgttcaacgacaacatcaacttcctgaatccggaagacatcgagtcgatggaagtattgaaagacccttcctcactggccatattcggtgtgcgtggtgccaacggtgtaattatcgtaaccaccaaacgtgccaaagagggacagacgctggtcaacatcaacacctctttcggctggaaaagcgtagtagacaaaatcaaaatggtgaatgcaccccagtttaaggaactctataacgaacaaatggcaaaccagggaaatgccctgttcgacttcagcaactggaatgcgaatacggactggcaagacgagatcttccagacgggattcattacaaacaacaatgtcagcatcacaggtgcttctgaaaaacatagcttctatctcggcgtgggttactctcacgaacagggaaacatcaagcatgaaaaatacagcaaagtgaccatcaatgcaagtaatgattataagattaccaaagacatcaaagtaggcttccaattcaacggagcacgcatgctgccggccgacagcaaaacggttctgaacgctatccgtaccactccggtggctccggtatataacgaagaatacggactatatacttcattgccggaattccagaaagcacagatgaacaatccgatggtagacgtcaatctgcgtgccaacaccacccgcgcggtcaattaccgggcatctggaagcatctatggtgaagtagatttcctgaagcacttcacctttaaggcaatgttctctatggactatgccaccaatgacagccggacttacaaaccgattatcaaggtatatgacgcaaccgtggccgggaacgttgctacgctcggaaacggaaaaacagaagtgagccagaacaagcaaaacgaaaccaaggttcagagcgactatctgttgacttaccaaaacagttttgccgacggtacacataacctgactgccaccgccggcttcacaacctattataattcgctcagcggactggatgcttcccgcggacagggcatcggactggtgattccgaacaatcccgataaatggttcgtcagcatcggcgacctggctaccgccaccaacgggagtacacaatgggagcgcaccaccgtatctatgctggcacgtatcatctacaactataaaggtaaatatctgttcaacggttcgttccgccgcgacggttcttctgctttcgcatataccggcaaccagtggcagaatttctactccataggtgccggatggttgatgaccgaagaagaatttatgaaagatatcacgtggctggacatgttgaaactgaaaggttcgtggggtacactgggaaaccagaatatggataaggcttatccggcagaacctctgttggaaaatgcttttgctgccgtattcggcaaaccggctatcatctatccgggctaccaactggcttatctgcccaacccacgtctccgttgggagaaagtagaagcatgggaaaccggttttgaaaccaatatgttccgtaaccgtttccatttcgaaggagtatactataagaagaataccaaggacctgctcgccaccgtaccgggtctgtcgggaaccgtaccgggcatcggcaatcttggagagattgagaacaaaggtgtcgaactgatggcttcctggagagatcagatcggtgactggggatactctgtcagtgcaaacctgactaccatcagcaacaaagtgaaaagtctggtacaggatgggtactccatcatcgcaggcgataagagccaaagctatacaatggcaggctacccgatcggttatttctacggctataaagtagccggtgtttaccaaaaccaagctgaaatcgatgtttctccggtgaacacactggcaaccgtcactccgggtgacctgaagtttgccgatgtaaacggagacggaaaaatcacaccggacgaccgtacaaaaatcggtgatccgactccggacgtaacctatggcatcagcctcggactctcatacaagaactgggaactcagcatggaaatgatgggacaaggcggcaaccagatctatcgtacgtgggacaactataattgggcacagttcaactatatggaacaacgtctcgaccgctggcacggagaaggcacttcgaacacacaacccctgctgaatacgaagcatgccatcaacagcgagaactccgaatacttcatcgaagacggaagcttcttccgcatccgtaacctgcaactggcctacagtttcgacaaaactttgctgtcaaagatacgtatgcaggccctgaagatttacgtcaacatacagaacctgaagacatggaagcacaacacaggttacacaccggaaatcggtgggtcagccattgctttcggagtggacaacgggacatatccggtaccggcagtctatacatttggtattaacttaacattttaacgaaacagagtatgaaactaaataaatacattctacccattgcattagctgtatcggctctgagcttctgcagttgcaacgattttctggaccgtcacccacagggacagtttaccgaagacgataatcccggagcacttgccgaaggaaaggtcttcaacatttacaccatgatgcgtaattataacatcaccgccggtatccccgcctttgccatcgaatatttccgttcggaagattcggaaaaaggaagtaccgccagtgacggggccgatcaggctgcgatgtacgatgattttcagtacaacgccagcaacggactgataaaagcctactggagtcagaattacgccgtcatctaccagtgtaacgatgttatagagacgattgagaaaggtaacctgacggaggagaacgaccttcgtaacaagggtgaagcccttttcttccgtgcttattgttacttcaacctggttcgtgcattcggcgaagtgccactggtcactttcaaagtgaacgacgcctcggaagcaaacgtaccgaagaccaccgccgaagaaatttacaaacagatcgactccgacctgacacaggccgaagggcttttaccccgtcaatggcagtccgcttatctgggacgactcacctggggaagcgcccgtgcactgcatgcccgtacgtacatgatgcgcaatgactggcagaacatgtataccgctgcgaccgatgtaatgaattcagggcaatacaatctgaatactccttatgatgtcatcttcaccgatgaaggcgagaacagcagtgagtcggtattcgagttgcaatgcgcatctactgccgctttgcccgcaagcgataaaatcggcagccagttctgcgaagtacaaggtgtacgcggttccggccaatgggacctcggctggggatggcacatgggaaccgagttgatgggtgaagcgttcgaaccgggcgacccccgcaaagatgctacgctgctttacttccgtcgttcggatactgatccgatcactcccgagaataccaacaaaccttatggagagtctccggtatctcaagccgacggtgcttattttaacaagaaagcttataccaacccggcactccgtgaagagtttacccggcacggcttttgggtaaacatccgcattatccgctatggtgacgtggtgctgatggctgccgagtcggccaatgaattgggtaaaacaggtgaagcttccaactatctggaaatggtacgagcccgtgcccgtggcaacaacccggacattctgcctaaagtgacttcattagatcagaccgtgctacgtgatgccatccgccacgaacgacgggtagaactgggactggaatcgggacgtttctacgacctggtacgctggggcatcgcttcgcaagtgctccatgctgcaggcaaaacgggttatcaacccaagaatgccttgctaccgcttccgcaggacgaaatagataaatcaaaaggcgtactggtacagaacccggattattaagagcacaccacagagtaacacagagtcccacagagatttatatatcccgtagagattaaaactctgtgccctctgtggtaaagtaaaaaacatatacaattatgaacaagaaatattctttactcattctgcttgcacttttactcccgctggggctgcaagcgcaaaaatctcctcaggatatggaccgtttcctcgacaatctgctgaaacggatgaccctggaagagaaaataggtcagcttaacctaccggtaactggtgaaatcaccaccggacaagctaaaaacagcgacatcgccaccaagataaagcgaggcgaagtaggcggattgttcaacctgaaaggggtggataaaattcgtgacgtacagcgtctggccgtagagaactcccggctgggtatccctctgctctttgggatggacgtaattcacggatacgagaccattttccctatccccttgggactttcgtgtacatgggacattccggctatcgaagaatcggcacgcatcgccgccgttgaagccagtgccgacggcatctcgtggactttcagtccgatggtagatatcagtcgcgatccacgctggggacgggtatccgaaggttcgggcgaggatcccttcctcggtgcactgatagcccgggccatggtacgtggataccagggaaaagatatgagtcgcaatgatgaaatcatggcctgcatcaagcactttgctctgtatggggcagccgaggcaggacgggattataacaccgtagacatgagccgccaacggatgttcaacgattatatgctcccctatcaggccggtgtagaagccggagcaggtagtgtaatggcttctttcaacgaagtggaaggtgtgccggcaacagccaataaatggctgatgaccgatgtgttgcgcggtgcatggggatttaatggtttcgtagtaacagacttcaccggaatctccgaaatgatagaacacggaatcggcgacctgcaaaccgtatcggcacgggccatcaatgccggagtagatatggacatggtcagtgaaggcttcatcggtacattgaagaagtctgtcgaagaaggcaaagtatcggtcgaaacagtcaacacagcttgtcgccgtatcctggaagccaaatacaaactggggttgtttgacaatccctataaatactgcgacctgaaacgtccggcacgtgacatcttcacaaaagagcaccgtgccgcagcccggaaaattgcgggagaaagcttcgtgctactgaaaaatgaaggactttcacctaccctcgcacctgtacttcctctctctcctaccggtactattgcagtgatcggccctttggccaacacccgttcgaatatgccgggcacatggagcgtagctgccgtactggacaaaagtccttctctggtagaaggtttgaccgaatgggtgggcaatcagggaaaaatactttatgccaaaggcagtaacctgatcggtgatgctgcttatgaagagagggcaaccatgttcggccgttcgctgaaccgcgataaccgcaccgatcaacaactgctggacgaagcgctgaaaatagcttcacaagcggacgtgattgttgccgcattgggtgaatcgtcggagatgagcggtgaaagcagtagccgcaccaacctcaatctgccggatgtacagcacactctgctggaggctttgctgaaaacaggaaagcccgtagttctcgtactgtttacgggacgtccgctggtactcaattgggaacaggagcatgtccctgccatcctgaacgtatggttcgggggttcggaagccggtccggctatcggagacgtattgttcggtgcagtcaacccgggcggaaaactgaccatgactttcccgaaaagtgtaggacagatcccactttattatgcacacaagaataccggacgaccgctgaaagaaggcaaatggttcgagaaattccgcagtaactatcttgacgtggacaatgatgctctctatccgttcggatacggactgtcgtatacgaccttccgattcagtgacatcacattgaaccgttcgtccatcggaatggacaatgaactggtagcctccgtcaccgtaaccaataccggagaccgtgccggcagtgaagtggtgcaactctacatccgtgacttggtgggcagtgtcacccgtccggtcaaggaactgaaaggatttgaaaagatctatctgcaaccgaatgaatcaagaaccgtccgctttacaatagctccggaaatgttgaagttttacaatgccgacttgaagtttgtagctgagccgggcgatttcgacgtgatgataggcccggatagccggaatgtgaaaacagcacggtttacgctgcattgaaccggatacacaagggaatagaaaagaataagattcaccacagagtcacacagagttccacagagatgattttctcttaatatgctataaacaaaagattaaaattcagtgaaaccccgtgttactctgtggtgaaacaaaaaccattacaaacaagaaatcattatgaatatccaacttgtcactcacaacagcaagctcctcttcgtcctcttcgctctttttctttttgtagcatgcaagccaaaagaaaagccctcgtctgccacatcactgacagatgacgctctgatggataccgtccagcgacgaaccttcaactacttctgggatgctgccgaacctaatagcggactggcacgcgagcgctatcacatggatggcgaatacccggcaggagggccggagattgttacctcaggaggcagcggcttcggcattatggctatcctggccggtattgatcggggatacgtcagccgggaagaaggcttacggcgtatggagaaaatagtcggttttctggagaaagccgaccgctttaaaggtgcatatccgcattggtggaacggagagacaggacatgtacagcctttcggacaaaaggataacggaggcgacctggtagagacagccttcctgatgcaaggtctgctggccgtacaccaatattatgcagaaggctcggcggaagaaaaaaaacttgccggacgtatagacaagttgtggcgggaagtggactggaactggtaccgccatggcggacagaatgtgctttattggcattggagtcccgaatatggctgggaaatgaatttcccggtacatggctacaatgaatgtctgattatgtatatccttgccgctgcttctcctacccatggagtaccggcagcagtctatcatgaaggatgggcacaaaacggagccatcgtttcaccccacaaggtagaaggcatcgaactgcacctccgctatcagggtggagaagcgggtccgttattttgggcacaatactctttcctcggactcgatccggtggggctgaaagacgagtattgtccgagctattttaacgaaatgcgaaatctcacactggtaaaccgtgaatactgcattcgcaacccgaagcactacaaaggctacggaccagactgttggggactgaccgccagttattccgtggacggatatgctgctcatggaccattggaacgtgacgaccggggagtcatctctcccactgccgctctctcttctattgtctacacaccggatcagtcactgcaagtaatgcatcacctgtacgaaatgggagacaaagtattcggtccttacggattctatgatgctttcagcgaaactgccgattggtatccgaagcgatatctggccatcgaccaaggcccgatagccgtaatgatagaaaactaccggacaggactattgtggaaactcttcatgagccatcccgatgtacaaaacggactaaaaaaactgggattcaatgtaaagaaataaatgataaaatcaatacttatcgctttatgcacagttctcctctgctggaatagcattccggcagaggcacagacgccacaggattcagtacgcttcatcggatatcttcccgtccgacacaccgaccccacgaaatggataacccggtatcaaagtgaaatagaccgataccaaacagaaaaccaaatgctgaaggatacctcctgtgacgtactctttctaggcagttcttccattaacttgtgggataatatctatcgggacatggctccgctaaagattctccggcgttcgtacggaggtgccgcgctccgggatatgctctacaattatgatgtaatcgcccggggatatcacccccgcagcattgtgatttacgtagaaaatgacctcgcaggcactcccgaggatctgactgtaggcgagacattcgacttcttccgcttgctgaccaatcgcctgcaacgggactatccggatattccgatatttattctctcctataagccttcactcgcacgcaaagagatgattccgaagcatgaaatcataaatgctttgcttcaggaatatgcttcgaagagagagggactcacttatattgacgtagcctcctgtctgtacgacaacaatggaaagttaagaaaagacatcttcaaacaggacggattgcacatgaatcagaacggttacgatctgtggactgctatcctgaaaccgaaaatactggaaagcatccgataaaattacgatttcctccacaagcctccctatctgttgcatagcagggaggtttatttctgtttatatacttttttcatagagttgatatactaaatctatctgttatttatatatttgcgtttataaatacggaataactatgaatagacataaattagccttttctttgatcggtattttcatcgttcaattatcttacgccggatattttaagcacataggtagagaagaaggtctttcgcaatcgtccgttatggctatctatcaagataagctgggtagaatgtggtttggtacacgtgaaggagtcaacatctacaatagtaataagatggccgtttataaggcatggatacaaaacggaaatcgaccggatcagaaaatcctgatagggaatgaggttagtgccattacagggagtcaaaacggagatgtgtttctgatcgttgaccatgctttactgaaatacgatattcgtaaagagactttcgaacgtctgcgtcaaggatctgtctatgctctaacatctcatgccggtgagatatggtgtgccggacacgactctattttccgatacaacccccaaaacaatcaattagactttcaattaaaaacaggtatatcatccatcaactatctgacgataaatggcaacaggttttatatcggtgccaaagaaggtctatataccacggaaaacaaagggagggttcaatgcctgatccctaaagtagatgtttatcgtatttttcaaagctcctgtcaggaactttgggtaggctgccgtacacaagggctataccgtatcaaccggaacggacgaatcaaccgcattccttatgacccctcatcaccaaacggcatttccagcgaacaaatacgtgaatttgtagaagatcagcaaggaaacatctggttcgggaccttcgacggtttacaaaaatatgatccaagcacccaaacctacagcctcatcaagcaagaacaacgcccgggagggctcagccattcttctatattttcactctatcaggatgtacaaggcactatctggataggtagttattatggaggagtcaactactttaacccggataacaacgcattcaattactacacttataatcccgatcgtagcgactgtctcaactacccgttcgccggggctatgaccgaggacaaagatcaccacctatggatatgcaccgatggtggtggattggcatgcttagaccgacaagcgggacatttcaccacttacactgccggaggccccaactcactgccccacaataatctgaaaagtatttgttacgaccctaaaagagactgcttatatatcggtacacatatgggaggactctcccggttcgaccgcaagaccggacgtttttacaactacctcaatcattccacgaaaggcctcaaagagcccaatgatgttatcttccaagtatctttctataacgaccagctaatcgtttccgctcgtaacggagttttttccatgaatcccgatacaaatgaattccgcttgctttatgacggatattactatcaaactttcaccattgatcccaaaggttttctctggttgtcggcaggtactaacttatatagtataaatctgaaacaccctgaagaagtcaaatcattcagtctgcctgcatccattggacagttcggcatcagcaagattttgaaaggtaacaatcaatatctttatatcgccactttaggttcaggacttttttgttataacgaacaaactcagacctgcatcaactatactcccgagcagaaccaattactcagtaattattgctataatcttctacagacttctacagacaacatactcatcacaagtgatcggggtatcacactgtttaatccaaccaccgaatcattccgttccattgaactggataacggactgtccctttcatccatcattaatggttgtggtgtatggatgtgtagtgaccatactatatttatcggaggtacaggagggcttagttcttttctggaaaaagacctgaacaaagaatatcccaaacctaagctctatttttcaagtttatccgtcaacaacgcacggataagtccggatgacaaaagtcgtatactgacagaagggctcccttttgtccgggaaataaatctaaatgccacccaaaataacctgactgttgagtttgcttcttccaactatgtggatatactgaataatacttggtatgagtatcagttagaaggttttgacaagcaatggtcactcacctcacaaacaagcctgaaatacaccaatctggatcctggagactacgtgttacacgtacggcaaaaaggcaactccctgaaaatgcgcaaagcacaagagatcttattacaaatacatatcaataccccatggtaccttacttggtgggcatggctcagttacatcactatcagcatttcagtgacctattttatctggcgcgaaaaaagttccagaagaactttggcgatattacggcaaagcctctcttctcttacctatcatcagattctttttaatccagctatttaaatagaccatgagtccatattgattaaatagtcttctttacgagcatgaatttactttcagatgttattccccttatctggtatccgccttaggtcatttaagattttcctgtttagctcctttgcgatattccatcggagtaacgttatattgatttttaaaacaacggctgaaatagcgtggagaaccgaaacctaatctatcggatatttctgctacctgtaaataaggttcgttctttaacatcagcgatgctattttcaaccggtgatttagaataaattcattgggtgtcatccctgtcaatgctttaaatttggtgtgcaacaatgttcgccccattccaagttcctgacataacataccaatatcaaaatcctcattatcaatatgtttatctactaccttaatgactctatccaagaagcctttatctattggattagctgccaacaggttgatttctaaaatctgatctttggcaaaacggctttgcatcaacaagcggttacgaatcaaattattgcagcgggttattaagatttttgcattgaaaggcttggtgatataatcgtctgctccacgacgtagcccttctatattttgatctacagtgtcaagtgctgttaacaacacaaccggaatatggcacaagcttatgttattctttattttcagacacatttccgttcctgtcattaccggcatcataacatcgctcactatcaaatcgggcacttctgcaaagacctgttttaatccctcctcgccattagcggccgtcaccacctgataaagtggtgaaaatatttctttgagtacctgcaaaagctccatattatcttctaccaataatactttccgtttctcttcccgttcatctatcaagggagttttgaatgtaaaatcatcctttttcataaaattctcatccggtatggtattctcttgtaccataggttccttttctggagattccagaaaaacgacttcagtatccttttcaaaacaatcacgggttttaggtaactttacaataaaacagctgccttcatttgactcactttctacctcaattgtaccatgatgtagctgaatgatacttttcgttaatgcgagtccgataccagtgccaacatgaagcgctttattccgattgtccgcctgataaaaacgatcgaatatccgttcctgttcttctttactaatgccattcccggaatccttaactgcaataacaacctgatccggtgtggtagaggttaatatgcttatttctcctttatccggaacatgtttaaatgcgttcgaaagcaaattaaacaaaacttttcgcatttgccagtcatctatccaaatagatatatcctgctccaacagtttcagatggtaagaaatggacttctgagaggcataagcagagaaagaaagatagacttcttctaaaaatgtattcagactttgttccgatagttttaattggatatagttctgatcgaatttccgaaagtcaagcaattctgaaattagaagtttcatttgttgggcatgcttccttatcctgaaaatactattatgcaaagatggaggtatcgtattcttttgtaacataagctctacctgacttataataagagttaaaggagtacgaaactcatggctcacattggtaaagaatcgtagtttagcttggttcatctcttcaatatgttccttttcaatacgttctttctccagcgacatcgccaaagttcttctggaacttctacttagttaagaacaattagtgcctatattgcgaacaaaaatagcatagaggggtctcttccacaacatagttcaaccatgttattcatattttgtaaagtttaatagtatacggataatgaaaaagaacaaattatgtccaatatttctatctaattaagtatcctatcgcaaaattttgtacataaaagccatataggaaatacggattaaggcagactccaaattgactatgaataattagtgtccttattgagaataaaagtatcacatcggatcagatcagttaccgtagttttgtggtgtatttaacacttttattaactcaatctaaagtattatgagaaaaagcaaattacatttgctacccttatcttctaaaagggtacttgtaagtacatcgttaataatgcttttaagcggtagcgcctgggctgtttcttcacaagagacagttgaaaacggagatgcgatcacagcagtcccccaacagcgcagaacggttaaaggtattgtaaaagatgcaaatggagaaccgattatcggagccaacgtcattgtgaaaggtaataaaactattggcgtcatcacaaacctgaacggagaatttagtctcgaagtaccgtccaacgcaacactgcaaatctcttacatcggctatcttaataaagaagtcaaagtaagtggcaaccaggtgtctttcaacatccaattggaagaagacagcaaaacactcgatgaggtagtagtagttggatatggcacacagaaaaaggccaatttaacaggtgccgtatcttccgttgattttgaagaacaaactaaatcacgccccattacgacagtatcttcggcattagccggtctaagtccaggacttcaagccagttcaggctcggcaatgccgggagaagataacacaaccttacgggtacgtggtaacggcacaatgaataatgcctcacctttgattatcatagatggtatggaaggttcattgaatgctattaaccctcaggacatagaaaatatctctattctaaaagatgcagcttcctgtgctatttatggtgcccgtgctgccaatggagtcatcttagtcacaacaaaaagcggtgatcgagacaaaatacaggtaaactatagtggacgcatctctttcaacagcccgacacgcatgatcgaaacgatgagtaactatgcggattatatggaattaatgaacgaatcttgcgaaaatgttggctccggtactctttttgaccaaaagtatatcgatttgtggagagagaaatcaaaagatcccaatggagtaaatgaaaacggtgtccctaattacatcgcatacccaaataccaactggctgaaagaattatactcaggaggtatgatacacgaacataacctttcagtctcaggaggatctaataaaattcgtttcctattgtcagcccgctatcaggataatgaaggtattgtagacaatacagccaacaagacctattctgtacgtgccaatattgaagccaatccaactcaatggttgactttaggtacgcgtacttatgcttcacaaatggatcgtgaagtgggtgactttagcaatgccaatactttcctccgacaatctacagccggtacttatcccgaatggaacggaagtttcggctacccggaatgtccggacgaacgtgcaacagccaataacccactatataaactggcacggaatgatggcttcaaacgctacaaccgtttcaacacgaccctatttagcaaggtcaagttctttaaagatttaagctgggatttcaatttcaattataaccgttacatctacgaaacccgccaatggggagtacctgcttatcagacacgtttcagtgacggggtaattgtcgatggtatcactcctccttctcaattaagtacaagtttcggttatgagtccaattactcttatacattggaaaacctgttaaactaccatcatacatttgctcagaaacacgatgtatccgcgctgttaggctatcaggaattctataagaattactatactgtagatgccgcaaagaaaggtttgatcgacgaatcactgaaccagtttgatgaagcaaccgaaatgacaagtaccaaaggtgcaacccaggattatgccacacgttctgtatttggacgcgtgaactatgcatataattcccggtatttatttgaggcaaatttccgttatgacggctcctcacgtttccacaaagatcatcgttggggattcttcccttccttatcaggtgcatggcgtatctcagaagaaagcttcatggaaaatacccgtacttggctggataacctgaaagtccgtgcatcctggggtaaattaggtaactctgaaattggtaactacgaatacatgtcggtatacagtaccaccaacgcagtatttggaaatgccttaaattctgcattgtatatgggtgccatcgccaatagcttactgaaatgggaatctaccacctctgtcaactttggtattgatgttaatttattaaagaaccgtctgagcataagtgccgacctgtatcaaaagaaaactgacggtatcttataccgcccgactattccttatgtattcggaacaatgactgccccccgtcagaacctcgccaaagtgagcaataagggagtcgagttatcactgggatggcgtgataacataggaggggtaagctactccattaacggtaacttctcatacaacaaaagcaatatcgatgcctataacggcacttatgaaagaacatgggtagaagatccgaataacaaactgaccggtggtaaatgggaagataatatcggaaaagtgtccagtggtggcacaacacccattgttgaaggccgcatgatgaacgaatactatttacggaacgtttatcatggcaatggctcttactacaatgcggatggcagcgtaaaccctcaaggaggacctaagaccggtatgatccgtacagaaaaagatatggcatgggtgaaagatatgatcgcagccggatatgaatttcaaccggggaaaacggttgctaaaaacaagatctggtatggtgattacatctatgccgactccaataataatggagtatatggcgatgataatgactatactttccaaaaaacttccaataagcctaaatacaatttcggttttcaggcctctgccgcatggaaaggattcgacctctctatggtatgggcaggagctgccggattcagcatatattggggggcaaccacaggatacaacgccgcatctactgaatggggtagtactatcgcacaacgggttgctgagaatcattatttctacaatcccgaaaatccggatgatccacgtaccaacatcaacgcaaaatatccgcgtatggcttatatagacggctatgtacaaaatcgtcatggcaatacaaccttatggctgtacaaaggtgattacattaaattgaagaacctgtctctaggctacactctaccgaaaaactgggtttcaaaaattgctatgcaaaatgcacgtatttatgtttcagctgaaaatctgctgacaattaccggatttgaaggccaagacccggaatctgctaccggtatgggctattctccgtttaggacaattgcaataggtgccaatataacattctaaataaatcttgaaatcttatgaaactattaaataaattattcatattaacagccacagcaattgctataagcagttgccaaggagatttactggacacaaagccatatgataaagcatcatcgggcagtatgtggagcaacgaaaacttttgtactatgggagtagcatctatctacgctaccctgcgcgaaggttatgtagcaaaagaggcttatctaatggaggcattcagcgtgggagcaacctgccgtgacaacgattatccgctactggccggtacagcttccatcggttccggaatattctcagactattggaaacaacattatgcaggtatctaccgtgccaatgatgccattgtacatctacccgacgcaccgataagtgaaagcgtaaaaggtaaattattatccgaagcaaaagtattgcgtgcattttattattacaaactgaatgcagttttcaggggtgttccttattataatacgcctatggaacttgatcaggcagacaaaccacgtgaaagcgaagagaatatatggaatttctgcatacaagatttaaccgacgcaataaatgatccgaattttcccgaccgtatcgctgccggtaaagcagaatggggtcatgtcaccaaatcagtggcttatgcattacgtggaaaaatctatctatggaccaaagaatggagcaaagcggaagcagatttccgtaaagtaggtgaattgggacattcattatttcaggatggttacaagcaactcttcaaagaagctaatgaacagagtgatgaagctatcttctctttgcagtgtatcgataataatggtagcacttacggaaattccatgagtttccgttatggtggtcgtactacatttggttcttgctggaacactatgttagccagtgtggattttgtagaaacctacgaaaatatagacggcagtaaatttaactgggatgaatacattccaggattctcaagcttagatattaaagaccgtgaagtattcttcttgcgtaataccgatccggcaacagtaaaagcacagtatcgcgaaatcggctttgacggcacggaagaggcattagacgacatggtaaaaaaaataaaagccaaagtagacggacgtctggagaagttgagtgacaaggcaaaagcattatatctcccggcaggaaacgaggctcgtatcaaagctgcttatgacagccgtgatcctcgtttagcccaaactgtcatcactccatatgctacatatgacggttcgggaaacagtgtagaccacaccttcacttcacgctggccctactatggtgctgacaccgattatccttatgacttacgtactgacactcagagccatttatactatttgttccgcaaatttgttgctgaaggttcaagtgagatgaccaatcgtgaacaatctccgattgacctgccaattatccgctacgcaactgtcgtcataggattggctgaagcattgaatgagcagggtaaaaccgatgaggccatcgaatggctgaataaagtacgccaacgtgccggtgttgcactgttgaacagcaatactgccactatggttcagggacaggaagatatgcgcgttcgtatccagaatgaattccgctgggaaacagcaggtgaaggagttgacttttacgaagaactccgttggaaaacatggaaagaaagtaaatttaataatgctgatggtacagccgggatgaaagatgtatgggggactatcacctatccttacacatggggaggagaccaatattatgtatggccaatcccaaaacatgaaactgatatgaacaaatccctgacccagaattcgggctggaattaaacaaatacgtttaagccactgattcttataaaccaaagggctgtgtcaaaaactcttttcaccacagattacacggattatcacagattatcaacatggataatcaatgacttagaactcattttgtgttactcagtgtcctctgtggtgagtttcgacacacgccctctattccatctgaaaagaaagttctaaacagactcttttatcattttttcctcttttgaaggttgattccctcaaatatccaactaaaatagaaaaattatatagcattaagaaccatttagtaagataaaatagcaataaattgtgttactttgcctacgttaaaatcttaattttattacgatgaagaaattattaatattcactctcttgctatgctgtactgtaaaagctctcagctatacagaacggaactatcttcaaaaacaggccaacgtaagcagtttgcaggaagtgcttatattaaatcaacaatgggtcacttatcctgcttataccgaccgaaccggatgggacacttttttaggctctttcaagaatgaatgtatccttcgcggagagaagcagttgaattatcaatggcaggttgtgaaagctactgattatatggaatttgaacgtagcggcaaccgtagcgttatggaaactcctttcgccaataataacaatgccatagccgacctgctactcgctgaacttgcagaagggaaaggacgatttatcgatcagctgatcaacggtgtatatcattcctgcgagatgacttcctgggcattggccgcccatttgaatgcacaacagtctcaccgctcattacccgattttaaagaaaacatcatagacctgacagcaggtgacttaggctctttactcgcatggacctattattacatgcacaaagagtttgacaagctcaatcctgctatatccgaacgtttacggcatacgctccaacagcgtatattggatccttacatgaataacgatcacttctggtggatggcagtgaactatagaccgggaatgttggtcaacaactggaatccttggtgtaacagcaacgccttaatgtgttttatgctgcttgaaaatgataaagaaatgttagcgaaggcaatataccgcagtatggtttcggtagataaattcatcaactatacccataccgacggtgcatgtgaggaaggcccctcctattggggacatgccgccggaaaaatgtttgattatctggaattactgtcagccgttaccgggggaactgtctccatcttcgataatcccatgataaagaatatgggcgaatatatatcacgttcatacgtgggcaaaggatgggtggttaatttcgctgatgcttcggcgaaaggcagtggagacgctcccttgatattccggtatggcaaggctgtaaacagtaacgaaatgaaaggattcgctgctatgattaacaccaataaactcccttccggacgcgatatataccgtacgcttgctgctataaagattgcgaacgaactaaaagaaactcaagcggcacatctgactcccccattctcctggtatccggaaaccgaattctgctatataactgacaataaaggaaactttctggccgctaaaggaggatataacgacgagagtcataatcataatgacgcaggtaccttctctttctggatagaccaaactccttttcttattgatgccggagtagggacctatacacgccagacattcagcaaggatcgctacaccatttggactatgcagagcaactatcacaatctccccctgattaatggcgtcccccagagatacggagcaacatataaagcaacacaagtacaagctgacaagaggaaaaacacattcacagccaatatagcgacagcctatccggccgaagcagaagtggaatcatggatacgttcctattcacttcagaaaggacaattacggatttcagattctttccgtctgacaacagccaaacagcctaatcaaatcaatttcatgacatgggggcaggtgaatacggaaataccgggaaaaattcaattggaagtaaaaggaaagaaagccgtcatagaatatgataaacaactgttcgatgtgaaaacagaaataatcccattaacagatacccggctatccaatgtatggggtaaatcgatttgtcgcattacactcacagcaacaaacatctataaaacaggaaattattcttttaccataaaaaaacaataaaacatgaacttaaaacccttattgggagcagcctgcgcaatgatatgtgtggcttgctcaaaccacaaacccacagtaccgtcttttataacagaaaatgtagaatttgccaaagcacaactcggtttggccatcgacaccatcgaagcaagcggaaaatgtctcaatcctgtaactctcaatagagatggatctgtatattactgcggatatgccgattggcgcagtggattttttcccggtagcatctggtatctgtacgaactgacaggtgacaccagctatcttccactggccagaaaatatactgaagccattcgcccggccgagcacctgacctggcatcacgatataggattcatcattaattgcagttttggtaacggcctaaggctcgctcccgatacagctgcatataaaaacgtaatgatacaggcagccaaatcactctgtacccgttttcgccctaatgccggagtcattcaaagctgggatgtaaaaggcaatagctggcaaagtgaaagaggctgggaatgtccggttatcattgacaacatgatgaacctggaacttctgttcgaagcaaccaaactgtccggtgattccactttctataaagtagccgtagcacacgcagaccgtactctttccgagcatttccgccctgatggaagttgctatcacgtagtggactacaatatttcggacggctccgtacgtcataaacagacagcacaaggatatgctgatgaatcggtttggtcacgcgggcaggcatgggctatctatggcttcactatttgctatcgtgaaacgaaagaccgcaaatatctggaccaggcactgaaaacattcaataggatgaaaaatgatccgcacatgcccgaagatctgataccttactgggacatggatgcacccaatatacccaatgaaccccgggacgcttcttctgcatcctgcatcgcttctgccctgtatgaaatcagcacatatgcagtatccgatgccgcttcttacaaagcatacgcagaccgcattatgcatagtctcgcctcacctgactatcgggccgcattgggcactaacggcaattttatcctgatgcatagcgtaggcagtattccgcacaatagtgaaattgacgtacctctgaactatgcagactactactttctggaagccctgaagcgtagaaaagatttagataaataattttataataaagaagtatcatgaaaacacaactgtttaaatttgcctgtttaattatctgcttattaacgatagctcccaattgccatgccggcagcaagtggaaagctaaacatgtagtcttaattggactggacggctggggtgcctacagtgtagagaaagctaatattccccatatcaaacaattaatgaatgatggttcttacacactgaccaaacgctctgtactcccttcgtccagtgcagtaaactgggcatctatgttcatgggagcaggtccggaactacacggatacacaacctggaattcaagtactccggatcttccttcgaaagaattaagtaaagatggcatttttccaactatattccaattgctccgcgaagctgatccgaaagctgaaattggcactttctacgaatgggtcggcatcaaatatctggtggatacgctggcagtaaacaaatataaccaagggattaactatgaaaaatatcctacggaactatgcgaaaaagccgtgaagtacattaaagagaaaaagccgactttaacacttattgcctgggataatccggatcatgtgggacataaggaaggtcatgatacaccagcctattatcacaaactcgaagaaatagacggatacatcggcaaagtaatgaatgcggtgaaagaagccggaatactggatgaaacgatttttataataacatccgaccatggcggaatcaataaagggcacggaggaaagacaatgcaggagatggagactccattcatcatctcggggaaaaatatcaagaaagggcatgaaattcaggccagcatgatgcagtttgacgtagctgctaccgtggctgccattttcaaactcaagcagccacaagtatggatcggaaggcccataatggaagtatttaagtaagaaagaatgctaacaagttaaagacataggatgaaacgaaccaacagaacattattcattcataatacagcaagagggagaataaaatttcttcttcttgctctatttgcttttcaaggcttacaagcacaaaagctattccccgctccttctgcgatagagacacataaaggtacattctcttatgacgaagtttcggctaagtgtgtacgaactactatctctaagtctctacctgctatcggcatagaatactcggatgaagcatatcaactggaaattacaccggattctatcttcattgatgccacttctgcgaaaggagcattttatgcccgccaagccattaaacaactggcacggcacgaacggggcaaaatccgctgttgccggatttacagttcgccacgctacgcatggcgcggatttatgctcgatgaaagccgccacttcttcggtaaagagaaagttaaacaatacctcgacttaatggctttactccatctcaatgtattccactggcatctgacagacgaaccgggatggcgaattgaaatcaaaaaataccctaagctgacgaaaataggggccgttggcaattggcatgatgcccaagcaactccgcagttctatacacaggacgatatacgagagattgtggcttatgcggccgaacgccagattatggtggttcctgagttcgatatgcccggacatgccacagcggtctgccgcgcttatcccgaagtatcgggcggaggagaaggacgctggaagcatttcacattccatccttgcaaagaagaaacttatcgttttatcagcgatgtactcgatgaaatagtagccctcttcccggctccctatatccatattggaggtgatgaagtgcactacggcaatcagaactggttcacagatcctgaaatccagaacttcataaaggaaaaagggctgatcaatgaaaccggactggagcattacttcatccgccgtgctgccgatctggtagcggccaaaggtaaaaaaatgattggttgggacgaaatagtggacgccggtatctccccctccaaagcgttggttatgtggtggcgccacgaccgtaagtaccagttgctgaaagcgcttgagcaaggctatcaggtagtcctgactccacgtcgcccgctgtatggcgatttcgtacaggatgcctcacataaagtgggacgctattgggatggattcaatccgttgcaagacatatatgccttccccgaaccgatcagtcatctttttaaaggatacgaagatcagatactgggtatgcagttcacactttggaccgaacggattgcagacggaaaacggttggacttcatgaccttcccacgcctgatagcactggcagaatctgcgtggacatcgcccaaagagaaagactggagtcgtttctgcatgcggttaccgtctttcctggaatatctgaaggagcaaggcatctattatttcgatgtggttcacccacaagaaactcccgaaccgggcggaccggagaaagcggacgtattacaaaacggatagagaaataccgatgatctcaataataacatcattaatcaatacataatcaagaacatatgaaacagcagaaatgtaactattttccctccttgtggtggaggggtcgagaaaaaggtttaagtacttttcttttcctacttttcttttccatctcgctccatgcccagcgtcaggatattctactcaacaataactggaatttccgtttttcgcatcaggtacagggagacacccggcgggtggacttgccgcacacctggaatgcacaagacgcacttgccggcaaaatagattataaacgaggtattggcaactacgagaaagctttgtacatccgccccgaatggaaaggtaaacgtctttttcttcgtttcgacggagtaaacagtatagccgatgtatttattaatcgcaagcatataggtgagcaccgaggcggatacggagccttcatcttcgaaatcacggacttggtgaaatatggagaaaagaactctgtcctggtacgcgccaacaatggtgaacagttagacatcatgccgctggtgggtgacttcaatttttatggaggaatctatcgggacgtacatctgctgataaccgatgagacttgtatctcacctttggactacgcttcgccgggagtttatctggtacaagaggtcgtcagcccgcaggaagcgaaagtatgcgctaaagttaacctatccaaccgtgcagccgacggaactgccgaacttcaggtcctggtaacggatggcaccaaggtgatttgcaaagagagccgcaacgtgtcactgaaacagggggctgatattcaggaacaactccctctactgattcagaaaccacgtctctggaatggttgcgaagatccctttatgtatcaggtcagtatcagtcttcacaaagacggcaaacaaatcgacagtgtaacgcagccattaggattgcgctattatcataccgatccggataaaggattctttctgaatggcaaacacctgccgcttcatggagtctgtcgccatcaggaccgcgcagaagtaggcaatgcactccgcccgcagcatcacgaagaagatgtggcactgatgcgcgaaatgggagtcaatgccatccgcctggcacactaccctcaagctacctatatgtacgacctgatggataaacacggtattgtaacctgggccgagattccgtttgtaggtcccggaggatatgcagataaaggttttgtagaccaagcttccttccgcgaaaatggtaaacaacaattgatcgaactgatccggcagcactacaaccacccttccatctgcttctggggactattcaatgagctgaaagaggtgggtgacaatcccgtagaatatgtaaaagaactgaatgtactggcaaaacaggaagaccctacccgcccgacaacttcggccagtaaccaggacggcaatttgaacttcattaccgaaaacatagcctggaaccgttacgacggttggtatggaagtactccgaaaacactggcaacctttttggaccgtacacataaaaaacaccccgaactacgcatcggcatcagtgaatatggggcaggagccagcatctatcatcagcaggactcactcaaacaaccgtcggcttcaggctggtggcatcccgagaactggcagacttactaccacatggagaattggaaaatcattgccgaacgtcccttcgtatggggtactttcgtttggaacatgttcgatttcggggcagctcatcgtacggaaggcgaccgtccgggtatcaacgataaaggacttgtcaccttcgacagaaaagtgagaaaagatgctttctacttctacaaagctaactggaataaacaggaaccgatgatctatctggcggaaaaacgctgtcggctccgctatcagccggaacagaccttcatggctttcaccactgccccggaagccgaactatttgtaaacggtatcagttgtggtaaacaaaaggcggacacctactcaaccgttgtgtggaaaaatgtcaaactcacctcgggagagaatatcattcgtgtgactactcccggcaagaaaccacttacagacgaagtgacagtagaatataaagaagacagaccgctctaatgaaacggatcattttatcgattgtatggggactgctgaccggatgggcggcagtcccttgcctttgggcacagtcacgcacaggaactgccgatcgggagatctgggtaaaaactcttgtacgcctggccgatcccgtactcagtaacctggccaatgaaacactgaaaaaggaaatgccttacgaatcgcttgctcccaaccggcaacgtttttcttatctggaggcagtgggacgaaccgtatgcggcattgctccatggctggaactaggagaagacgatactcccgaaggacaattacgtaaaaaatacatcgaactgacggtgaaagggatcagcaatgcagtgaatccgtcctcacccgattacctgatcttcggagaaccttcacaacccttggtagatgccgcatttctggcagaaggattattgcgtgcacctaaacaattatggggcaacctctcacccactgcccgcaagcaagtggtgacggagttaaaacgaagccgtgttatcaagcccaatgaaagcaactggctgctgtttgcctccatcgtggaagcagccctgcaagaattcaccggagaatgtgatacaacgcggctcaattatggggtacgcaagttcagagatctttggtataaaggagacgcccagtatggagacggagcagaattccacctcgattattacaatagcttcgtgattcatcctatgcttaccgatgtattagtcgtcatgcagaagcaccggatgccggaaagtgaatttctgaatgtacagcaaaaacgcctgggacgctatgccgaacaattggagcgtttcatttctccggaaggaacatatccggtaatcggacgttcgattgtttatcgtaccggagtatttcacgcattgggacaagcagctttactgcatctccttccgcaacaaattgttcccgcacaggtacgctgcggcatgacgaaagttatagagaaccaattccggtctgctgccaatttcgacacaaagggttggttgaagataggtttctccggtaatcaggttcaaatgtcggagtcctacattaatacaggaagtacttacttgtgcctgaccggtttcttgccattgggactacccgccgatgatcctttctggagtgcccctccggccgaatggaccaacctgaaagcctggtcggggaaagaggttccggcagatcattctttataaaccggcatttgctctttacacttacggcattctttttgtaagacaccggcatttaaataaagaaaagggtatgtcaggactcaaacttaaagaaggagaaattggaatcagaaacgtccacccttatcaacaacgaaaatagccctatcattactctaaaatagagttcgatagggctatttatgtttttggttgtaatctgtagctgtttcaagtggtcattttagttccgacacactttcttctttacggactgctgttcacggttggacgcaaattcctaattagcgccaccaccttgaccgccttgtccgccgccacctttcacatcatcgttattgatactgcgagcggctttcttcacactggccttcaactcgccgatacggtagctaaggctgataccaaagctacggctctgataacggctgctgctcttcgacaagaagttttcacccatagtggtattattatacgaacgatacttctcgaagatattgcttacataggcactcactgtaaagcggtctttgatgaaagagcggttcacacccagactatagtaataatatcccgatcccttaccttgcaggctgatgtaaggagtacttcctccggcattcagactggcacgtatcttcaatgggaaggtgtgctggataccaccgtataaagaggcattccatccatagttatgcaatccctgagccggactcttaatatcaacgtagctgccatcaccgttcagatagatacgggtgttgggagaagcgttccagttaccgtaaaggctcagacctgtattgcggttcttaccgatattttcgtaagtgctatacaatgcaccttcgggagcatgatgtcctccggggaactcttcaccacccttaccaatcaaacggctgacccgttcgataccgttgtttccgaatgagtggcgcagagagatattgacattaaacttcatgctgaacatactatagctcaggttgaacgagtggctcttttcactttccagattcgaattaccctggctgataaacatcgggttgcggtcgtcaaaataaggattcaagttccagatacccggacgccagatacgcatgttgtatccaccgcgcaagttctgtgtcttaccgatcttgatgcccatggttacagaaggaacaaagtcgttataactggtactgaaatccgcttcaggtccgatggctcctgccagatacttcacatcctgtgacgtatattcataacgtactcccggcttgaatgagaatgttttataacgaagtgtgtatcccagataagcggcaagaatgtcattcagatgtttatacttgctactacggtcgttgttgtattcgtagttgtcactgacgccctcggcttcgaacagtttgttatcactaaggttattacggatgatatatttagctccggcttcaatagtatgcaattttccgattggagtagtataatccacctggaatgtatgttcggtagtattggtcttgccatccgaatgagagttattcagcaagaatttcttaacgatatccatttcaaacggatctttgatatctttatagtccgtataatagtcagagttctgcggctgtgtactgatcttgtacgagagagtgatcatacggtccttgttctttttagaggtacgctgataatcgacattaccacgcatagaataccaggaaccgtctccgtcgctcaacgagcggtattgataagccaatcggtctctctgggcattccacattgtagtcaacccgtcgctcttattatcattggcaccgccgtacataccgaatgacgctgtcagcaaacgtaatgtatcaatttcgtaactggcctcaagattgccgtactggaaactgccgttataatcggaagagcttttcgattccagatacttctgatcttccgaatcataattttcacggtaactgtccgaatagcttttaggcgatgtatcgtagttataattataatttcctgtaatagtcagttttccggatttgatagtagcatatccaccggcaccggcaccacgattgctaccactggcacggaaagttgcagtataaccttcgaatccaccaccgacagttacaatattcaggataccgcccacaccttctgcatcatatttagctcccggagaagtgattacctcaatatgtttaatggtattggccggcatactcttgagcacgtctttcgggttattgctcatcatattattaggcttaccgtttacatggattttaaaactgctgctgccatttaccttaatgttatcttcgccgtccactgttaccaacggtactttacgaagcatttccattacggtattggtcttcgagtcaggatcgtcttcgatgttatattcaattttgtctacatccacctttaccagtggcttctgagcaacgacttctatacctttcagttcgttagtagcctcggccatatttaattttcccagatcgatcaccttttcactcgctttgacagtaaagtctttcacgatcgtgactttacctacagacgataaggtaataatatactctccgggagcaacagtcagtttctcctggaatttaccattcaaatcggttacagccattttaagagctttttgaggagcattcttttttgcgatcttaattgtagcataaggttcgccttcctgagtcaacgaatcaagaagcacgcctttcaatgtataagatggagctgccgtacgttgttgggattgctgtgttttttgctgttgggcatacatcatgccggatgtcatgaacatcaacagcaacaatagtagtagtttgtttctcatgtgaagttatgttttagtttatagtctatctgacgtaaaatcatagtatttgtcacagaatggcaacgaaaatatcgactttatattcgtttacgaaaccctcggagttaagaaaggtgaaatagagtgatttttattcttttttatcagaagtcgttcgataacgcacattaaatcagataaaagaaaaaaagtacgacaacatttgctgcgattacacatccgaatccgcccaatatccacgagcgcaatttactctgcttacccgagaagaaaagcgcataacacatgttgaccacaatgttactgataatggcctgcatggtacaagccatcaccacagtagccgctacacttcccgtgccctgcaataagtttaggataaaaggagtaatatcactaaaaccggaaacgaacgacagcaggttcaaccctcctgtcccggcataaatcaaggtatagtgtgtcagtacggtaaatataacaaataaccctgcaaaaatcaaagccaccttgaactccaacggattactgctgtcatcttcttcttccacaaggtcagcgtcgggtgtccgcttccgacgagtgtggataaaccaggctacaccggctgcaacggcagccataatcaatagataaggatagatagaagtaaaaatagtggagctgaaaataagaattagaatcatgaagcgcaaaaacatcatgctgacagccaaaagcatggcggcaacatattcggatgcttcctgcgagtgtgcattacggcttttacgggcgagtaccgagattgtagccgtactactgtagagcccgccgataatgccggacaccaatacccccgattcacgaaagacataccgcttcagcaaataggaaagatatgaaatacccgaaaccactactgtggccagccagatggtataaggcgtcaggttgatgtcagggataatattttcattaggcaacatcggaaggatgataccactgatagccaagaacttggccaacgtaatcatttcatcgtttttcattcgctgtgcgatctccgtaaaagtatgcttcagttcggtaagtaataaaacagtaacaatcaccatgacgtaaaaccatgaaggctgtgtagacacaatcggagcaatgcagtaggtgatcagtgcgatgataatagtcgtcaccccgaatacatggaattgggactgcttcacataatagttgagccctaaaagaatgccgagtatcaaaccacctcccatgaaaaggtgcatctcttccggatcgaggatatacaaaagatatcccagcattccgataaacgtaaaggtgcggtcagtaccgaaaagagtggtttctccttcacgtttcaaactgattttacgttgcgaaagtcctattaaaagtgaaaacaaggtaaccaggataaaggtcaccagcttttccggcaggtagttgtacagttgttccatatatctttattcttgaactcttaactaaagaaacaaatatacggattatttgttagctacaaccaggtagtatacggttttttcatcaactgcgaattatagtaacgaatgtcacccgtaacctcttctccgataaagccgggttttacaaacacttcgtcttccgaacccaattccacctcagccacaacaagtccttcattctctccatagaactcatctacctcgaagatatgtttcccgctacgcaccagataacgggtcttatcgatcactcccggttcgcaaagcttcatcagttcctcagcctccgcgagagacagttccttctcccactcgtaacggcttattcccgaggcatccgaagctcctttaatagtcagatagccttttccgtcacgtatgcgtacgcggaccgttcttccacgggcactactgatatatccctgaacgatgcggctctgatcaaaagcctgtgacttataatctccactaacgagaaatttacgttctatttcctgtgacatatattatttaaaaattcaattgaatacgaagccccagaataccataagcattccctcctttacccaacgattcatcaacttcctcgggtttataggcaatctctccgttcgatttataccctaccgctgcctgtccgaaggcattggcatatttatcattatctacatatgaataattgagctgaaatttaagattccgggtagcataataattcactccgaatgtccatccgttggacgatccccccatcacttctgttccgttcaggtcgatacggtcaaaacgggctgccaattctatatccccccaactgcgtccgaacgatggctgcgagaaggctccacgcgatttactatatcgttgctgcccaccgaacaaaagataagccgcctgcacatagaagccgttgaacttctctgttgccaacccttccatacgtaccgtattgttcatgatatactctccctgaaagcgaaaacctctgtaaaatccggccagttcagcaccggccaaccaatcgtgactgacagaagcaatcggcgatgtatccagaaacttgattttgttaatataagacagtgatcttgtactatatctcacagtattcggcatcagcgaaccgactgttgtcttcggagtacgataagatgcggctattcccaaatgaaaaccttttaccttatctgccgaaaccggttgccagacagcacgggctgtaaccgatattccttcatcctcccccgctttattattactttcggaatagtctttctctttgttaccttctatctttttaaaatgtacacccgctactcccagaaactggtcatgttcccaggttccctgtacaccgatatgatattccggagcaaatgcagataccacgttcgccttttccatgaaccacaaatcgcccgaggaggtcattgcagccatgccaaaactctctttaaaattaccggccctaaaataaagcccattcgggaaagcatatttaatgaaacagtccttcaatgaaaagccaccgtcggtaagatccatttctatcttaccggacagcctttggccaaaagcagcagtagctcccaaacgtacacgcctgaatccgacaccgttgcctatgggctggtagtcttctccaaagaacatagctccgtctgcctggatgcgcccattgaaagtcagtttaaacttattgtcctccgaactgaaggttaatgactctttcttcacctcaggaagaaaagatttagactcctgggcagaaaccattcccagacaagtaattgagaagatagaaaaaatagtaatcagttgcttgttcatccgtctttttagtgattagcgatttattagcagtgattagcagctaataaccggtgatcagtacgattcatccacccggtaccaatcactaattgtcagtcactaatcactcactctcagcccaaaagagaaaaaccgataatcatagccaatgccaggataaccagcgagacaaaaactatcttaacaacctttttggcttgttcttcttctttcttgctgtgtgttacttttttcttattcttactcataatcgttagctttaaagttcaacgttaacaaagtaagaacaaatcttttaacctgccaaaaatatagagaataaaatgacggacaaagaaaggaaataaaaaaacatcccccggagcagaaaaatccggaggatgttacaattctgttatttttaagcttcttccgaagaaaattccatcagataggctttgataaatccttctatttttccatccatcactccgtttacatcagaggtctggaagttagtgcgatggtcttttacacgacggtcgtcaaagacatagcttcgtatctgtgacccccattcgatttttttcttaccggcttccactttagcctgttctgccatgcggtgctgcaattctttatcgtaaagaatagaacgcaactgacgcattgcattttcacgatttttgggttggtcacgggtttcggtattctctatcaggatttcctcttcctcaccggtataaggatccttgtattgatagcgtaaacgaacgccggactctaccttattaacgttctgtccaccggcacctcccgaacggaaagtatcccaagagatacaggccggcaaaatatttacctcgatgctgtcatccaccaatggagtgacaaatacggaagcaaaagaagtcatacgcttaccctgcgcattataaggggaaacacgaaccaaacgatgtacaccgttctcacctttcaaatacccgtaggcatagtcgccttcaatctgtatggtacaagttttaatacccgcttcatcaccttcctgcaagttggccatggttgctttataaccattggtctcagcataacggagatacatacgcatcagcatcgatgcccaatcctgactctccgtaccaccggcaccggagttaatcttcagtacgcaactcatttggtcggcctcatcacgaagcatgttctgcaattccagattctcgacatgctctaatgcctttgcataggcctcgtctacttcttgttcggtaaccagttcgtctttataaaaatcgaaagccagttccagttcgtctgtcagtgtcttgacatcattgtatccctcaatccacttttgcagtcccttcaccagtttcatttgtgcttcggctttcttctggtcatcccagaaacccggagcctgcgttcttaattgttcttcttcgacctgaattttcttcccgtcgatgtcaaagatacctcctcagcgcatcagtgcgctctttcacgtctttaagttgttcaatagtaatcatacttcttttttatggttttcattaattatggggagcaaagatatacaaaattttgtgttcttactcctcatacattttatcaattacctctttatagttgcgtgccactaccggacgtttcaacttcagggtattagtcagttcccctttttccatgctgaacggttcgggaagcaacgtaaatcgtttaatctgttcgtaatgggcaaactgctgctgcaacgtatcgatacgtgcgcggaacaaagcagtaattttaggatgctccaacaattcggccatatctttgtattcgatgcctttctctttggcatactgtttcacaaaaccgtataccggtacaatcagtgcagatacaaacttacgctggtcggcaataatagctatctgatcgatataacggtcgataaccaatttggtttccaatgcctgaggagcgatatattttccgttcgatgtcttaaataggtctttgatacgctctgtcagatacaactgcccatttttaaaatagccggcatcaccggtatgaaaccaaccttcttcatcgatggctgcagccgtcgcttccgcctttttataataccctttcgtgatggtctttccacgaagcagaatctcgttatcttcgccgatcttcacttctacctccggcatcacctgacctaccgaaccaatatcataacccgtcttcgaagtacacgaaacagttgccgtagattctgtcaaaccatatccgaccagcatatcgatacccaccgaatgtacaaactcgcaaatttcatcgggaacagcagcaccggctgtcgggaagaagttaccgttctctattccgatggtctttttcagcagagcatagatagtcttctcataaaacttatatttcagctgaatcattcggggaggcgtcttacccacccgcaaataatccaaattatggatacggcctactttaatagcatccagcatcagcattttttttattccggtggtctcggctattttttcctgaacgccggcgtacaccttctcccaaaaacgagggacactacacatcaatgtcggacggatttctttaatggttgtctggatatcggccggacgaagattgatgcagacctgtacgcccttatgcacacagagataagtccatgccttctcaaacacatgggtcagcggcaggaagttcatcgaaacatccttatcggtcatatctaccagacggatatcatgaatacggaatgcttccaaatagcaagaatgatgcaacatgactcctttaggttcgcccgtagtaccggacgtatacaggatgtttgccaaatcctcggcactggcacgtgccgtacgttcttccactacttcattgtgtggcaaatcttttcctttagccaagaactcgtcatagtaaatagaactcatatcacgcggatctttcactaccgccggatcaaaaatgatcaattgtacaagtgaagggcagaagccgaacacactgaaagcagcatcatactggaactgctcgcctacaaataagaaacgtatctgggcatcattgatgatatattgagcctgtgccggagaactggttgcataaagcggaatagttactgcacggttggcaaaagcggcaaaatccgtaaacagacattccggcttattttgagagaaaataccgatattttcttcttcctgtactcccaattccaccatagcattggcggcttgccttacagtttgcgaaaattcattccaagagataggtatccactgcgccttctcatagtcacggtatttcagggctgtcttgtcgccatacttttcagcctgacgatggaccaagacagataaatgatgataagtcatatcctttgttgttagttattcgtctgcaaaggtatcgtttaatttggaattatcaggtgtgaatactgaattattttgctcaacagagtcaggcacttagccatatagcgcctgataaatagttgtctgacaaactgaaagattcaagtattatttgtacatttgcatccattcaaagcaaaaaagaaatgatagacgaatccattacatccgaagctgtcggcttgctgaaatctcttatcagcatcccttcgctcagccgcgaagaagaaaaagcagccgactatctgcaaaattatatcgaggccgaaggcatgaccacgggccgtaaaggaaacaatatctggtgcctgagccctatgttcgacctgaaaaagccgacaatcctgctcaactcccatattgacactgtaaagccggtcaacggttggcggaaagatccgttcactccacgcgaagagaatggaaaactttatggattgggcagcaatgatgccggtgccagtgtagtaacactcctacaggtgtttctgcaactatgccgcaagcaacaaagttataaccttatttatctggcttcctgcgaagaagaggtatccggaaaaggcggtatcgaaagtgtattaccgggacttccccccatcagttttgccgtagtaggagaacccaccgaaatgcaacctgccattgccgaaaaaggcctgatggtgctcgatgtcacagctaccggaaaagcaggacacgccgcccgcaatgaaggtgacaatgcgatatataaagtactggacgatattgcctggttccgcgactaccgctttgcaaaagaatcaccattactgggacctgtcaaaatgagcgttacggtgatcaatgccggtacgcagcacaatgtcattcccgaccgttgcagttttgtagtagatgtgcgtagcaacgaactgtactctaacgaagagttgtttactgaaatacaaaagcatatctcttgtaaagctgaagcccgttcgttccgcctcaactcttcacgtatcgaagaaagccacccgtttgtacagaaagcaaagaaactgggacgcatgcctttcggctctcctactctctcggatcaagctttaatggcgttcccctcagtcaagataggccccggccgttcttcacgttcgcatacggccgatgaatatatcatgatcaaagaaatagaagaggcattggaattgtatttgaagatactggacggactggaaatctgattttcccctctccatgtcattcgtataggatgaaggtgtcataactcaccacagattacacagatttacacaaaacgattttaatctactgacaacccatactaattatctgtataaatcagtataatctgtggtgaatacgaattttgacgcatcttcatcctatacaaacatatttactattcgggaatgacaaaaatgtgttcgccccccttcacagctttcggcttctgcccgggcaaaacaacagtacccatagccgttgaaggcagaaccagatgtaaccggatcttcccttcttcccgtctccaatcaacccggatagtgccatacatcgattcatggctggcttctacaaaatcaagatcggacaggaaacacggctgaattaatattttcttaaaagccgatgcatccggtgaaagacgtatacctgccggatacttatacatccaggcactgacagcccccattgaaggatgattcagagacgcatctccgatacggcgggtcacgtcccaggtttcgtacaaagaagtcgccccggtttctttgatccaatatccccatgaaggtaatgtagtttttgtcaacatcctataggccgtttccgcataaccggtctccgccaatacatcaggtaccattacgctgccgataaacccgaaatcaagactgtagtcattggctgctatgatcttatgcagattctcggcaagacgttccctatatgcttcgggaacaatatgaagataaagcggcaaggcatatgaaagttgcgttttattagcataagacacagtctgagggtcaaaaaaatgatcgttaatccgtttcttaagctcttcggcttttgccagatacttttgtctgtcttctacacgtccggtaagttcagccatctgtgccatcatcaggttgtcccaatacacaaaaccggtagccataaaatcgaccggtgtttcagccttatagaacaaccagtcacccaatccatgattaatcaatccccgttcatcttccgtcgtttcgatatacttcagataacgttcggcagccggatacacctgacgcatggtttcgatatcaccggtataacgataaagataagagggcacaatgaagatggccgcatcccaaagcggccccgcccagttggaatcccacctccgggaagtcggggcaataccggctacattgccattcgcctcctgcgtatcgatcatatctttcacccacttggcatatacattccggctgtcataattgaacatacccgcctcctgcaccataaagccatccgccatccatccattcttttcacgagtggggcaatcggtcggtatcccgaacagattactcagatatgagtttcggcaaatattgaaaatagtattgagtaactgatcggaacatttgaaactccccacttcagccacgtcactatgcatcctgagggtttgaagtttcacgtccgcaacagtaaggggacgatcggaggtcagttctatatagcggaatccgtgatacgtgaatggtggaataaaagtttccaccccctctcctttcaggacatattcatccgtctggataatttcacgtttgttgcgaggacgtaagtgcatgtcaatattacgctggtcgatattcccatctttctgaagcatctcggaatgccttaaacgaatccgggttccgcgttctccttttatctccaaacggggaactccggctgtgttgatacccatatcgaacacgtagcaagtatcactgatacagttgacagacactacagaaaaagtatctgctgtagtaatggaaggcatcttctgtgcttcgatcagtggggcaggtgccgcagtcaatttagcatgttgccaagagacatcatcaaaaagttccgtatcccaccctttctgttccagacgggcatcatagaaagagcctacataaagattatcaaacaggagcggtcctgtagatgtcttccatgaagtatcggtcgttatgacatccttgctgccgtccgtataacagagatgtatctcagcaatcatttgcgggcgctttcgccagggtgcctcatgaaagtaccacacggcaggagtttgctcattgaaccagccattgcccaactgaacccctatacagtttttaccatgccggagcagtccggaaatatcatacgtgagataaagcacccgcttactataatccgtaaaccccggatcgagtgcatgatcattgacagccttcccgttaaaggacagcctgtaataccccaaaccgcttatatagcaacgggcagaagcaacctctttggaaacatcgaacactttacgaaacatcggagagggttcgtagtctttatcatacccatcggtaatccaggaagcttcccaatccgttgccgaaaattttccggtttcaaaccacacaggttccgaaacgaccttcttattattcagccacacttctaccctccaccagtatcgggtgtgaggacgcaacgtgctcccggcgtaagaaaccaattgctcatccgacttctgtttgccagaatcccagatatcagcctctccttgtcgcaacagttccggagtagaagagaccaaaatcctataggccgtttgcctactgggcacatcggaagtgtccactttccacatcagacgcgggcgctgcacatcaagtcctaaaggcgcttcaatgtattcacacttcaacgaagtgattctcttcttggcaaaaagatcttgacggaaagagaataacaggacgagaagcagaatacccggtttaagatatcctattttcataaaaacaactcactttttaagtacaacaatcgtatacgaataaccggggaatgaataggtaaaatcagatccgggagcctgcttccaggtagctttcggcagaatccgtgtaggcgtatccggaaggttctcatcattcaactctccactcaacgtatatatttccatattccctttcggaatgaaaccggacagactaacctgagtctcccgcacttcagaggaagtgttgactacatgaagaatcacctcatcgcgtgcctcgttcgtagtggccgtcatatccagttctcccactgtctcactccacaatcgcagcggatggtgatgggccgaagacatctgctgtgcatagaaagtcggcataccccaaacctgtcccggagtgaaaaaaatttgtccctgatcccagccgttgtcattttgcaaatagggttgaagagcattggccgcacaggtggtcagaataaaatcaccatggcgacgaaccacattctgaacagtagcatgcacaatggcgcgctgaacgttgtgcagattaccgttttcttcgaaaatagcacaacgcatacttgtcttcggattccatttcaggaatttagctttcatatccgtcaactcccggtctatatttacgtgactgccaagatcatccgtccaaggatggtaatcccaataggctgctttaccatcaagtgctttaaatactttctccatattaggtgattcgggacgccaccaggcagaatgaataaactgcacttccggatctttggcatgaacagcctcataaatatcattaaatcgatcgatataatgctgataatcggcttcaatatccccccagataacttcttcatttccaatttccagatattttaacccgtaaggctcaggatgtccgttctctgcacgcttcttaccccacttcgtatctaccgatccgttcaggtattcgatcatatccgccatatcctgcgccggctcttctacattcactgcataagcaggcataaatccggctttctcacaaaaatgaaggaaatcctcaattccgaaaccgttggtagaatacgtataccaatgacctttataaggaggtctttccgcacggtctccaatcatcttcttaaaacggtattcaggtgcattgaccatggtgccgccatagcggagaaagcgtaaaccctgatccaccattgcctgcccgatgtcattacgcagcggcaacccgcaaaactgacggtccgcgccgttcataagggtgaccatgtctatctgaatgcatcctttctcttccagataaatagcaaagcgtgcattttcatcggttttatcaggagttagctcaaacgtatatttcttccagtcaccggcattggcccgaatgcactgcacagcatattctttttcaccatccacactctgcaaggctacccggacttctgcttttccctttaaataaaggctgccggtctttttctctccctgacgtacagatattccccaacgattcaggctccggttagcaatacccactttaccggttcctgccagatactctatctcctgcgcataccggccatgaaaaggtttatctgcaatttgtttgtaaacagcagcggcagccaggtcagcaaaagcatcccacatcccgctgacttgtggagttgctttggtcaacagcttgacaggagtattgcttccgatagtcaaactacgataagatacatcggctccccagtttcggaaagcgactttcccattacgcaaacctgtatcccgatcttcgaaacgcaacacctcacagtcattcagcagaatcaccagttcatctccatccagtttcacttccatacggttccattgcgtcggatctacatctaccggagtcgttttcaactcttgccagttatgcaagtgtttccctaacagcaagcgctttccatcagcaaacagactgacctcatatccatcaaagttatcggctccgcctccatattcaccgacacgcagtaaaagtccggcattgttggaggatgaagtaccgttcgtaaatttaagatcgaccccgaccgttccgtcggaaagctgcgtgtcatcatataccagttttgctcccggatgtgcctgtacggaaagttggccatcttgtagtttccacaccccttcacaacgggtaaacccgataaaattatccatggaaacaggttcttcaaaactctcgccgaaaattttctggtcataaagaccaccgtaaatctcatgatttacgtcttccatacaagctccgtacaaatagggagttattttattttcaaccttaccggcatccacccggataacggcatcttgtgccgccaatgatgaagcagacaatgccaaggctaaaagacagtttattttcatgttgtaattgtgtttatgttcgttcatgtcatttatttgcgggcatccaaacgacatagcctttatcctgacgattgcccagagcataataaggaatagccgaaaccgacactttctttcctgtcttatccagtgcctggcctttaattacattaactccattcagcagttctttttcaaaagtcatcgataaaggagcgcgcgtatcgagtctcagatcagccaccccttcattgtcacatccttccaggcaatatacaaaaggaccggcagcaatggccaccttattttgcagatccgctacagcttcattggccgttaccaaccgcggctgaacaggtaatatcaactctactctatctccctttttccacttccgctgaatttcggcatatcctttaaatattttcattgcgatagatttgccgtttactttcagattgacagcagacttcacttccgaacgatacaaatcgtatggattctcgactccctgtgcccatcccggtatccgtacttttaataaaaaagttttttctttctccggttcaacagtcatgacaacagaaccatcccatggatatccggtcttttgcgtcaaccgtatccgactctgatccgataggctcagttccgtttcactgccgataaagaggtttacatagatatcatcccccttctgtgaatagataaatccgggcattgcggacatcattttcaagaacatgggcggacagcaaggacaatcatgccatccccaacgggcgtgcttggcggaattcaacggattctgataagtatattgtgtacccgaaagagaaatgcctgtcaggacattattatataaagtacgttccagctcgtccatatatttagcatcaccggtcagttcattcattctctggctgaaaaagccggcaccgacagcagcacaagtttccagataagcatccgtaggcaagaaataatcaggcccgaacttttcgtcaaagtgaacagcacctaccccaccggtgataaacatacgtttaccaatcatattatcccataaacggctgacggcagctatatactccggtgaacgattttcaagtgcagcagccgttgctccggtagcaaacaaggtggcacgaacagcatgcccctcgattgtcttctgctcgaaaagcggaatagaatcctgtgcatagtctccccatgacggacgggtatgattgccaaactcaggagcctcgtatttccggtcgcgtatccattgttcggcagcagggttaccccatgtcccccacaacgggaatccgcaatgttttcctctaccttcgatccagaattcagccaacctgagatattcccgctcaactaccggaacattgatctgtttcttcagtcccggattgtctctatataaggtatacagtttcaccaaagcctcttccggacccgaatgtgcaggaaccacattctttttaggaaaagtccccatatattcagccatcaaattggcacagcgagttgccacttccagtaattttgtttttccggtcgcattataatagtgtacgcccgcttccaccaacataccggcgttgtatacatcgtgttgccaacggagcattcctccccgctctccccactgatggtcggcttccatcagttgagtgtaagtatcgatatacccgttaggttcagacgcctgtgccacagcaatccgatcgatatatccgtccacccgtttttccaaagccgcatccgattgccttgccatcaggtctgccactccacggatagtctcgtaaacaagcccatcgaaccagggagctcctgcatgccgtccgatattgcgttcacctttcgccacacgatcgaagttttcgaacgtattacagaattctcccggatgttccagatgctttccttcaaacttatcgaaaacatcgtttaccgttactttctgccaaagattcaatttgggtttccagaatgtatcttctattttcacttggtttacttccggaaaccgaataccggagctccctttatcagacggccctgccgtcaaacttccggttgcagtcattgcaagtagtaccggaaacataaatctgtacgttctcattgttttatttttagtttgttgtttcttccgctcctttttttgcctgtgaatctttacaatccgagcaacagtgcaaagataatgaaacctatcgtaactgatacgaactggtatgtatttttattatgttacaaaacatatacgatatccggacagtagctgtacccttttacgttttttatcctatctttgcagcaccaaaaacaaaagtatgaaaaggaacgaatcaaaatacaaacaggtagtaaaccacgtaatagacggtatcaataacggtagttataagaaaggtgactggattctctctatcaacgaattcaggaaaaactataatctatccagagatacggtattcgccggtttaagcgaactgaaatcaaaaggaatcattgattcgactccgggtgtaggttattatatagcgacgacccgcatcgcacaaaagctgaatatattccttcttttcaacgaattcaatgaattcaaagaagatctttacaattcatttatttcatccatcaggaaaaccgccaatgtagatctatattttcataattacaaccgaaaggtttttgaaactctgatcaacgaagccaattataaatacacaacctatattctgatgcccggtaaattcactaatatagccccactattggaaagcctatcgggtcgtgtctttttactcgaccatttccatcccgaactggccggaaaatactcttctgtcgcacagaattttgaaaaagacacctacgaagccttggtatacggacttccccacctaaagaaatatgatcatatcataatggttcagaaagaagaaaaagaaccgatcgagcgctataacgggctttgcgcattctgtgaagaataccatttcacgcatgaatataccgactccgtccggaacagggaaatcaggcaaggggaaaccttcatggtcgttaatgaccgggatctcgtcgacctgcttaaacaggcccaactacagaatttcgcaccgggaaaagacttcggaatcatttcttacaacgacaccccgcttaaagaaatattggccggaggaatcaccactttgtctaccgacttcaaacaaatgggacaaacaatggcttcactcattacacaaaaagaaataaagaccatcgagaatccctggaagttggatatccggaactcactttaatgtccggatttcatgtaccaaccctttttttaatatttgaaagatcacacagaggcataccaataccctgcattaaacatcaattattcatatacttctgtgtgatctgtgccaatttctaacatatttccaactgaaatacattgttgagaccgtatcgctacttcgccgcagcgatcatttccacaaagttaccatcccgatcgaacctgacctgtgatccgtctcccaatttataaatccacccctctatgctataagaagagaaatacatattgaggtcatccggaaattgatgtcgcatatatctgtatgttttctcggaaatgctcaattctattttttcttttccaagaaaacctccctgggaatcaaacatcagtccgtcaccattcgtcaactccaccaaaaatgaagctgcaaccgaacgatcgactctcgtaatttcggagttcgaatgtgccgaaatatattcggtaatcttttcaggaagcgatgctaccagcttttcaggaaatgcaaatccgttcccatctatattcaaccattcgctggcatcttcgttgacaagcatattaaatccgttcggcaaacagaccttgaaattcaaaacatccgtatgaagcggatgactgatggaaatggaacgcagtttgccaaagtactcttcagccaaagcttgtgcctgcatcacaggtactactatcggtttgctttccggatcgatagtcacatacaccgtcttgctgacctgaatggtataacaggtaccctccaaacgaatgtaagtaacttgtgcagccggataatcccgatgcaattgttcggttacttttgcaggtaaagtctccagaatcgaaaccggcagcaactctgtacctccattcacttctgtccactgaccacgatcattcagcacacatttaaatccattctccaaccagaatgaataaccggcagtaacattcttattcggaatgtgctccaccaccgcctggaaaactccatccggaaaatacgttgcaacaaaatcacgtacaggttgcggtactccggattcatcttttatatccatttcatagccaatacacgttccgtcataatagaacgctattttcttaccgctacttaacaacacacaatccccataacaggcattctctataccgataaacggatcatcgggaaaaagttgctgtacatattcaataatctttccccaaagagagtctaaggacccgggtaacttttgatccggaatcatcaatcttttccatcctccattttcactaaattccactttgacttcatcgggaaaaacaacacgataaagcaaccgggcattttcctgatcggtattcgttctttctattttctccggagtttgtcccggaaagtaattagataaaaaagattgtgcagtgcccggcagttgattcatttcgattgtaccggaagattcattctcctccgaacaactgcccagaaacggaagtaatccgaataagaaacataagtaaaggacaggataaaaagatttcatagttgcgtggtttttatgtttcagacaaagttaacggaaaggtctgaatataagcacatagaggcgttaaacttctttaaggggcaagtcaaaacgagcacaacgcttactccagctcccctaaagccccaacataaaacacaaaggacagctgtcaggaccgacaacctttgtttatatctatatgcctatttattaaatttacctctcttccacatcaaaggggcggatttaagatcgataatttttaggaattgataaaattatgtaagtttgtaaacagaataatgaattcctctccaatgaaaaacatcataaacaaaatcaggcagttatacccggtttcggatgaagcgctccaggcattacaggcaaacatgcaggtaaagtattatcccaaagatacttatatagtgcaatcgggaataacggatcgcctggtttatttcatcgaagaaggtgtcacccgttctgtatttcatcacaacgggcaagataccaccacctggttcagccaagaaggtgacgttactttcggcatggattcgttatattataaacagccatccatagagagtattgaaaccctttcggattgtaaaatctacgttctccatatagacgaactgaacgccctttacgaaaagtatatcgatatagccaactggggaaggatcttgcatcaggacgtcaacaaagaactcagtcacatgtttgtggaaagactccagctttctcccaaggaacgatacgaacagttcaacagacgctaccccggactgatcaatcgggtaaagctgaagtatgtcgctgcatttctgggtatttccatttatacactcagccgggtacgcgctaaaaaatagctcccggccggtcttttttgcttttaagcaaaagaacttcattttgcaagccgtatctttgccatctgaaaatattaactaactaataaaacacagatgtcgaatatttcttcaacagtttttgcagataccaagccgcattatcatctactggacgggctccggggagtagccgctcttatggttatatggtatcatgtattcgaaggctatgcttttgccggtggtaccactatcgataccttcaaccacggatatttagcagtagatttcttctttatcctttcaggtttcgttatcggttatgcttatgatgatcgttggggtaagaatttcaccatgaaagatttcattaaacgccgtttgatacgtcttcatccgatggtaatcatgggtgctgtagtgggtgctatcacattctatatccagggttctgtacaatgggacggaacacatatcggcatatcgatggtgatgttgtctcttctttgtaccatctttttcatccctgcaatgccgggtgtaggttacgaggttcgcggcaatggcgaaatgttcccattgaacggcccctgctggtcattattcttcgagtacataggcaatatcctttacgctttgttcattcgtcgtctgtcaaataaagcgttgaccatagttgtagtattactgggagtagcattggcttcatttgccatcttcaatgtctcgggttatggaaacataggagtcggctggacactggacggtgtaaactttataggcggattattaagaatgcttttccccttctccatgggtatgcttttatcgcgtaacttcaagcccatgaagttgagaggtgcattctggatatgtacccttgtaatgatcgccttgttcgcagtgccttatttggaaggaacggaatcaatctgcacaaacggcatttatgaagcattctgtattatcatagctttccccatcctgctttggataggagcatcgggaaccaccacggataagaagtcaacccaaatatgtaaattcctgggagatatatcttatccgatctatgtgatacattatccattcatgtatttgttctatgcatggttgatcaaaaatcaacttttcacattaggagagacctggcaagttgccttatgcgtttacgcatggaacatattgtttgcttatctatgcttgaagctatacgatgaaccggtacgaaaatatctggctaaacgcttcctgaataagaaacaataatatgtacttgctctatataagtagcgccataaacataaacacatagctgagatagaagagttgcagtgaaatcactttaaggtaggccttaagtgaattcactgcaactctcattatggaagaatccaatctcggaaaaggcatttgatgattgcataaattgttcaaccggaacttccgagagtccgaacaatacattagtcagaatattcttcagcaagattcagctaatacctaaagttcaaacttcagcacatcactccccccttcttccgttatattcagtcccaatacatatctaccggatggagcaacagcaattctttccaattttacatctgtctgatagatggcaaccggagcaccttgccaggtaaagaccataatctttgatttacccgaagtacccgggaaaccgttataaagggcataaagataattgggagtaccacaaagagaaatgaaatatttaggtgcattcggaaaatcaagaaactcagggtcatactccggggatttcaactctttccctatcactatttctttcatcagatttccttttaaatcataaaaacagagagagttcagattcagcaatcccatacaagctgcctttgcatcttgatttaccattaaacaactttcgtatagatgagataaatgtccttccggatatccggccctaatatcacgatgataatccacagtcgtaacacgggcagtatgcttatcataaatgaaaaacaaaccatgctgcatatctacatcaatgccatatacacaagagtctgtttcattataatccctgactacaggcatctccggcaattgttgtgcctcaacgacagaaacagcgacaggagcgggagatgctgccgaatgaatcgcaacaatctttttattccaactattcaactcaatgaacgatagctttcctttgccctctctgcctatcgatttctcaaaaaaaggaaaaagaaaatcatccgggccctctcctttcatccccaatccgacaagagcaggaggaattgtagcagtgaagatctttaataatgtatcattacgtgtgtccaaaaaagcacaaaaagaatcagttacacacaaatcatagaaaatattcaatccttcttcttccggcaagtagatttcgtattgaagagtatccgtacacgtatcagggatatacacggttaacttttcctgttccgatccgcaagagatcattactatcgttgccagacatatcaataagagtttaaccataatcaaatctttttcataataatcagttttagttcattagtctgacaaagataataactacaaacatatccttaaaagaaaataacaataaatccggtataacaaaggatgcattagaaagaaataacttctgaaaagatcacttatatttttgacagtttgctaaacaacccttctcaggtttgattatttcagcacattagtcgggttcgtactaaaaatcgtctctatttcatttttccgtttatcatattgcaggaatcctgatgttttcacaacacaatgaacacccaaaggagaaagtaagagcattcgtgtttgtttttcgcaaaaataaagcgcttttagaaagtcagagagtagtcttctgtacttgtcaaccagaaaaagaaggagcaaaacaatctctctattatggaacaatatatgtaatcgtgcaaaacattaagagattttcaaaaaagaagtaagcattttcagaaattgcttacttcttttagagtagatacttacttcttttgtaccagatgcctactccttttctaggaaatgtcggcttcagagtccaaaaagcccggcttttcattgcattcaccccgactatcaccctcctatccttccggttgaacagaaaggaaggaagaggaagttatcaaaaaaggcattttaaatactttttgaaagctgatacagataaatagaatcatactatcaaatcgctttctctgccttactttaccagctctgcagtaacataatctctgctatatgtacatgataaacgatacgaaactttccctctttatctttaaacatagtgttataccctacaccctgcaaaagcgccgggattctgcaagataagattttcatcgtatttggtccatttgccgattatatcggttgccggagcacagcctaccccatagaacggactttcaaagctattaccggaataagccatatagtacagctccttatgtttaaacacatatggagtcaaagaataatcaaaatcaaatgagagtgaatcaacccgatacagtcgaggattatcaaactctttacatttcacatgtagatctctaactggaatattagctatcaacatagccattttaattttactttgctttttagagcaatctaactcagaaatcaagaagttaagacagtctctacaagaataaacagaaaatctaacaattaataaactatcttcaagaatctcccttattttcatagaggagttcttagagtcaatgattttttatccaaatcaaacgatatacttctatttttgattgaagttatcatccattttaaggtcatatatctaatatttttttattaaacacacaaagtgaaggatttttctcaagattacccttatcttcaaaagctataacaatatcatctcctagaatcttgaagaaagagcattcttttagttgcatttcatctgtcaaaattgcaaatatttctgatttctttgttttctcactatatctacataagtaaacacgatcataccacataaatgtaaaatatatataatatccatctatctgatagaatcttgcgacagaagcgcagctttgattttccggcttatttaaatacattattcgagcatatatatctttagctccctcctcttcaggtatcgcataagtaccaaaatctattttatactcagggacaagaaaattatctgttacggtaaaaagggtatccttcaagggctcccaatacaacactctccgaccttcttctcctacaaaaaaagcatcaggaaaatggataccatcattcatgaaacgtcctttcacgatttgctgagatgaaaagtctttattccagaagcttagcactggcattttacgataatcacccccaaatctatttgtacttaagtaacgttccgttccaatcggaattatcattgaaggagaaggagcatcttcatccaaaagaaccttttgaactcccataaacttaccatttatatcaaaacgtagtatttgctgtttatcttgatcaaaaatacatacctccccgtcctccataaacatacatccaaaacttaaatactcaccaggtccctgccctttacatgatatattaaaaagaaaatcacccttatcattaaaaacataagcattatctcttgaccatataaagtaacggtcatcttgcttgaataaagcacaaatatcatacaataaagaactatccacagtttctaaatttatcattcttgatgcagatattttcactgtatcgatatgtgataagtctacttctatcctttgggtaacatttttctgttctctttggcaagagaacagaaaaaacaataatcccaaggacaatattactattttcctcatacactttaatatttttcacaagtacaacgaataccacaacaagcataataaccagtttgacatgaaacatcgcatgctgcactagctccccctccttttatatctattccaccacttatagaacaggaggtagcccctctaccaccattatagcaataattcgagccatcagcttcataaactgtaaaagtctcaataccattgttatgcaaagggataggcgaattcttctgctgtgtcattgcaacaaatacattagtaaatcccaatacagcagcaataaatacaaattttttcattttgttcttttttaattagtttgtatttttccaaaccaatatataaatagtagcaaagtagtattttttttaaattttctgaatacaaagatcagtaaaacaaaaaggggaaagggataattactggtcaataaacagtaaaatacagccaaaatcagaaaattagaccaatattacctgtaatgtaacagcagcaaaaattatttaccaaattttactattccacaaaacatatccatgttatttttctctcaatcctgacagtatattaaacaaaaatagaaatacaaaaacaatatatattcaatagctattacaaactaaagacaccccatatatatctgggtgtagccccaacaacaaaagagtgtagcctcaccatatagatagctacaccccttttatcgaacaacagattctccggattcatccatccgttttacgcctatatcgatttctaccccccggtttattcgaccaattccgcagcaatatattccttgttgatccgcatgcggtctataccatccactttttcaaaatagaccttaccgatgtacatgccccgtggatgaatatgctctttatctttatgcgcatgataaacaatgcgaagtctgccctttttatccctgaacatggcactatgccccactccctgcaaattccccggtttctgcaaaatcggattttcctgatatttggtccattcccccatgatatccgtagcggtggcacatccgatcccatagaatggactctcaaagctgttaccggaataagtcatgtaatacaatccgttatgtttaagcacataagatccttcattcacacgcggccacacttcttcccatgcctgcgaaacatgaatgcaaggacgcatcgtctccgttttaatcgtcatataatcgtcctccaattccgctacccatacgttattgccatcattgaagcgaacgaagaaaagataaggttttccatcttcatcgataaacagggagctatcgatcatcttctcgccagcaaccatcggtttcttctcgttctgcctgaacggacctaacggagaatcggctatggccacacagatgtgttcgtctgccgtataatacatataaaacttcccgtcgatctcgtaaatctccggtgcccagaagcggctatccgcccaaacatcatctttatgaagtgcaagcccgtgcagtttccacttcctgagatcttttgatgtatacacttcaataccgtcggccgcatgcgttccgtaagcataataagttccatcgtgcaatagaataaaaggatcgcccaacgaaaccgactttgtcacggtttttgtttttgacctgttttttgctccgacaactcctgtataagaacaaaacacaatcagcagccccagcagccatactccggtactaatctttttctttcccataatataatcttttttcaatataatacaatcattatttcatccggtctttagtaaactgaaaccaatccagtttcaataggttctcggtaccggtcttacctttgaacagcagatacaatttctcctgccgccctctcgcaatccgttcaagagacgttgacttgatttcccaggattggtcgccacccgtattgcccacttcgagcactccgataggttttcccttcaaggaacccagataaacctctatcttcccgccttcggtacctgaagcaactttagctgtaaacgtgcctgcccctttgcctaaatctacattccggtagagcaaataatcgttattatcgatctgccccatgataaatccgttctcggccgcattcttttcaagagctatcccatataggttatggaagctttccgcctcaaaaatacggttcaggtcatccgaccgatcttctccaaaaactttcaattcaaaaatacttaatgcattttcggcattcttcttgtccagcccgtctgctctcagggggatgtcaaccccttccagaatggtcagacggataaaccttgctttcaccggagaattgcccggcttcgtatccgtcaccggagattgtccgacaccgtccgtactccggtctgcaaacactttccacaaatgactgccggaggctgcatccagactgccggcttctttctgtgacaaatattcgagtttatacttgtaagtacggcttgtaaactcaaaaattgtctctatctcatccactttacactcgctgcccaaatctacaatcagccaaggcttatgtgcaccgactccgggatcccaatgggtcccgtaattctcgtctacggcaaagttaccggcataacagaatgaaatgccgtgtgtacgatagcggggagcaaattccgaatcatcatacaccctcgccgaagaggtcaaggtctgctttcctaaagcaagattcgtacgatgatcgcccggaacatcgggagcaaccgttacccccttgtgggttggagtaatgggacggatacttccatcctcattaaagaaaacttcgtcgatacaagtctgccgtttactgtctacaaaaggataatgttgccgatgataagcaataaacgtacgccctccgtaacagaacatcgaatgatgtccgggacccaaaatccgattggcatcatcacgttgcaatataggaacagtcatagaccggttgatctcccggtaaggccccgtgatcttatcggctacggcatatcggacattataattctcactaccgttaaacgaccacatcaggtagtataaattatttctcttaaaaataaacgaagcttcaaaagcattttttatctcttctatctgcgtatagtggtaagtgccgataaatggattggaatcgcttttggcgaataccggatcactgttgtcaatatagatctttccggcctcatcgaacttcaacttcataatcttaaagtgccaggagtcagttacaatatacatcgtccggtcatcatccataaaaaactgtccgtcatatcccttgaaaagcatcttaccgggagctgccccattggcatcttcccacggccccaagaggtcgtccgccataccgacaaaggtattcgaagcaatgctatacatcagataatacttctttgtatccggattgtattcgatactgggagcccatacacacaaggtcccggcatagtccgtccatgattttgggaaggcgatcactttattcttccattccttacagtccttggagtaccacatctgggccggatacacattttcaccacccgctccgtcattggttccgaaagcataaaaagtcttggtccggtcatcataatagaaagatgcgtctgccagataagcaggcacagtcggatttcccgtctgcatcgaaaagacattcacatcttccggttcagtccctatatccttgacggtcaaaacaaagtctttagtcaaagccacgtctcccttccggaccgttgctgtcagggttgccttcttgtttccggttcccgcatcggggcggtaaagctttccactgtcactgatgtactgcccctgagccgagctccacgagatggtagtaccgctcttaccggacgaaggcaacacaaggtcggtggttaccgccgacaaatcgcccaacgaaagtccgtccctgtcttcctgcaccaaccgcccgtccgctaccgatgcaagttcgtatacctgccggtctgtcaaggcatagtcatataacctgaaatcatcaatcccgccattcagatatggatcgggccaggtcggccggccaatgtaattatcggtcgtattacctaacaatgaaggattcacggtaaagtccgtctttatttcagctttcactccgtctacataaagagtgccgacactccctttcagagtgaaagcaagatgatgccaggcgttagccgacagtttacctttctgacgggtatatgcaatgcgttcttccttgtcggtatgatttccactctcctgtgtcttcgtcataaccagagaaacgccgttctcttcattccctctttgggttgtcaaaatcaggtaacggtctgttccgcaagcaaacgtgcacaccgtttggttgtcagactgttcattcagatagacccagacagacaaagtgaaatctttcacatgtgccaggactccgtccggtaacttgaagtgtcctttgttactgagtcttgccgctccctgctgcagacccggcccccactccaccgtacctccgttgatccgggcatcatattttgagcctcctcttccactgttacgggctgtctctcctccctgttcatcgaagttgaattgaaggaaaggaacttgctgcacctgtctttccgcctgttgtatctgctgcccatacacaggaacagataacagggtaaacgcccccaacaggatcaatcccggagaacaggaaaaaggggatttccttaaagaatttataaacataagccaatatctgttttaagtatcaccaatatacctatatgacacattattatccaagcgaagctttacgccttgacaacggcaccacctgaaaccaggtaagcgaacgccacagccactccatcggaccatagtagaatctcttaatccaccaattgctataagcaatctggatgacacagaaagccgctcccagcaaaaagctctgcaaatagttgaactcgacagcaaagttcccgccaaaaccatagaatagggaaactccgactatcgactgcgccatatagttcgtcacactcattcgtcccaccggagcaatacggtcgagcactttctgccccttataccgataatacagcaaagtgaaaccgcagaaataaaccatcatctgtcccagattgccatacgtcttgaaaagagtctgtcctacccgcaacgcaaacccgtccactccccataccggaagcagaaaggcaacagcataaaatactgcccagaaagccagacaataaggtaaaaacagatgactgtacttcaccatcttttcctcacttttgtgaataccctgacgcccgatcagcattccggcaataaacagtcccaataactggaggtaacggaaattattgaatacccacaggcatttggccgactgtccgtcgaacgtattgaaactcagtacatccatcagtgatccattgataaagacatcggccgccctttcaaaaagccggtccatataggctgccgcagcagtcggttcgttagccacattgtcgctgagcagagatacaaaactaatgactgccggtatctgcagaaacagcaaaatgcatagcaccagcaaccatctggtggaaactttataaagaggaatcaagaagactcctaatacggcatagaccataaaaaactctcccatatagaccaatccgttgatatagccaaacaggaacaataaggcaagcctccagaggaagcgtccccggaaatcgactcctttagctgcctgagactccatctgcatgaaaaagctcaaaccgaacaaaagggaaaacatagcgtatgatttcccggaaaacaaaaaatagagtgaatcgtatactgccgtatctattgcctgccagaaaggagactccacaaccggagctaaagtcaggtcgaaacgctccatgcaatgcaagagcatgatgccaatcagtgcgaacccccgcaaggcatcgatcgaattaatacgctttttaggtgtgatcgtttgtgtatgtgtcatgatatgaattaaaaacaggatataaaaagaggcataaggatatagaagcagatctgccagaccctatattccttatgccaatacaacttaaaaaacgcttgtgttattttccgttatctaccgagaatttgaagatacaatgactattgtaggtttcacccggacgcaatacagccgaaggccattcaggtttgttcggagtatcgggatacttttgagtctccagacagacagaagcacgttgattgtaagtaatacctttctttccggtcagcgaaccgtcaaggaagtttcctgcatatacctgaataccgggttcgtcagtgtatacatcgagtacgataccggttttgggtgattcaagagtagcggccttacgggtaatatcgcctttggcattcaacacccagttatggtcgtaaccattaccgttcttcaactgcacgaaatcgaaatcattaatgcgttttccaaccggagtcggtgtgcggaagtccatcggagtaccttccactgttacaatctcgccactggtcataaaggtactgtccacgggagtataagcatcggcgtcgatagtcagcagatgatcggcattgctgcctgcatctccgtccagattgaaataagagtggttggtcatattgacaatggtcggtttatccgtttctgcctcatacttgatatcgatggcattatcatctgtcagcttcataataaccttacaggtgatattaccggggaaaccttcctcgccgtcttttgaaagataagtcaactcaagttcctgcggtcccacctgcttggcatcgtatacctgatattggaatcctttcggaccaccgtgcaggcaatgtccgtagttattgcgcggcaactggtattcaactccatctaaagtaaattttccctgattgatgcgattggcataacgaccgatgctggcaccgaagtccgaaggcttgctgatgtaatcctgaatagagtcgaagcccaacactacatcacgcatcaccccttctttatcgggaaccattaccgaaacaatacgtcctccaaaattagtgacgcaaacctccatgttgttctgattacggagtacatacaaatcggttttctttccgcccacctcagtctggaaattgctctttaccaaaccggaatccgtagtagccttttctgtctctgcacaaccggctacaaagagggcacccagtgcccacatagctaattttctcattattaaactgttttgagtttttattcaccacagagcgacacggagtcccactgagtttttagacagatgaacaaaaggacaaactattctttatttgttcatctgttcttttgtctgaaaacaaatagagcgcagccaatcaatctctgtgggactctgtgctactctgtggtgaatctcattcatttctgtttcgttatattcttactgtatactattcagcatatccactttaccttcattcaccagtttcaggatcaactcaccgaacaaagtattctgccatgcaaaccaggcacgggtaaatttctcaggattgtctttatggaaagactcgtgcatgaagcctgtacctgcatccgtattcatcagcatctcgatgcacgacttgatctccgcatcatccttgctggtgaaagctttcatcatgatactcatgggccataccatatcgtatccgatgtgtggtccgccaatgccctcgcctgccttacctttgaagaagtaaggattgtcgaggctccatacaaaacggcgggtattctgataaatcggatcatcaatcgacacatcacccagataaggcattgccagcaggctcggaacgttggcgtcgtccatcagcatgtggttaccaaaaccgtccacctcgaaagcataaatctttccgtatttgggatgattgtaaacggcatatttcttcagggctgtttccacctcgtttgccaaagccttgcattcattggccaaagccgtctttttattcacggttgtcagtatctcggctgccttgcggagtgaagatacggcaaagaagttggacggaaccagatactgcaatgtcgtggcatcgtccgaaggacggaaagtggaaacaatcagtccgacaggtttcaccggattacccagtccgtcgttggtcactgtatcgagagcacgctctgtcttacgttggaacttatacggacccacaccgtctttgcgctgttgttccttaaaagtacgcaatatgttggtgattgcctgtatccattcttcatcgaagatactggcatcccctgttgtcttccagtactgataagccaggcgcaacggatagcaaagcgagtcgatctcccatttgcgttcatgcaactcaggtttcatatccgtcaggtcgctcatccattcaccccctttaggaccatcattgaacgcattggcatacggatcgatattgatacatttaaactggcggttgataactccggcaagcatcgttttcagttccggatcggaattggccagttgtacataaggccatacctgggcccccgagtcacggagccacatggcatgaatgtctcctgtatatacaaaagtatcgggtttgccgtctttgcctttgcggaagtgtacggtggtatccagtgtattggggaaacaattggtaaacatccaagccagctttgagttacgcaacagtttctgtacacgtatgatttcgttttctacagcctgcgaacggaacagacgcttagcgggttccggacggttgtctttctgaatagcatctgccacacaagtataatgcgacaacataccttcagccttcagtgctgaaggcgcacagagcagtgccgcagtaacgacacatgctccgatcattttctttgaattttttcctggcataatcttgattggtttttattaagtaatctgtttctgtccagcctcaacgtacctctttagagaacgaatacgggaaatccgactcgcgtactccacgctgtttgttcggagtagacgacattttcatcgtaatcttcgctccgttcatcagttctttatgtgtcaggtagttgcgagtcaatgttttaccgtttacggtcattgacgcaatgtaacggttttcatcgctattgcccggtgcgctgatctgcacggtcttgccattctccagatgcagcttcatctgtttgaagtacggcgtacccatcacgtactgatccgttccggggcaaacgggatagaatcccatagcagaaaatacataccatgccgaagtctgtccgttatcttcgtcaccgcaataaccgtcgggattgggtgtatagagtttatccatcacttcacgaatccaatgctgtgctttccacggttgtcccgagtaattgtacagatacagcatgtgctggatgggttggttaccgtgtgcatactgtcccatattcataatctgcatttcacggatttcgtgaatcacaccgccgtaatagctgtcatcaaatacaggaggcaggataaagacagaatccatcatctgattgaacccttgctgtccgcccatcaggtcgatcagtccctgaggatcatggaatacagaccaggtatagtgccaactgtttccttcggtgaaggcatcgccccacttcagcggattgaacggtgactgaaattgtccgtccttattcttgccacgcatcagcttatgctctttatcgtacaggttcttgtagttcatggcacgctgtgcataaaccgctatctcctcttcgggcttgttcaaggctttacccaactgatagatgcaccagtcatcataagcatattccagcgtacgggcggcattttcattgatgcctacattataaggtacgtagcccagttgattgtaatattcataaccgagacgtccggtagacgaaacctgcggatgaacagcatttgcaccgtgtttcacagcttcccaaagagtttctatatcgtaacctttcaatcctttcagataggcatcagccactaccgaagcggaattgttacctaccatacagcccctgtgcccgggacttgcccattcgggaaggaatccgctttccttgtaagtatttgccagtccctcctgcatcttttcgttcatcgaaggatacatcaggttgaggaacgggaacaggcagcggaatgtatcccagaaaccggtatcggtaaacatatatcccggcagcactttaccgttgtagggactgtaatgtaccggtttccctttggcatccagttcgtagaagcttctcgggaaaagtaccgaacgatagaggcaagagtagaatgtacggagatgatcggtattatcgtcttccacctcaatacgtcccagaaccttgctccattcctggcgtcctttggctgcaacagcttccagattgtctttacccagctctttcaagttctgttctgcttgctcggggctgataaaagaagaagccactcgtacgttgaccgtctctccgcgacgtgtagagaacccgatgataccacctgcatgtttatctttcgattccagctcacccggacggatgttgccgttggtaactgctgcggtaaaagtgaacggcttatcgaacaccagtacaaaataattcttaaagttctccggcactcctccactgttcttggttgtgtagccgatgatcttgttctcttccggaatcactttcacatacgaaccgttgtcgaaagcatctaccactacataagagtctttactctcaggaaaagtgaaacgaaacatcgccgcacggctggtcggagcaatttcggtcgtgacatcatgatcggccagatatactttataataatacggtttggcaacctcagctttatgcgagaaccagctcgcacgctgatcctgatcgaacacgacctttcccgtaacaggcataatggcaaactgcccgtagtcattaatccacgggctgggctggtgagtctgcttaaatcccctgattttatcggcatcataggtataagcccatccatcccccatctttccggtttgtgccacccagaagttcattccccaaggcatggcaatagccggatatgtatttccggtagataaagcatgctttgactgggtaccgaccagtggacttacataatccaccggttctgtcgtgctctttgcaaaagtgcagaaagcagtacccaatacgccaacaagtaatagcgctaatttcttcatgatattaatagttttaaattcaccacagattacacggactaacacagtttttttaatcttcagtatcaatgggaaaataattaacctgtgaaaatccgtgtaacctgtggacagaatcttattttttcaacttcttctcaagcatcttgatatagtatccgcctactaccgaacgagcttggaaacctctctggttcggacgatcggtaaatacccagtcagacatcggcacgcgatcggtcgtctcgttcatgaacagataaaccggatcgataaacttctcgaatgtagctttgtccggtgccagtgtagcagtccacataatccagtcggtcttggtataagtttcacggttatccagcggcaatccatattgattctgtttgccaagatagtaagctatctctttctgtgcaactgtttcagggaatatctgcagattcatcagtttatcccataccagattgtatttctggctccatgttccgggcttgtcaaaagtcaggcggtagtgatcgccgtcgtctgccatcttcacccattcggcagccatttctttggctttctgtgtatatttctcagccacttctttcttgcccagcttatcggccagatagccataagacgctacacccaggatggctttgatagacaggttggcgttgtgtgcaaagtgtccggcaaagtcgtctgtacaaagttgattttccggatcgagtccatattgagccagataatcggtccaggttgtcaatacatcccagtgtttctgcgcatagtcggcatttccttcgacaatggcgatggctgcactcaagatcagcatatttcccgattcctcgatcggcatatctccaccgtatgtctggccgttagccaacggataagtacctacatcatgtgcagcgaacggcttattccattttccgctttcgctataatagaagatgtggttcatcagaccttttgccaattccggattgtataccaggaacaaaggagcagaaggataagtgatatccaccgtaccgatcgaaccgttgctgaagttctcttttgagaggaacagcaggtctttattgggggcttccaccaatttgtgggcagcgattgcctggcgataagccaatgcacagagttcggcatacttacgtccgcctacttcagtagcttctttcatcaggttagcatcgaatgcagcacatttatccatcactgcatcatattccttatcagctttcgcaaactgcgactgaatggtttcgtttccattgcgattccagtacggacgaagattttcaccgaaatactgaatagagtacaagtcatcgtaacccagcagcaagtgtccttccgctttcttcgtttcacccagtgagcgaaccagtgccagcttgtcacttccatcggtcttggatgatgtcaattttccgtcgatgaaactctttcttagggtctttccctctccggtagcgcatgaactgttctccttatcggcagccatgtagaagtatccccagtcaatgcggacatcatctccctttttacccaatatttcctggttgcggcttcccgtcttgaggtatagcaaattaccttctgtaaagctttcggctacagcttcctgatgaggctggtcgagtgcccactgcggtcctgcttcgaaatacagttctacgttatgtttatttccgtcattcgaagccacttcataggtaagatagctcaccggacgagtcatcaaatcgagattatccataaagagaggtgaagtgaacgcaagtttcaagtccaccggtccgcaagtaaattcgtagttggtctgcatagcctgcacgtctaccgatttctgtactgctgtctgagtaaagttctgtgtattgtccttctctaccaacagaccgcaatcgatcagaccattggcaacacggttgttacagtaaattgcaatcaggttctctccctgtttcagtgcggccacagcctcttccggcagtttggcaagcatatgttttttagccgagttaccggtatccaccaccttcacgccattcacatagatgatggcgtcatcgtcgtgagaatattccagatatacatttttaccttgcaggttgtctttaatatccgctttacggcgtatccagatatactcttctccccactgggtcttggctgtactttcattctccatagtaccgaaagcaccttctccttctttccataccgcatcattaaagtcggcattctgccagccgtcagccggtttctttgttgtatacttagctgtccatctgccttgttccgaggtcttaaccagcggaagcagctcaagttcttccgttcccatgaaacggtaaatctgtccgtctaccttggcaacacccaagaacgggaagtccttaccggtccagtgtttcaccggtccgtcatacagattatccgtaaacgaccaggcactggtgtaagggtcaatcatcaccaacggataggccggtgcacgcatctcacttttttcactcttgacgtcctgcggtgccccacaactgctcagcatggcagctgcacccaagaacagagtcgatagtttaagcttcataacttcagattctttttttatagtttttaccattcaatatctacttgcacgccggcggggtcgttctcgaacttcaagagcagggtacgcgaacgctcttcccacaatttctccggctgaggctcttctttcccgttcacgcaaacccgtatcggctgtttagggagcaatatcctcgaagcgttagtcgtatgcaacgggctcttggctacaaacgaataacttcgttttcctgccttttcatcatatatcctggaagcaccgcaaagcactttcgcctttgcccgtcccgaaatccgtttgacattatataagtaaccttgttcgcccggacgaatcaccttatgtgtcaataccggaagatctttatcaaacaggtcgatatacacccccgaaagttccatcggagcatccgatacactttcgtccaatacggcagcaatggtatatggtccccgttcgagcaggaaactgtttttcagttctacttctttcccggcactctttctgtaagcagccgaaaccgcatcgaaatattgccggtcatttccgcttttcagcacaaagtgtttcggatcttcacgtataacggtcaccataccttttccacaagggtaagttccggcagcaggtactctgcccagtcccagtttctcgaacaaatgttccgaaggagccttatattgatttccgttggaattccaccattcaagcaccgactgataaggatcgatatcttcgccgcaatagatcagcgctccgccttttctcacccagtctgccaaaaaatcatgatatcggggttccatcggtttcatgttcgaataagacattacaagcaccttcagccccttgaatgtgtctccgaacggagtattctccatgtgtaccaactccaccggtattcctcttttcaataacggcagggtctgtccatagaaactactgaattgcggatcatcatagccatcatgatcggggaaacgctgaaacatcagcgagtttgccatcagtaccccgatgccgtgcgtaccgctcacctgagtttccgaagtccgtatgtcgttcagcgtattcaccataatctgtatctgtgtggagtagtcacgcggaatacgttctttccggtctgttcccgctacttggtacagcccctgataaatacggtccggccaaggcatcacttcgtatgtgtctaccgccggatacatcagttgggcggcaaaagtagcctggtaatttattttataatcgagccagtctttcgcccggtcctcgatggggtcggtcaggaagtacatcttgcggtttaacggggctgtcatcgatttcatacatccatattcaagaaaagcattctcaaatacccgttctttcttcactccgtcataatagttcggttcgcgggcggttcccgtccagacctgcgcgatatacccatccacacaatccagcgaagccaggctcgcttcgggacttacgatctgccacgatgtatagttgacaagtgaatgtgtaggcacaaagcatttcacatccagtcctttcgatttgccgtacgttttggcatacgtgaatatctgattaagcgcgttgtagtacagataatatttcagtttattcgataagtatgtattctcaggagattcatgttgagctctccacgggaatccataatatttttgccattcggatttgaaggcttcactgtatccgccccgcatccagaattccggttcttccagataaatagaagtaatgcccgcatcgatcacccgtttgatctgcttctcctgcatgtaacggatgaaactctcagtaggcacaatatagggaatcaagtgcccgtgcgcaatctcccgcccctcgcggtcgcgctggccctctttgaggtgatctttcaccccatcccattttccaagaaaataatcctgataatctccccaggctacccctgtcataaactcggcccggtaccctttgtctctccacgattgaatgcgttgctcaaaagtaacgcctttcttatccagcgttccgtataccatcacggcatcggcacgcacatctgtttccggtttccacgactctgctgtctggaaattcgtttttgtgcctgtggcggtttgagaatagacgccgccacaggccaaaaacaaaccaatcaaaactaataccctcttactcatgtgtttgtgttgtcacgtgtttgtgttgttatttgaatggagaaatcacttgcatcagtgcgggacatccgctggcatcatagctttccatcacacctgtcgggcagggtttggctgcatccttgaatgtcacattacggtttacatcccggttgttccacgccacgtctatgttgtgacgaagccagtccatatattggggctgattgccatcttctatcaggcgaatgatgtactgtgcaaaaatggcagcataaattccctgttccactccatttttgaatggaagcaatccatcggcatcacacatctcgttgcggacgtagtcggcagccagaacggcatcgtccagataagctttctcgccggttgctttgtacagcatcacggccgaaccgataaatgtagcctgattataaagttgggttgtccagtctatgtccataccgttctgtctctggaaatgatagtgcatattgtctgctatgcggcctttctccttgtcgaaaaagacatccctcgaccatgcatatacactttttgccttttccagataatcgggatctttggttacattataaagagtcatggcccccaccgtagtcggatagttgatgcaagccatcttgccatcgtgcttgaagttccaccacagcccccccctttctttatcatacgactctttccagacatggtagaaccccgaagaggcatgtgccaggtatttcgggtcattcgtgatttcgtaagcacgtgccagcgaaataatccaccacatcatatcatcataaataaaccattcgattttattgtcccaattgtatttatcgtattgttcgtatcctccctgatacacctcttctatcaaccggcgatatttaggagccttcgtacgtttatacgcgttcataatcatatcccaatagatagcctgcacccagatggcagctcttcctttcatatccgaagatatggcatacaacttcatatccggattataaaaagtagaatgaaaagcatccatcgccgtcgttgcgtctttctttgtaaaatgcttctggtttccgtctgcgggctgatgtgcccatgccattgcattgggaagaagtaataagatagctactatggtcagtactttgtttttcatgtttttgcctcagattttaaattttcatgttacaaagattggggaaatattggagaaaggaggataattattattcaataaatagcaaaaactgaccaaaaacgggggataaaccggttactatcaataatggaacatatgtaacaggcttttgaccggaatttgtccattccatccgtaaggtcaggaaacatacggtaatattaaaagaattcatttgtggttctcacgactgaggatgtggcatcattcaccacagagccacacagagttccacagaatcttccgaaaccggacgtctctcatacgaaaaatggttcttcttcaaatttagtggtcaattctttatttttttattttcaagttgataattgtcctttttgcttgctttaataagaaaaaacagacactggctgaataagataactcaagtttcggaagtgagtttacgccgtctgaaccggtatcttcatccttataccttttttcaattaacattgttaacgccttttgcaggttggcaggttcttgtgcgcaaataacaagtcttttgcatttaaagaacttcttattcacatccaaagaacaagctttaactctgtgttaaaacaaagcttttgaggacagaaatcttacttcttaaagatattgattttcagatggtttagtctaagattagcttcttcacctcacggatggactcttcgggagaaagccgggatacctgcttttttgtcaactataaaagagggcttacacgtccgaaaactgaattagattccatgagtaaaagaaaacttaccaccaaatttgaagaagaaccattttgtttttctctattaattagttggaaatagtgcaatctttacttcgtcctgtatacccgggcccatgagtccgggtgcctgtgcccatgaatccacgtactcgggcacggcagcccaggtacgcgggacaagataaagattacggaataagacgtaatatacaggtatccataccattagaagtaggtagcatactgatgtttactcccttatttgtgccggataacaggtgcttttgcttgcaacgacggtgtatcaccctctacaacaggccacccttttttccagtttacacggtcgagcatcaacactcttccttcaggattggccacactgacagcgtgataaaacacccaatccgctcctttatcatctgttacgatctccgagttgtgcccgggacccacgaatgcttcatttttatcaatcagcacttcatgatgattctccagcatcgattccccttttttatctacataagggccaaataagtatttcgaccgccccaccactgtggtatacgtactctttaatccttcacagcaacgaccgatagaggcaaacaaatagtaatagcctccccgtttgtgaatataagttccttcataggctgtgcctgccacctgctgtggttttattccttctttcagggagagcccgtcatcacttagttctgctccataaatgccatgaaagcttccccaaaaaaggtatttcttaccaccatcttctatatagaaaggatcgatacaattctgaatccctatttcattgctccggaacagttttccatgatcggtaaaaggtccctcaggtttatctgccgtagccacaccaatcccgcaggtccactctccaccccaaacagacatggagtaatacatcacataccgatcaccgattttatttatatccggtgcccaaagatttcctttcggctcaaatgtagggcgggtttcattggtaaaagcagtacccacaaagctccagtttaccatatctttcgatcggtgaataggaagatttctgatattttccgttgcgtacaggtaataataaccatcatctgccttgataaccgtagggtcgggaaggctgtaattaataacggggttggaatactgctgtgcaatggaaggaacacagaaagaaaaaacagtaaaaagggaaaataaaagtttcttcatgctgaatatataaattaagaaaagtccccttattcaggatcttcgaaatgtgatccaaattaaggggaacttttgatttt

SEQ ID NO: 5011 - DNA, 326793 bp, Unknown
  gut microbiota DNA sequence
actttcattataactagtacttatagtaaaacgatttgctttaatttcttcggttattatctccccagtccaactatctgctgtataccacaatctataagaatcagaattatttccatgacagaatatctctactcttccaccacgctttgtcttaattctcaaaactttcctagtagggtccaataattctatttcttcaaataaaccggaaccactctgagaaccaatctccaaataatattcggtagtagccactttattcacactacttacctcgatttgttcattattcgacgtattagccatcacgtttgtcatacctaaagatactaatactactgcagttataaaaaatttcttgttcatgataacataaaatttaagggttattaatgagtttgttgaaaaagaaaaaggtatcaggaaagcccgatacccttttccctattaaacattgatatgaattatttcagtcggattactttagagtaaataccctgatcagagcctttaggccagatgcaaatacgaccgaacaatgtgcctcttttcaaagcagtttggaacatactattatccgtatagtctcttgtggcaaaagtgtataatttacctgtttcatcgtaagcatccaaattatcagtttcatcataacggtctacattatgttctgcatcattcacaaactgagtagtacttaacatgaaaaatacccggtcaattcctccacctgcaactttttctactttaaaagatgcatttaccttattaccttctaaggtcatctgtgcatctcttaccagataataaggagtaacttcaacatcctgcactgtattgccagcaacagttacattgatagtatcacgcccttcagaagtccaagggccatttccactctttgttatcatctgatactcgccattaaacaaactagcagaatacataccatcctgattaacatatacattaataggatcgtgtttagcataaccatgttgataaagctgtaattgtacagcttcattgccacgaagttgcaatgcttcaccattatacatcacacgacctgtcaacattgactcaggagcatcgtagttgtctttcatacaactggtaaacatcatcgctcctaacagcaatactgaaaaaatctttgatattgttttcattgtctcttctaattttagattattgatacgggtttttaaccaatttcggattattattaatccagccattgtcgatttctgaataatactgaacatcagtacacttcagcggtttacgccataaatctaatgtctgcatattcttttctacaaatacccatttaccattattagcatccccatctgcaactacgcggtaaggccataagccaagacgctgtgctgtacgatcattttcatttccagtccaaatattatcagcttccatccaacgtttcaaatcccaccaacgatgaccttcgaatgcaaattccacttgatactcatgcataattttctggtgatcgatagaagttaaaggctgaataccggcacgttcacgaacagcattgatatatttcaaagcttctacatcgctgttgttacgactcagttcccaagaagcctcagcagcaatcaagtaagcttccgaaatgcggaaatatacattccacatagctgattttgtaccttgagtaccggccaaaggagttttatccagatatttacgaacgaagaatcctgtacggttaatttcacgttcattacctccgaacggaccattattggcagtaatcaatcgtccttgggcatccgtttcatttctacgacctgttctttctacccattgaccatttactttgttcagttgtccagcctgtaattctattaattttccatcaaaagtggagcccggtaaaagaactgtagccgccaaacgtggatcacggtctgcaaacaaatccatcggatcatcaaagaatttaggatcatctaatgtacctatatcaaactttgcagctttaccacgttctgattccgttgcatctgttgattcataagcctcaaccaaattcaataatacagacattctatcactgccagtatcttgttcgatacttttaggtaagcaattctttgtaaattcatgaccatagccaggagtagcgtagtctcgtgtccaaataacttcagtattaccacttttctcacaaactgctttaaagaagttatcagccaaagcttctgaagttttatcagcagctaacatcaatctatatggagaagccgtaccatctgcagctccttcgataacctcctttgcagcagctaaagctgtacgatagtagccttctgctttatctgcgggtatacctacttcaccaccagcagtcctcaattgaggatgttcggccaccgtattgtatgtagctaatgacgctgccgtaattgctacacgcgcttccaacatttttgctacccaatagtttgcacgagaattgtttttattagtctgcttactcatcatagcagccgcttcctgacactccttaataatgtagtcataagtttcagcttcagtagagcggggaacctgaattgtagtaatatccataccaccggtatagtcaaatacatcatctcctacaattggaataccacctaacccacgggcaatacaaaaataagtccaagcacgaatatagcgaacttcgccttcatacagtctcttggtctcttcatctacagcagtagatcctttaataccttgtaggaattgattcagattacgaatcagtgtatagtcataagggcgccatttatttctatcaatattctcatcactattgttatcataatgaatagcctcatccagcataaaataatcttctactgcttcattacgttggccaaaagtgatacggccataaaagttagccagaacagattttaccaacgccgggtcagcatacacctgatcttgtgtcataatgtcgtttggcttcgtatccagaaagccattacagctactcaacgataatactcctgcagcagcaagagccattaaaaaatatctgtttttcattgtttacttaaaatttgagattaatacctaagttaaccacacgcatcgtcggatagtccaaaccatttgaattgatgcactccggatccataaaaggtatattactgatagagaacaggttggttccagacacatacaaacgcaaattactgataccagctttcgcaacaatccgtttgggtaaagtataaccaaactccagattacgcagcttaatatatttcacattatgcagccagaatgtactcttatcataagcacttgtttcttcattattcaaacgaattaacggatattttccaggaatcaactggctgtccgcatcccagatatctgccagatgccaagcatctttaaatacctcatccggactgttaccatcattctggaacggacgagccgtttcatattgctgttgccatgatgtcatacccgaacccgtccagtccattgccaaatcaaaacctttccagcttgccgacaaattaataccaaagttgagtgtaggagtactatcactacggtaaccgattggacgctcatccatatagtttattacaccatcaccgttgacatccttatacataatatcacccggaacaactgtcttgtttccttttctatcgttatctatcggataagtagcaatctgttcccaacttgtaaaacggccaacagcttcatatccccaatttacataaccaacacgatgccaaatactgttacgataaacatcccaagagttgctatgacgtgtatcatattgttcccaatcccagaaacgtgaataagtcatattagcaccaacgctataattaaaatcactaacatgatcggtccagtttaccattgcatcaaaaccaacatgtttgtccgatctcaaattttcttttggtaaagagaaacctgcttcatttggaatcaacacgtcataacgagattcaggaattccatcgcgaatacgctggaagaagtctacctgagcattcagacggttattaaagaagcccatatctacaccaatatccaggatcttagattccatccatgataaagttttattaggtaaaccacgagtctcagttccaacaacccaatcgccatccaatacggcaccaccgttattgtatttataaccaggcaggtaatcgaacgcagtataatcactcacattatcatctccaaccacaccgtatgaaccacgtatcttcaaattagaaaacacgttggcaatcttactttctttccagaaattttcttcagaaattctccatcctaaagaggcagaagggaagaatccccaacgattttccggtttaaatttccaagaaccatcccaacgaccaattaattcgatcagataacgatcagcaaaactataattgatacgtcctaaccatcccatacgagcttccgtattgttaccagtatcattatactccacaatctccttaaaacgaatcagatccataccgttggcaaccggaactgaatgtacccatgatttggggcgcttacgttgtgtagcctcaaaagaagcaacagcattgatagaatgattaccaaacctacgatcaaagttcaactggaaattagcaaattgatcctctaccttctcacgattacgttcacgataaggattatccatagcagccgtttcataatactcacccgttttttcattgtatccatacaatttgaatgtgtattcctgattatccagttcattataagcataataatagcccaacatacctttagccttcaatcctttcaatatctcatattcagcagttgtttgcatttgaataacacgccatacatcggataccttaccactggtgtcataatttaaaagagcaaaatttgtctctttctggtcagaaacaagttgtgggtataaaggattgtcgttggcatacggacgctttgtcggctgattcttcatagttgcaaaacgaggcaaccatgtatcatctcctccaggaacacccggatggtgacgatcttcaatacgtccattcatcgtagcaccaatcttgaaacgatcagaaatattcatatcaatattcatctgggcatttgtacgtctgaatccaccgtaaccacgtacagtcgcttcttgatcgatatgagaaactgctacataataattagccttatcggtacctcctgaaagattcgcactaatatatgattgaggagcagtaatccaaatatagtcgctccaatcaaaaccctggtagtttttctcagtaccggccatccattttgcatattcctctttgttgtacctgcgatcattgtccgcctttttagcccaagtttctgcagagacataagcgttcacataatctttagtcttagctggctgaacataacgtgaattatgctgccaaccatagtaagcattaatagatacggaattcttcgaattacgctgtcctttctttgatgtaaccactactacaccattggcagcgcgcacaccataaattgcagcagaggcatctttcaatatagagatagattctatatcgttaaagtccatgtgattaaactgtccatcatcagatacaacaccgtcaattacatacaatggagcacccatattacgtatctgtagttgtgtagaagcacccggacgtccatcattctgacgggtattgatacctgctattttaccaaccaatgcacctgatgctgttgttgcattggaacgttcaatgtcagtagaagcaattgcagcaacggcacccgtcagtgttgcttttttctgtgacataccgaaaccggtaataacgacttcatcgagtacttttgtgtcttcctttagaataactttaactgtgtttgatgcgcctacgtttactttttgtgttgtgtaaccaataaatgagatttcaagtgtagctttagggccgacactcagcgagaattcaccgttcatatcggtgatggtaccagttgtacttcccggctcttttacgttagcaccaattaccgcttcgccattggcgtcgataactataccctttacagtccgttgttgttgaacggagttcactgccaatacagtttctgttgccgggttttcggcactggcgaaactgtaggcacttggcaaaagcgaaaaggcagccatacaaagtggtatgcgccacattctgctacgacttgcgagccaaaacatttgttcttttttacgcatagtacataaatttaaaaaacaggttctataaatctttaatgtataaaagcatcgttatggaaataatcctcggaatataagacgggatgtatttcatagtatagctttcacggtttcgaaacattgcaaaggaaagttatttttagctaataagacgataatattcgttcaataaacaacaaaatctgttcttttcaacatttcaatccccctcacagagccctaaaagcacatctgaacagattctgctatttattgaacagtatttttcatctcctttctgcgaatttggtcacctttgtataattcctcatttattaattaaataatgtattaagcaaacatgaaattacacattgctatgctggcagctaccctgctgttatccggaggagcctcgtacgcccaagggaacaaacaggagaaaaaggcgaaagcctacatggtagcagatgcccatctggacactcagtggaactgggatgtacagactaccattaaagagtatgtatggaacacgatcaaccagaacctgtttctgctgaaaaagtatccgaactatgtattcaactttgaaggcggagtgaaatatgcctggatgaaggagtactatcctgcacaatacgaagaaatgaagaagtacatcggggaaggccgctggcacatttccggaagtagctgggacgcaacggacgctctggtaccttcgactgaatcgttcatccgcaatattatgctgggacaacagtattacagacaagaatttggagtggaaagcacggacatcttcctgcccgactgtttcggatttggctggacactgcctactatcgcttcgcactgcggcctgattggtttctcttcacaaaagctggactggcgtgtgcatccgttctatggtaagagcaagcatccgtttacaatcggcttgtggaaaggaatagacggatcgtctatcatgctggcacatggatatgattatggcagaagatggaacgacgaagacctttcagaaaacgaacaactgaaagaactggcaggccgtacacctcttaatacagtatacagatattacggtacaggcgatatcggcggatcaccgacactggcctctgtccgctcagtggaaaaaggacttcgcggaaacggtccggtagaaattgtcagtgcaaccagcgaccagctttacaaagattaccttccttataagaatcatccggaattaccggtattcgacggtgaactgttgatggatgttcacggtacaggatgctacacctcacaggctgccatgaaattgtacaaccgccagaacgaattactgggagacgcggccgaaagagctgccgtaactgccgaatggctgaatcaggccaaatatccgggaagcaccatcaatgaagcatggaaacgcttcatttatcatcagttccacgatgacctgacaggaaccagtataccgcgtgcctatgaattttcatggaacgatgaactgatctcactgaaacagttctccaatgtactgacttcttccattcatggtatcggcagagaattggatacacgggtcagcggtattccggtaatcctttataatgcactcggatttacggttacagatattgcggaaatagaacttgaccttccaaaagcccccaaagggataacggtgtacgatgaaaagggcaaaaaagtatcggctcagctcatttcttataccgacggaaaagcacgcatcctggtagaagcaacagttccggctacaggatatgtggtatatgacatacgcacatcaggaaccggtgcaagcaacgtctcgacgaacgtcaataccttggaaaactctctgtacaagattacattggataaaaatggagatatcgtctctctgactgacaaaaagaacggcaaagagctggtgaaagccgggaaagcaatccgcctggcactcttcactcagaacaagtcatacaattggccggcatgggaagtgttgaaagagacaaccgaccgtactccggtttcgattacggatgacgtgaaaataactttggttgaagacggaactttacgtaaatcgctttgtgtcgagaaacgtcacggagaatctgtcttccgtcaatacatacgtctgtatgaaggtagccgtgcagaacgcatcgacttctataacgaaatagactggcaatcgaccaacgcattgttaaaagccgaattcccgctcaatatcgaaaacgaaaaggctacgtacgacttgggtatcggcagcatacaacgtggcaacaataccgaaacagcttacgaagtatatgcacaatattgggccgacctgaccgatcgtgacggaagttatggtgtatcggtgatgaacgacagcaaatatggatgggacaagccggataaccatacgatccgtctcaccctgctccacacaccggaaacacgcggaggttacgcatatcaggatcatcaggatttcggtcatcataccttcacctacagcctgatgccacatcagggagccttggataaacctgccactgtagagaaagccgaaaagctgaaccagcaactgaaagccttccgtacggaaaagcacaaaggaaatgtcggaaaatcgttctcgtttgtcgcttcggacaaccgcaatgtattgatcaaggcactgaagaaagcggaagaaaccgatgagtatgtagtacgcgtatacgaaaccgaaggccggaaagcacagagcgccacactgacctttgcaggggaaatcatcagtgccagcgaagccaacggtacagaaaagacaatcggcaatgcaactttcgaaggaaacaagttgcaggtaaacatcactccttattctgtaagaacttacaaagtacgcctcaaaccatctggacgtgaggcgtctccgatcgaatatgccgctttaccgcttgactacgaccgcaaatgtgcttcttataatgaattccgtggagaaggcgacttcgaatcgggctattcttttgcagccgaacttctgccggactcactgatagccggtcagatcactttccgcttgggagaaaaagagattgcgaacggaatgacttgtgaaggtgataccttgcaactgcctgcgggaaacaaatacaaccgtctctatatcctctccgcctctaccgaaggagacaatcaggccgacttccgcattggcaagcagaccgcttcattcgttgtaccttcttataccggcttcatcggccaatggggacataaaggacacaccaaaggatatctgaaagatgctgagattgcctatgtaggtacacaccgccatgcatccaacggtgatcagccttatgaattcacttatatgttcaaatttggtatggatattccgaagggagctaccagcgtaatcttgccccgaaatgagaaagtggttttgtttgctgctactctggttgccgaaaatgaaccggctacaaccgttgccggcactcttttccgcaccaataacgtaggtaatgcagctactgccggaaatgatgaagaagcagtacgcgaaaatatcctgaaaggagctaaaatcattgcttgctccggatataccaacgacgaagaaaaaccggacttcctgctggatggtaaaacggatacaaagtggtgtgacgtttcgcagactccgaactacgtagacttcgatctgggtgaagcacaaaacatcagtggttggaagatggtgaacgccggacaggaaagtcactcatacatcaccaatggttgcttcctgcaaggtaaaatgaacccgggcgatgaatggacgactctggatgctatcgacggtaaccatgcaaatgtcgtttcacgtccgctgaactatgacggaaaggtacgttacatccgtctgcttgtgactcgtcctacacagagcaccggaggcagagatacacgtatctacgaactggaagtttataaataaacagaaaactgtaaattcaatgacaatagtggctgatagttggaatactgtcagtcactattatcttttttcactacctttgttcattatgaaaatacattcagcattaactattctttgtctgttatgcaccatccattgcgcagcagccccacaaaaagccgtaagcgatactcttttgtcagcccggttcaaccagtatgcccgtgaaaatccgatagagaaattatatctgcatcaagaccgtaccaactattatgccggagaaaccatttggtttaaagtgtatcaaacactctcttcctcagcaaccgaagccagcaggattgtatacatagatctgtcaaatagtaaaggagaaattgtaaaacaagtcaagtatcctttggcagacggagcagcctccggtagcctttcgatcccggaacatctacacgccggccattatcaacttcgtgcctatacccgatggatgcagaattttgatccggagtttttcttccatcgtgaactaacgatttatggaaattcagagaaagacaacattctccagcagacaacaaaatttaaactgagattcttcccggaaggaggaaatctaatcaatggactcacctcccgaatagcattcgaagtagtggatgccaacaccggaaaaggggttcaaacagaaggggtcatactgaatgcccatggagacagtatccgtaaatttgctaccagtcacttgggcaaaggaagtttctttttcatcccacagaaaaaagaaaaatacattgcccgtctggcaggagataacacagactttaaaataccttcgataagcgagcaggggtttgtaatcactgttaaacacctgaaagaagcattacgtatcttattgactcaaaatattggcccttcaaccaaaaactcggtttattcacttatcctccatcaagaaggacggttgattgccatactacccgtcgatggttcgcaaccgcatacacttttcgatttgcctttagataaacttcctacgggcgtcttcacactaaccctgatcgatgaagactatcatgcctattgtgaaaggctggtatttactcactttcccgaaacactcaacctaaaactttcatctactatttcggtacaagaaggacatcgaaaaatgtcggtgaatatccgtagtactgataagaaaggaattccccaaccgggttctttctcgctggcagttgcacaaacttttttagagcaaccaacgatccgtgacaacttcagtacctacttatttcttagtagcaacctgaaagggcaaacggaacaaccattaagctactggaatccggaagatactgaaagcctgtctaaaatagaactgctattgctgacacaaggatggcgacgctactcacttgaagttttcaaccagcccgacaatctcccccgatatcctatggaacaatctctcatcctatcaggaaaagtggaaaatataaataaacagaaggctaaatctgttgaacttcaggctatcctacgtcaagattcactcaaacaatttattacctgtccgttggatggacaaaaacgtttcagcctatcgggaatctcttttgaaggaacaaaggaagtcatgctctcagccaccgacaagaatgggaaaacctatccgatcaaacttgatgattccattccggttccatcggtgaaatatatgccttctccttttgcacctgatagttcttttcatgtacaatgggatattaccaagtcctacatcccccaaaaggagattgacaaacagctattcgaattaggagaagtgaaagtaaccgcacgaaaaaaagatccgattgaaaagcggcgtccttatagtgaaggattcgtgaaaacaagtactcaagtgaaagcaagcaacagttttggagatgtccgtcaattactgagaacagtgcccggcatcaccatggttcctaatccggataaaacaaagagtaacttacagtatgcccacatcaacggacttcccggaggaacagtagctgccttggtactggatgggtatattgccaaagatcctgaagttgtatatagcatggaggcatccagaatcgaacgggtagaagtcctgcaacagacgtccactcagtttggaggatttagcagttatggaggcactatcgtattatatagccgtccgatacaaggagaagttatagcaacgaataataaaatctgccagtggataggttataaccagacaaaagaattttatactcctactctttccgatcattcattcttcgaacattcggaacaaagaaatacactgtactggaatcctacagtaaaaaccgacaaggaaggtagagcacaagtatccttctttctaaacgatcaggagaacggagaatacgtgattcattgtgaaggctactcggaagagggattgattggtacggacttccgggttacagaggtgccggaacacccttgacagccacttcatgcttaaaccgacaccaacttaagtagaacagacaggcaacataacatctcttggaaagaaaaaagggttgtatccaagcaaaacaagcttttgatacaacccttgataataaaccctaattatataccggttcttattacttctgcattttatccattaataccttcatccaataaccaccgatcacggaacgtgccttgaagccgacaaacttaccgctatcggtatgatgccagtcgctcagcggaacacgtgatacggtttcattagcatacttatataccggagaaataaatttctcgaaagtagccttatcagaagacatggcagcagtccacataatccagtcggatttagtatattccttgcgggaatccaacggaagtccataagggttttgcagtttggtctgataataagaaatttctttctcaatcacattattggggaaaaggttcagattccacatcttgtcccaaaccatattgtacttctggctccaggtattctcacggtcgaatgccagacgataatgatcaccctcacgagccatttgttcccatttggtagccattgctttggctttggcagcatatcggtcggctacatcatccataccgagcatacgggccatttcactgtaggcaactacacccatgatcgcttttaccgaaaggttggcgttatgtgcccagtgtccggcaaagtcatcagtacagagttggttctcgggatcttgtccgtattccgccagataatcagtccaaatggtcagtaaatcccaatacttcttagcatagttggcgttaccttctaccttggcaatagcagcagccaggactaccatatttccaccttcttcaatcggcatgtcaccaccgtatacctgtccgttagcaataggataagttcccaggtcgtgagccgggaaaggcttgttccaacgtccgctggcactatattcaaagatactggtcatcatgcctttctgcaattcggggttataagccaggaagagcggagcagacggataagtcaggtcgacagtattgatacaaccgttactattgttctctttagagaagaagagcaagttaccatccgcatccttgaacagcttatgggcggcaatcacctgacggtaagccaatgcacacagttcagagtattctttgccacctgctttttctgcatcgttcagaatcatttcgtcgtaagcacggcaacgttccatgacagacgcatagtttgctttggcacgctcaaaggcatcgaagatgcttaccttaccatcatgcttccagtaggccatgcgaggttgatagaagtattcgatagcataaatatcatcgtaacccaacatcaggaagccggatttgccatcggtacctactttacccagatcgtcagtataggccatagccggcatctggtcggcacgacgggtcacgcactcggcttgtgtaggcaacaaagaacccttggtagcaaactcgttcttcataccataatagttacccaggctgacagctgtattggcacctatatttcctgccagataagcatatccccaatcaatacagataccgtctccttttcgtgcgaggataggctggtcgatagtccctgcctgtacataattgataccgttacggcggatcactttcgaacgggtaggttgcgtcagttcattgatggcaagctgcggagtggtctccacatacatctgcacatcatgttgcattttgtccagcgaacgaacgcggtaagaaatataattaacgggagtagacaacaaatcgaggtcgtccatcatcaaaggtgcggtaaacaccaggtccagttccaccggaccgcaagtaaacgtgtagtaagtttgtgtggggagtacgcttaccgatttctggacggctgccgtctcaaaacctgtcgtctgtttgttcagacgataaaggccgaaatctacataagcacctcctgttgtgttgtgacagtgtgcggcaagtacgttttttcctttttgcagcttcttcttggctgcatccgatagttcgagtaatacgtcgttgttccatgaatagtctgtagcaaccagcttttcaccattcaggtagagttcgaatacatcgtcgtgcgaatatttcagatagatggtttctccgttcatatcatcgttaatctggaaatcgcggcgaacccagatgtccggagtagtccagcgagtatggacacgaggcatatcgggagtaccgaaagcaccttgtccctctttccatccggcagcattgaacgaaagggcgttccatcccgcagccggctcatcgaaagtataactcccctgccaggtatcggtatcggtcatgggtacaagggtttcaagattcaatttatctttccccataaagcggtaagtcttcccgtctacacggatagcacccaacaaaggatgttccgttccagtccagtgcatagtgctgctttcgttcagcgcatctgtgggcgaccagatggacagataggggtcggaagtgatgagaggcaccgccggcgcacgcaaagcaacatttctacttgccttatacaggtcggctgcctgcgcattgcacagcataccgactgctaaagccattgtgaatagttttttcattattttatttattagtatgtttcaatctaaatagtatccttcaacaatctttaccttaatcaaaaacctgtgtacctatcgacaccctactctaatcacttatttaaagaattgcatatctttgtattgatagctttcacctgagcttcattcaccttaatcactttccggtcgtatgtcatcagtccgttcacctccatttctacatccgtagtctgtgtatagacagcagctgagaaacctcttgaaatcaaccgatacagttcattgccgtattcaacgtattgtttagttactccttcgggtgaattgaacttcacgtatccccagttgtggttcggttcccaaagatgttcattcagtgccaggccgatgccgccatattcacccaacacggtagcacgtccggcatcgtagaagtcaagtgacggattgggataatgatgcaggtcaagaatatcaccgcaagggaagtgattgccgccacttgccgggttcaccaggcgtgaaggatcatacttctttgtccatgtcgcgatatcttcagtcttgaactgtccccaacgctcgttaaacggaacccatacaccgatacaaggatagttgtacagataatccatgatttccttccactctttgcgatagatctgttccgactcctcgctacgattcagttcattgccggtgaagtagttgtacatctgccactccggttcacggtcgccgttcggcatatcctgccatacgatgatacccagtttatcacagtgtgtataccaacgtgccggttccaccttcacgtgtttacggatcatgttaaatccgaagtctttggttttctgaatatcataaaccaacgcttcgtctgtcggagctgtatacagtccgtcgggccaccatccttgatcgagaggaccgaactggaacacatcttcattgttcagctgcaaacgtacaattccgtccttgtcacggcgggtagagtatttgcgcatagctgtatagctatctactttatcggtcactttaccattgctcaatagggcaatctgcatagaataaagagtcggagaagcaggactccacagtttggcatcagcaggcatctgaatgtcaatagtctggccgttcaatccttttccggtagcaaccagctgtttaccatcgaaaacctttacttcgacaacttccgaaggacagctggtactggtagtaacgtccactgtgagtttcttacggtcgatgtccgaagtcgtacgaacattagtaatatgacgttcggccacaggctccatccagacagtttgccagataccggtaacagccgtataccagatgccttccggacggtttacctgtttgccacgaggctgaggtccgcgatctgtcgggtcccataccttcacaacaagtttattgtctcctttagtagccaaagcagccgtaatatcgagtgaaaaaggagtaaatcctccggtgtgttgtcccaccttaatgtcattgacccaaatatcagctttccagtctacagcaccgaagttcagcatcacttttttacctttccaggaagcaggtactgtgaaagtacgctgataccaaagttctttgtcggggccgactttcttaccaacacccgaaaggctggactctatggcaaaaggaaccagaatctgaccttcgtaagctgaaggagcagctcctttctcggtgatggcataattccacaaaccattcaggttcttccactctccccgttccatcaccggacgtggatactcgggcaatacattttcaggattcacctgctcagcccactttgtcttgattttgtctcctgccggtttccattgtgcaaaagcggaagtagctatcgacgctgtcagaactgcaattaaaatgctctttttcattgtcttcaaattatgtttaacctattaatgatgcaatacgatccccgggacaggtaggcggctacctgtcagactaaggaaaaaatgttctaaatgactattttatttcaaaagagtacccgaaggtttcggcaaggcaacccctgcacgaaccggaatccccaaatcgggcattccatgggcatcccatcctattttttgtattcgcggattacgggtttcaggactcccggtgtctccattggtcacctgacgggcatggtaaatcatataccattcagtcccatcgggcgagggaacaaaggagagtccacccggaccataaacttcattctccaacgattgctgaaataccggaaccgaactctttgtccaggaagccggatctaacaaatcactctcggcatcggcagtcaacatcccgacacagtaatagggtgaccacgaaccgctggcagcgtaatatagaatcaacgtcttattatctttcgaatggaagaactgaggcccttcattcacataaatggggtaagccgtacggctgccatccggattgacccactgccgttcccattcatactcgggtttggatatcaggacacggggtgaatcgagtgtccacggatctttcatcctggcaatatagatacattgagtttcggcattggttctccttttgggccatccggaccaggccagatagcggactcccttatgttcgaaagtggtggcctgtatcccccaattccattcgggattggttatgatacttcctttcatttcgaactttccctccatcgggtcgggtgaagagttttcaagtacgtacaactggtgattatccgtattgccgtcgtcggctgcataatatatataccatttatcattgatatagtgaatctccggtgcccagagatgacaactgttggatggatcctgaggcttccacactatcttgcaaaccgcatgagccatatcagtgatatcggacgtttcccaaagcatgatcttatcttccgttccatgggtataataatacttaccattatggaaaagagcactcggatcggccccttccggaaacaaaggatttacatatgtatcctttgccgcacttaccgactcctgtttctgtccgccgctcttgttgccacaaccggcgcagaagaataaggtagtaataaatagcaggtagatctttgttttcatagctttctgttattaagatgctacaaagaaaaaacattttcgttgaataaagggataaatactgctcaataaacaaaagaatctgttctttttatactctaatattcacataacccgcatttcgcatcgtattggtcagtaattgctatttattgaatagtttgtgtcgcacatttcatacagaattcacaaactttgtagcatgatatcagatgaagctactgatttgtattgaaataacccctaaataataaccataagtaaaaacacccaaacatgaaaaagatgaaaagtctgaaaggaggcttggccggaatcctatttacagccggattactggcagcatcgtgtacttccgatcaatcatcgtcggcagtaaccatcgtgaaccgccccgactgtacacaaaccaacgtaaactatgtaggaaaccgcttgccactgaaaccgatgaatttcattaaactgcccgtcggaagtattcagcccgaaggatggttgaagaaatatctcgaattacagaaagacggtctgaccggtcacctgaatgagatcagtgcatggctgggcaaagagaataatgcctggctgaccaaaggaggagatcacggatgggaagaagtcccctattggctgaaaggatacggaaacctggcttatatattaaaggatcagaaaatgattgatgaagctaaagtatggctcgaaggagcattcgccagccaacagcccgacggatactttggtcccatcaacgagcggaacggaaaaagagaattgtgggcacagatgattatgctctggtgtctgcaatcctattatgaatattcaaatgaccaacgggtaatcgacctgatgaccaattactttaaatggcagttaagtgtaccggacgaacaattcctggaggactattgggaaaacagccgtggcggagataacctgttaagcgtatattggctttataaccgcacaggagatcaattcttactggaactggctgagaagatacaccggaacacagcagactggacccgcccgtcggcactgccgaactggcacaatgtaaacatcgcacaatgtttccgcgaaccggctacctattatatgatgacaggagattcagccatgctgaaagcatcttataatgtacacaatctgatacgccgtactttcggacaagtaccgggcggtatgttcggtgccgacgaaaatgcccgcatgggttctatcgacccacgtcagggagtagagacctgcggattggtagaacagatggcttccgatgaattgatgctttgtatgacgggcgatccgctttgggcagaacactgcgaagaagtggctttcaacagttatccggctgccgtgatgccggatttcaaaggattacgttacatcacttgccctaaccagacggtcagcgactcaaagaatcatcatccgggcatcgacaaccggggacctttcctggcaatgaacccgttcagcagccgttgctgccagcataaccacgcacagggatggccttattatgccgagcatctgattctggctactccggataatggtgtagcggccgccatgtatgccgcctgcaaagcaacggtgaaagtgggtgacggaaacgaaataagccttcacgagcagacgaattatcctttcgaggaaaccatccggtttacggtaaatactccgaaagctgtaagtttcccgttctatctgagaatcccttcatggacagagggtgcaactatctttgttaacggcaaaaaagtagcggctaaccccgaagccggacaatatgcctgcatcaatcgcgaatggaaagacaatgaccaagtggagattcaactgccgatgcaactttcgatgcgtacatggcaagtaaacaaaaacagtgtaagcgtagactacggtccgttgacaatgtcactgaaaattgacgaagattatgtgaaaaaggacagccgcgctacggctatcggcgactctaaatggcaggaaggcgctgacgccagccaatggccgacatacgagatctatgcaaaaactccttggaactacgcattggtactcggtaagaacgaacctttgaaagactttaaagtagtacacaaagaatggccggctgacaacttcccgttcacggtcgcaagtacacctatcgaggtaaaagctatcggacgcaaggttccttcatgggttatcgatcaatacgacttgtgtagcgaacttcctgaaatggacgctccgaaaggggaaaaagaagaaatcaccctgattccgatgggagcagccagactgcgggtttcggctttcccgaacacaagagaataaaagatacccggtgataaacattaatcgaaagacactcatgaggaaaaaaaatacatttacatatctgctcatcggactgggcctctgcttctcttccttgggaagcgggctccgggccgatacccccgagaactatatcaacaaccgctatccattggtacgcaaacctttgatggaactaccgttaggcagcattaaggcaaaaggatggttgcaggaaatgttggtaaggcagaaaaacggggcaaccgggcaaatggacaaactgtatccgctggtgatgggcgaacgtaacggctggctcggcggcgacggtgatcaatgggaaagaggaccatactggattgacggtttacttcctctggcatatatcctggacgatgcgcaactgaaagctaaagtgcaaccttggatagaatgggctttaaaaagtcagcgggaagacggtttcttcggtccggccaaagactatcccggagaggccggcatacaacgggataactctcacgactggtggccgcgtatggtgatgctgaaaatactccagcaatattattctgccacgaacgatcaacgggtcatccggtttatgaccgactatttccgttatcaactgaaaacgttaccggaaaagccgctcggcaactggactttttgggcagagttccgtgcctgcgataatcttcaggccgtatactggctctataatatcaccggtgattcattcctactcgatctcggcaaactgattcatcaacaaagtttcagctttgtagatatggtgaaccggggagacctgaaacgtatcaatacgattcactgtgtcaacctggcacaaggtatcaaagagcctgtcatctattatcagcaagagcccgacaaaatgtatctcgatgcggttaaatgtgcttttcgtgacattcgccagttccacggacaaccgcagggtatgtatggtggtgacgaggcattgcatggcaacaatccgacccaaggttcagaactctgctcagctgtggaactgatgtactcgctggaaaaaatggtagagatcacgggagatatcgacttcgccgaccatctggaaaggattgcattcaacgcactgcccacccagatttcagacgattttatgacaaaacaatatttccaacaagccaaccaggtgatggtatcacgccatcgtcgcaatttcgatcaggatcacggaggaacggacaactgtttcgggctgctgacgggatatccttgttgtgcatcgaacatgcaccaaggttggcctaaattcacccaaagcctctggtatgccactcctgacggcggactggctgttacagcatacgctccatcggaagtgacggccaaagtagcggatgggtgtacggtaactttcagtgaagaaacctattatccgatggatgacaaaataagtttcaccctccaatcgatggacaaaaaacggaaagaagtaaacttcgctctccaattacgtatcccgaaatggtgtagacaagccggaatatcagtcaacggacaacttcttcaacatgccgaaggaggccggatggccattgtcaaccgcaactggaaaaaaggggaccgggtggaactccatctgccgatggaagtcactgccagcacctggtatgaaaattcggtaaccattgaacgcggtccgttggtatttgccttgaagatggaagaaaaatgggagaagaaagagtttgaagagccgtggtatggtccgtattattactcagtgactcctaccgaaccatggaactatggattggttgatttcaatcgtaacaaagcgaacgaacatgcccgtgtaacgattcatacggaaaagcaatcttccgtattcccctggaataaggaaaatgccccgatagaaatacggatgaaagcaagattggtaccttcatggaaactttacaacgaaatggcagggcctcaaccttattctttctgtagcggaggcgaagggccggaaacagaaatcaccctgattccttatggatgcactacattaagaataacggaatttccggtagtgggagcctcccgatagagaggtgaataatcactccgaaccattataataataactcaatattcatacacaagtcctcctttctctcctgcctgcaagtggaggggaaagaaagactcaaacacacaattacaatgaaaaaacttttagcagcagcaatgctattcatgctgaacagctggtcctgtttcagtgcagatactccgcgagcggagtatccccgtccacagttcgaacgggaacaatgggtaaacctgaacgggacttggacattcgatttcgattttggtaaatcaggaaaagaccgccgtctgcagtcggcagagaagtttgataagaacatcactgtacccttctgcccggaaagtaaactttcgggagtaggctataccgatttcatcgaacagatgtggtatcaacgcaatattaccatcccatcggactggaatggaaaaaagatattcctgaacttcggtgctgtggattattgtgcggagatctacgtcgatggtaaattcgtacaacgtcatttcggcggttcgtcttcgtttgccgtagatctgactcgctatgttacccccggaaagactcacaatctggtggtattcgtacaagatgatctccgttccggactacaaaccggaggaaagcaatgcggtaactattattcgggaggctgctcttatacccgtactaccggtatctggcagactgtatggatggaagctgtctcagccgacggtctgaagtcagtattcgtacgcccggacatcgaccagaaacagttggtcatcgaaccggaattttataatgaatcggccaacacattggaaatcaccttgaaagacggaaataaaaccgttgccaagaaaagtgtaaattgtgccaacagttcggtagtagttctgccggtgaagaatatgaaactgtggtcgccggaagatccgttcttatacgatctcgtttatcaggtaaaagatgccaaaggcaacgtactggacgaggtgaaatcatacgccggtatgcgcaaagtgcacacagccaacggacgtttctatctgaacaaccagccttacttccaacgtctggtactcgatcagggattctatccggaaggtatctggacagctccgagcgatgaagatctgaagaacgatatcgtattgggaaaagaagccggtttcaacggggcacgtcttcaccagaaagtatttgaagagagatattattactgggccgacaaactgggatacatcacctggggagaatcggcaagctggatgctcgatgtaaacaaggagctggctgcgcgtaacttcctgggtgaatggagcgaagtagtggttcgtgaccgcaatcatccctcactcgtaacctggactcctttcaatgaaacctggggtggcggtccggatgcttatgtccgcctggtacgtgacgtatacaacattaccaaagccatcgacccgactcgtccggtaaacgacgccagtggtgataaccatgtgataacagatatctggagcgtacacaactacgaacaggatcgtgccaaactgactgaacagctaaaaatggaagaaagtaaagagccttaccgcaatgcgcgtgacaaggacttcctggccgtctacgagggacaaccttacatggttgacgaattcggcggtatcccctggatggcagagaaagatcgcaaaaactcatggggatacggtggtatgcctgaaaatgcagaagcattctacaagcgtctggaaggccagatcaatgcttttatcgactcaccgcatgtgacaggtttctgctatactcagctgactgacgtggaacaggagaaaaacggtatctactattatgaccgtactccgaaattggatatgaaacgaatcaaagctatttttgagaaaataaaataaaaggagtgcctccctatgaggggacattgcagaaatctgtttacctgtgatgggatactttcatgaaagggaggctttcaactgttatctgctattttattattttgcaaatcaatagttgagtcgttgtcgggtgtagggtatacaaccggatagtggcctgtaaagaccgtacccccggctcaactactgattgccattatttaaatacaagtatgagaaaattattcattgccctcaccttcctgctcgttccggcttgtctgtcggcacagttgggaggtaaaatctaccttcagagagccgattcactccttcaacgagtactgtctctttatgaggtaaagaagtatggattgctgatggagacttatccacggaatcccaaacaacaaattacatatacagccaacaccggttcggaagttactcaacaagaagtatccttcttatggccttattcggcaatggtgtcaggttgcgtatcgctttataaaacatccggcaacaagaaatacaaaaaactgatggacaaacaaatcaagcccggacttgacttgtactgggataccacccgccagccggaatgttatcagtcttatccggccttcgccggacaaaacgaccgttactatgatgacaacgattgggtagcgattgacttttgcgactattatgccgtgacaaagaacaaagagtacttaaagaaagccatcgccctgcacgactacatctactccgggtggtcggacgaactgggaggtggaatctactggtgcgaacagaaaaaggaatcaaagaacacttgctcgaacgcacctgcaacggttctttgcatgaagctctacaagttgaccaaagataaaaaatacctcgaccaggcaatggcaacttaccagtggacacgcgataatttgcgcgatccgtcggattttgtctattgggacaacaagaacctgcaaggcaagatcggttatgccaaatatacgtacaacagcggacagatgattcaggcaggtgtactgctctatcaggccaccggtgacgaacaatacctgaaagatgcacaacaaacggccaagggatcttacgagcatttcctgaaaccgcaaccaacggtaaaaggagaaatgaagtttttcccgtctagcccatggttcaacgtcatccttttccgtggtctgaaagccctttacgaagttgacaaaaacgatacttatgtaaaagctatgatcgacaatgcagactatgcctggcagtacacccgcgatgaaaacgggctgctgaacaacgactggtcgggcaaccggaaagacaagttcaaaagcttgctggaaaattcctgcatgattgaactgtactcggaaatcagcgaactctaatatagatttaccacagaggacacggagttgtagcttactgttaaacaagtcagcatatctcaaagaagatttcctctcatgctctccgtgcactttgtggtaaattcacaacagacctgcacaaaccaataatcttactaaaatgaaagcaactacctccttggcaacttcttgccgccgactcctgttatggggaatactcacccttcaatgtctttttagcaccgcccagaaacgattcactgccgatgtggaacaacaagcggaaaaaatactctcacaaatgacccttgacgagaaactgtcttatatagggggtatcaattggatgtatacccgtccgctggaacgtttcggcatcccccgactgaagatgagcgatggcccacaagggctgggaacacacgggccctctactgcttatccgtgtgcactgatgctggctgccacctggaacgaacaattggctacggaatacggaagcgccctgggtaaagattgccgcgcacgaggagtacatgtcgttttaggtcccgcagtcaacatttaccgtgctccgatgtgtggacgtaatttcgaatatatgggagaagacccgtatctcacttcacgcatggcaaccggatatataaaaggcgtacaagggcaaggggtcatggctaccatcaaacactttatcgccaataactcggattatgatcgtgatcatatcagttcggatattgatgaacgaactctaaacgaaatttatttcccttcttttcgggcagccgtacaagaagccgaagtaggtgcagtgatgtcaagctacaatctgctgaacggaatttatactaccgaacacccgtggctgctgaaaaatgtactaagacagcaatggggcttcaagggaatcctgatgtccgactggggatcgactcatcattgcatccctgccgtaaaaggggggctagatctcgagatgcctgccggaagcaagatgcaacccgaagaactgaagtactacttacggacaggtgatatcacaatcgaaatgatagacgaaaaggtacgccacatcctgcaaactctccttgctttcggattccgggaaacacagcagccggatactcatatcccactgaacaatccgcaatgcgcccaaaccgctttgaacgtggcgagtgaaggcttggtattgctgaagaataccaaccagattcttccaatccgctccggcaaagtgaaaacaatcgctgtagtaggtaaaaacgcacaaggatatgtttgcggaggcggcagtggtgaagtacatccgttccaatatgtatccgtattggacggtatacgcaaagaagccgccgaaagaggcatccgggtagaatatctggatgtatacgactatttaccgactattatttttaccgatactgaaagaaagcaaaaaggcttccgtgctcagtacttcgataacatgaatttggaaggcactccgaaagtggaacagactgagacgaaaataaactattcctggtcgggtggtacgggattaaaagagatgcccaaagagcaattctccgtccgatggaatggaaccatctgtccacaggaaacagatgaatacctgttcacccttggcggagacgatggatacagactatatatcgatggaaaactcatcgcagacgaatggcacgaaggtgctttccgcaattccacttatcgttgcatgctggaagccggtaaaaagtatgacctgaagatagaatacttccagaaaggcggaggtgctactgtcaattttatatggaaacagaagaatgcctcaaacaatttattcgttgaagcactgaaccgaaacgacctggtagtggcttgcatcggattcaactcagatacggaaggagaaggacgagaccgtaccttcgaactccccgaagacgaagcacaattactgcagaatacgctgcaatctaaacgtcccgtagtaggtatcgtcaatgcagggggcaatgtagagatgcaaagctgggaaccttccctgaaaggactactatgggcatggtacggaggccaggaagccggaacggcaatcgcacgtacactcttcggggagctcaatccttcggggaaattacctgtcacttttgagaaacgatgggaagacaatcccacttttcacagctactacgatccggacggagacaagcatgtagagtacaccgaaggtatatttgtcggatatcgtggatacgataaactgaaacgggaagtacaatatccatttggttacggattgtcgtatacccgttttaaactttcggcaccgactgtcggtactccgaaaacggacggttcggtaacagtcacctgtaaactcaccaacaccggaagaacggcaggcgcagaagtcgtacaactttatgtatccaacaaagatacgacagtggaacatccggaaaaagaactgaaaggcttccggaaagtatatctggaaccgggcgaaacaaagagtatagaaattactgttccggcagaagcattctcacattatgatacgggtagccggagatttgtcatcgaccggggtagccacgacatcttgttaggattttcttcccgggatatcaaagcaaagatgtcggtcgggatttcacgttaaaatagtctaaacttgagccggacgtgtctccgttcgtcccaaaacgtgtttaatttgcaatattgttaaaacccaaagcctatgaaactcaaacatatccccttactcctgttggtactgacctgctgtccggcttgtcaaaacaagaaagcttctgccactaaagagattccttccgaagctacttataccaatccactattggcagtaggagcagaaccatgggctgtctttcacgaaggcaaatattattacacacaaggagccgagaataaaattatcctttgggaaaccaatgacatcaccgacctggaacatgctgcccggaaagaagtatggattccaaaagaaatctccaactcttatcacctctggggaccggagatacaccggattgacgggaaatggtatgtttatttcgcagcagatgacggcaacatggacaatcaccacatctatgtcatagaaaacagttctcccaacccgttggaaggtgaatttgtgatgaaaggacgaattaaaactgacaaagacgataattgggcaatccatgccagtacattcgagcatcagggtcaacgttatctcatttggtgtggatggcctaagcgccggattgaaacagaaactcaatgtatctatattgccaggatggaaaatccgtggacactctcgtcggacagggtgatgattgcggaaccggaatatgaatgggaacgtcaatggatctcacctgatggcagtaaaacagcttacccaatccacgtcaacgagtccccacaattctttgaatcgaagaacaaggacaaagtgctgatatactactgtgccagtggaagctggactccctactattgcatcggactgctgactgctgatgccggcagtgacctgaccaatgcggcatcctggaagaaacaggatactcctgtctttgagcagcaacccgaagacagtgttttcggaccgggtagtccctcttttgtccctacaccggatgaaaaggaatggtacatgctttatcatgcccgaaaaatccccaacgatgcaccgggagcaacagactcccgtagtccccgtctgcaaaaaataagctgggatgcaaacgggatgcctgttttgggaaaaccttgcaaagaaggaacgcaaattaaatagtacaatccgatcgatctattgtatacacagttatacatcccctctttgtcaataccctctttactctcctttcagttgatggaaaaagagtaaagagggtactgattgtttaagcgatgacagtcatctatcccctgtggtgcatcatatatcttgggataatgcggagtccgcacttgtatcaatgataatctttcggcaatactccaaactgaatcttaaagcatttggcaaaataggacgaagaactgaagccgattttctcacacacttcggttatgcgcactccgcttttcagcagctcggcagctttattcaaacggatagtcttcaggtaatcattgggcggcataccggccaaggcctttatcttacgatagaaattggaacggctcatattgagtgactctgccagtgtatcgacggagaagttctcgtccgaaagctgtgcctcgaccgctgcccgaaccttagccatcaattcacaatctttctgagacacagaatattctaccgggctgataggggcagccccattgccacctgataattcagacatcattttatggaaggcttggcgcagcttcagcaaattctcaatctgcttgcgtaactgacggatagagaacggtttttcaatatatacgtcggcaccacactcgaagccttccaccttggcttccagtgtcgtttttgcagttaacaggatgacaggtatatgggagtattcaatgtccgacttaacttttgccgttaactccagaccgttcatctccggcatcatcacatcactgacaatcacatccactgtctcgttggcaagtacctcaagtgcctgccggccattctgagctttcaagactttaaaccaggtactcagagattcccgggtcagattcagcaagtcgacattatcttccaccaacagaatggtaaatttactgcccgataactcggtaccctgttcttcgtcagccgcttcccgaccatccggtatcactacttccggttcttcagatacagcctcttcaccccaaggcaaagtgaggacaaaagaggatccaccatatacactatcttcaaggctcaacgtaccatggtgtgcttcagccagtgatttggagaaagccaaaccgatacctgtacctactgctcccgattttccgtctttcacctggtagaaggcctcaaatacttttcgcttttcaacatccggaatacccggaccgtcatcactcaccgaaacccggaagccttcatcggaagagactaatttgatatcgatacggctttgggcatattttactgcattacctatcaggttgacgataattttgcagaccttttcacgatcgaccgaagcaaagatctcgccttccggcagatcgagcatcactgagatgcctttcagttcggcgggactcgtaaactggctgtgaacatcacttaccaattggttgatatcacacttcttcagactcaactgcaccccaccattttccattttctgaaagtcgagcaactggttggtaatccccaaaaggtaattgacattccggtcgattaccgataagtacttggcatcccgcccttctcgtttatcttccaatagtttctcaagaggaagccggatcagactcagtggagtacggatttcatgcaccagattaataaagaaactgatcttcgacttgtagacctctttttctttcgtagtctggtactcttccatacgacgtttgtatttcttcttcacatgccggttccaatgccagcctgcataataggcaagaccgaggaggagaagtgtatagacacaatatgcccatgtagtcagccaccatggaggcgtgactacaatcagcaaggaagtagtctggtcattccatttatgatcgttgttcgaaccccgtacctcaaactcatacttgcccggaggcaaattggtataagaagccgtattctgttcggagttaataacccactctttatctactcctttcaggcggtaagaataacggtttttcaaaggatcttcgtaactcaaggctacaaagctcacagagaaagtattatgttcgtaaggtaacgttatggtttccgcacgatagaggggaccttccagatgaagaatatcctgcaccagccgttcatccgtcgtataaggcaggcgtatttcggtaatatatatggaagggatgtactgattatccatgaattgatcggggacaaaagaattgaagccactgattccgccgaaatagagtttaccacttgctgttttcaatgaagattgggctgtaaactgattgccttgcagtccgtcattcaccgtaaattggcggaaatgctgctttgtgatcggattgatcgttatcaacccggcattactggatatccagaagtcaccggtcttgtcttgttcaatggagtagatgacccggttgggcaatattgtattatccggatcgaaatcaataaatgtttcggtcttcggatcgaacgaacaaagtccgcctccattggtaccaacccacatggtacctttcagatcttcaaataatgtaattacggaattattagtgatggtagtcgaatcattcctttcatgctggaaatgtttccaatgcccgttccgggtattaaaacgaaacacaccgctgttggatgtaccaatccaaagattgtcgtacatgtcttccagaatatcaaccacagagaccattgaccctactgtggtaattgtcgagaaattgtcttcccggggattgtaacgacacagtccccaactggttcctacaaaaatatccccgcttcgatctttatatactgccaggacatcgtcactgcaaattgtgttcggagtatcctgtagatgattgtacgatttcacatggccggtccggaggtcgagtaccttcaacccttcggcataagtaccaatccacaaacgctcgccatccaacaacaaagaacgtatgtcgtacttcttatccacgcctccgcctatcggataagcggtcagttgatgagtggagacatcgaagaaacacaacccatcacgagtacccacccagatatccccggcagcattttcgcaaaaaggacctactacttttccggcagccacacctccatcccgataaacaggaggataataatcgaatcttttagtcggtttagccagataattcactcctcccaaattagtcaacacccagattccaccttctgcatcgcgcatcattgcattgatagactggtcgctcaagcttctgggatctgacggattatcgattcgtgagaagtttttatcatgtaagtcaaaaaggtagagcccattgtcggtacccaccagaagctctgtttccgagtaattcagcagacaacggatcgcaccgaaattcagatgggatgcattatagcagtccaggttgccggtacgctcgttcagacagtacaacaagttgctccccgcaccgaaccagatatcactccggatatcgagcaaacagttgatacgataattatcgggattattgccggcagacaaaagaggataggattgcaggaatttaccgttttcatcgaagcaaagcaaaccttcctgtaaagaagaggcatagatatgtccagagttattctcacaaacgtcccatacgaaagaggtctgaagactattctgtgtcaacacatccgtttgaggattataaacaaataatccttgtcccaaagtggcaatccagatcaaaccgctttcggactttattattttctttatctcactactgataaaaacgccatagcgggtcttcttatcaaaataagtgaaacgatcgtattcacggtcgtagatataaagtccccagttggttccgacccatatattgtggttctcttcctcaaaaagtgcctgcacaaagttgttctctagcgaaaacttatcattcaggacatttctgtaaaccttgttaccacgtccgttatagcaatttaaaccgtcgctcgttcccagccatataaagccatagctatcttgcatggcgcaccagactgtgttatgtgataatccgtcttctacctgatacttcttaaaagaaaaataggagaatgcctgtaacggtgttatcccaaaagcaaataaggtaattagtagagtgatgattcgcatgtgttgtattcatttaagattaaaaaaacgacttgttgttatgtatgtgcataatctgtctgaaagcatttatcggttcagccatggctccggattcagtttgtccctctccctgcgcaactggaaatgaagaacagtccgtccattgtcactaccatccgagaaaatcggaccgatagcctgccgggtcgttaccgtatcacctgatttcacggaagcggatgaaagattacaatataccgagatataatcaccatggcgtatcagtacattgaaaagtccgttcaattggaacacggcagccacttttccatcaaaaatagcacgggcctgtgcacccggtttcccttgtatatcaattcctttattatcaagttttacgttacgtaatccttccacagcatattgtccgtaatggctggtaataatgtagggtcccgtaataggcatcggcaatttacctctgttacttacaaaattacccgagagttcacggtcggccttgctcatggtgaaacgttccaaaggttctgctttcttctttgctggaaccgtaccgcctcccgtcgaagacgatttactttctttggcagctgctttccgacgggccgccgcttcccgacgagcttcctcttcagcacgcttacgtgcacgttctatctcttcggcaatcagcttatcaatttttgcatttagttggttggcctcacgccgtttcttactaatctcactttgcaatcctttctgtttcttttgcaaaccggcaacgatctcacgtttttctttttcctgtgcttccagtttagccttttcaccttcccgttcgcgcaacagattttctttagcaaccttcacctgctgaagctctttctttttacgattcacctgttcttgcttcttcaggatctcctccccctgcaaacgctgataagtggcatactccctcacataacgaaggcgacgataggtctgcccgagacttttggcagaaaagataaacatcaacttctcctcaaccgacttattcttatacaaatactgtacggaagattcatacttcttcttcttatccttcagatcccgctggagtcccctgagctgccgctctaatccggcaatctctcggcctacagcctccacatcattgtttatggcaatgatatagcgctttctctcctctatttgtccggtaagggcagcaagtccgttcaactggctacccacatctttctttgtgttcttcagcaatgactcagtctccgcaatctgttgttgcagggcaccacgtttactttccagctctttgatcagtttattggactgagctgaaatcgtagttgtcagacagagacagcttatcagaatcaaaagaaagcggttcatagtttcatcagcatttttagcagatcctccaatgctacttgagtgtatctggacgatacctcagtaggtattaattcgaattcggcagtcgagaaatcagatagtctcacctttgccttttccagagatggaattcccaattcacgtcctgtgagctcctttttctcacccggaagtgaagctttgaacaaaagtttctccaatcggtcaaaatcagcattctcgggcagtattccctttagctcatcacgggttgcccgcacataacgtttattcatacggtcaatcagtaacacctcatccggggtaacttccatacgcattacttccgagcggaataccggcatcaggacagataactggatccgttcaccgcttttcatcttcatgctgccgcttacggtcatactgccgtttttgttgggcactgtcagttgcagtttagatgacagataagccggttctaccggtgtagtcttgaccacctttgatgttttacaacctgcaagcagaactaccataagtagcaaaggcagcaggtacgactgtttaatgacagtttgtttcaacttacttcctttcattctgcaatgtatttcttttcttctattttctgtttaagtgttttcgattcagtgcccagttccagtgctttcttccaatatttcaaagcaccttctacgtcaccggtcataaaatagatatccccgcaatgttcaaacaccacgctgctctcttcttccggtttggtattcttgatggcatcgtcaatatagatacgggcctcagcatagtttcccttctcaaaaagaatccaagcataagtatccagataagtagcattgttcggtgcggcttttacggttttatagctcatctcctctgccttatcgagatctctgcgctctaccgataaataataagcataattatttagtgcacctatattggacgggttgtaaaccaaagctgaatcatacgctgcatatgcctccttcatcaacttcttggtatgatatacatcacctataattgtatagaaatcggagaccatttgcttctcactctccggagtgacatgttccagtgctttccggctgacttccagtacatcgtcccaatgttcggcctgattatatgcaatagccagataaaaataaaactccaaggcatccggagttgcctcaatccccggctcacagatcttaatcacctgctcataatcattcttccggatggcggaacctaataaagtcatgcgtgctgctttattggtaggatctatctgtactacttgctccaataccggaatagactgtgcctccattcctttggatagcagatactgtgcataaagcatcggaatttgcacatcatccatatccatctgcatcatccggtcaaagagtccgataacctgtgtactgtcttttccctcctgttcgctctggacgataaactgcctcatcacattcacctttgtatccgaaggaactttccggttcagtagcaaagtatccatctgttgttcaaacagttctttctgtccggtctgctcgtaatacgaagccaatgaaaacaatgccatcggattgtccggttctgcggcaagtactttcttataagtatcataagcttcctgcttcttgccattctgcatatagacatctcccagaatcacctgatagcggtagtccatcggatactcattgaccaggctctctatttcttcaaaagcctttttgtcgtccttcatttgcagatagatacgaaacttctccatggtgatctgctcattctttcccgttttttcctctatacggtttagggtagaaataactttaccatagtcttccttctgattatataaatcgagcaggttgaacaacggatcttgtttagcgggaaaacgcgttgccatcttttcgagtattcctatcgctttttctttctgatcctgctgttggtacagaccggccaatgcctgactataccaataattatcaggggcataagcgactgctttctccaatgcctcttgtccttgcggcacttgtttaaggaaaagataatactgggcaatctcgtatagagctgccgaaccggtcggattgatggccaggcaatgctgcaacagatcgaaagcagccgtatactcctttttcactttcaggcgcgatgcttcaagaaagaaatagtcatatttacgttgctgctccggagtgagatttatttcctgaacggcaacttgctccgattgtttctccaccttgcgggatgaaccgcaggaagccaacagaagcagcagcattccgaaaagcaatttatttattttcattttactacaatatattgattcgaccgaacatctatcctcttccggtatgtccgaaaccacccgcgccgcgttccgtttcgtccagtacctcaacttctttccatacagcttgttcgtggcgcgcaatgaccatctgtgcaatacgctccccatcttctatgacaaacgtctcagccgaaagatttaccaggatgatgcaaatctcaccacggtaatctgcatcgatggtaccgggagaattcagcacagtaatccctttcttcaaagccagtccgctccgaggacgaatttgcgcctcaaatccctgtggcagagctatgaacagtcctgtaggaaccaggcatcgttgcatgggagccaaagagataggttcggaaatattagcgcggatatccattcctgcagaaagttcggtcgcgtatgcgggaagcgggtgcttcgatttattgattacttgtatgttcatattcagtctgtttactatttaacgggcgaaaatacgcaatttgagcctaaaattcatacttttgcagttaaataatgtgcaaataccaaattgtaaagatcatgatggactggaaaagattgatttcagctaagcgtttcggcatggaagagtttcacgaagagcgtcaggaaaaccgttcggagtttcagcgggactatgaccgtcttgtcttctccgcccctttcagaaggcttcagaacaaaacccaggtttttccccttccgggcagtatttttgttcacaaccgactgacacatagccttgaagtatcttgtgtaggacgttcgttaggcaacgatgtatcgaaagcgatcctcgcccgacagcccgaactgcaagactccttcctacccgagatcggttccatcgtctctgccgcctgtctggcgcacgacctgggtaaccctcctttcggtcactccggtgaaaaggccatttctaccttcttttcagaaggaaaaggagctcagctccaagagaagctctcaccgatggaatggaatgatttgacacattttgaggggaacgcaaatgcattccgattgttgacacaccaattcgaaggacgtcggaaaggtggatttgtcctgacttattcaaccttggcctctatcgtaaaatatcctttttcatcaagcctcgcaggaaataagtccaaattcggattcttcaccaccgaagaagagggatttcgccgtatcgcaacggaactgggtcttattcagctcagcgaccgccctttaaaatacgcacgccacccgttggtctatctggtagaagctgccgatgacatctgttaccagatgatggatatcgaggatgcccataaattgaaaatcctcactacagaagaaaccaaagaactgttgttagcttatttcgcagatgaacgccagacacatatccgaaaaacgttcgatattgtcaaagacacgaacgaacagatcgcttacctccgctcatcagttatcgggttgttgataaaggagtgcactcaggtatttttaaataacgaaaccgaaatactttcaggaacttttgaaggggctctgatcaagcatatatcagaacgtccgggaaaagcatacaagcattgttcggaggtatctttcagcaagatttaccgttcacgggatgtattggacattgagctggcggggttcagggttatcaatacactccttgaattgatgatcgatgccgtcacttcgccggagaaggcttactcacagctgctcattaaccgcgtatcgggacaatataatataaaagcgcctgcactctacgagagagtacaggcggtgctcgattatatttcgggcatgaccgatgtctttgccctggatctttatcgcaaaatcaacgggaacagtcttcctgcggtgtaacgactttcggtgtgaaaaccttattcaccccggaagttatctggcaatcttccggatcgtttttcacgaacgattcgatatgacgcatccgtttctcttcaaggatttcgtcaacggcaatcaggataccggtctcttctacatctccaaaaccgtaattgatagccgtaccaaacatacgcatggtcggactgagactcatataagcattcactaacggtggaatattaaaaccgagtttacggatctcaccgttaagtatccggtagtcatccttaaatgaatctttgcagaagatccttgccagttcagcctcatccgtctccatttccagcggtttcatcggagtgataagtccgtctttatctccaaaatgtttcttcaggaagtaaaggatcatgtctcttccctgacggtgataactgggatacatcgttactttaccaaagaaatattttacatttggcatcacaaccgtcaatgcccccaatccgtcccacagattatccaaagcaaatagccccttgctcccggcacgggttgactgatattccaatgtaacgaacgaacgcccgagttcaatagtggtaggcaggaattccttcacaaatcgatccgaaaaattgaacatgtgtgaagtagcaagaaccggagcaccatgctcgtcaaaacgcacatccgtccccagaatataccgatagcctcctaaaatttcttctgcctcaggattccatacaatcaattgtttatacggattctccatcgtatcatactcatcgatatccattgacaaccccgtaccgcctcctgcagcccgaaaggcaatctcacgcagacgcccgatctcccgcataatattaggagagtcctgataagtaataatgtatatctgattattactcttattggtcatacgcaaccgcttgtcttcagtcaactcagctataatcagctccttgcttaccggttcaataacttcttccatatactttgttagtagttgttccttaatctgttacagtttatacacgatatctttcacatattgtgcccactctgccggagttttcgacttatcgaatgtttgccacggaatgggttttccgaaagtgacggtgaatgttttatggcgatttttcagcatctcgtccgccaggtaaagcatagcaatattaaacttaatccccagtgccttgcataaattagccaaattataaaagaaatcagagttacgcccttcaaaatggacaggaatcacatcgcgctgaaactgaacactttttacgataaatgttttcttccagtcaagatcgcgaatcactccgttctgccgccgggaacaaagtccagcgggaaacattatcagttgatcgtccgacttgaatccggcttctaccatcttaggaaaatcttttgcctgtttgcctgttttattaataggaatgcacaacggtgccaagccatgaaggttcatcagcaaatcattcaccagatacttcaccttcccatcgaaatgacgtcccaaaatatatccgagagaaacaccgtcctgtcctcccagcggatgattggacacgaacgtatataaaccgtctttcggaatattttccagacctttcacctccaactttgcatccagaaactcaagacaagcccccagaaaatcgactcccactttatctttcgaatcgcgcagaaaaacatttaattcttcctgatgtacaattctcttcagataggagacgacaaactttggtatgtacttgtagtgcttcggagctttcgtctgaagtatcttatcaatatctattaaaaataaagagtcgtcagccattctttttagatgaaatgattgcgcaaaattaactgttcttttttattaatcgcaataaatcggtagaaaatacagattttgtcccatcaaaaaagggtaaaagaggtcgtttatcagaaaaagaggatgaaaaaagagaggtgagaaggctaattatcaagcaataaagaacgacacacaaaagaagaccatacctggggacgggattttctaactcctcatccgtcggtatggccccactcatattcaggctcaggtattctatttaatcatggtgatgttcatcatggtgatgttctccctcttcacctccttccacgcttaacacaatattacgtactacataagtttcattgcccgactgatctaaacagtaaaccatcaggtgatagtttcccggagtggcgtcagccggtattttaatatcatggttatgtacgtatgcatctttctgtccggccttatccgtataggtcctttcaaatgtaaaaggcttggttattcctgcttccgatgccctggtatgcgaatgaccgtcaaagttgttgtgaatattaatcttataggaagcaatcgcttcattatcgtgaagattcatctcaaaatgtactccatgagaacttccgattcttaatatagcgccttcttcaggttccagcagatcaatgacgggttttatcgtatcaccttcgtcttctttagagcatgacacgaacagaaaagaaaaaaataagatactgattattgacaaataattttttgttttcattttaataaacttttaaatggtactttaattaaaatctgaaagttccgtcccggttcggggatttctactttccggtaaaaactaagatgattaaagtatttggcaccggataaattccgggctgataaagtcacctcggcccatataccccctatccggaggttggcagatactccggcattcaacagctgcgctccgggagtgggatcttcatttcgtgccacccggtgttgtgcggcaatatgctgtacctcaccataaatgctgaactctttatatcgccacgtcagtgtattgcggagtgaagcaggaggcgagaaacttagaggaatatgttcatcgcaattataagtatagacatattctccactgacacgatagttaaagtgtcggaggaagtcaatgcccactgtagcctcaccgcccgcaaacagggcttccgcaccggtgtaccggtaaatctgtccggcatggggcagtatcgaccattctccggtaggccgaagaaaaatataattgctgaaccagctgacaaatggtgacaaacttaccgacaacggcccattttcataggtatatgaaacatcaaactgccaaccgcgttcggaagcaagcgctgcatctccctgttcatgccggaaagtgccgtgatgaactccgttcgatgccaattcattggctcccggcaaccggaagctatggccgacatttacctgaagaagatgacctccggaaggactccataccaaccccagtgaaccggaataatcgccaaaatggcgacgaacggggtaactacgccattcatacttccggataaattcatcaccataaccctgctcccgcagatatattgccaagtaagggtcggtataagcggatgcatctatctttccgtaatcatagcgaagtcctccactgaaggacagagtgggtcccggacgataagtggtcatccagaaagcccctgtggtaaatctccggtaagcaggcaaaagaaatgaataaccggcaatcgtattcctctgatattgtacatcccatcctgccgtgtgttgccatacggcagaagcaaacaacttcagcttaacagcagaactataagtgttcaacgtaaaagccagttccttatccggatctttgtccggtacaggctgagcatcataatgagtatgaaaccggctccactcctcgcgatgattcttctgaaagccaatatcccacgtcagcgcccatttatcgtacaaaaggctctgccgggtagaaactttcaagtgattcacctggctgtacggaagttctatgttacggctgtccccgtcatcctgcaaacgcgacacatcgggaatgccatgtgcaccgggaaagaaccctgttttctgaaaaacattactcacccaataagaagagacataccgttcttttctaaatccggcagcccaactgacatctctctcaaaaccggctgtatttttaagccttcggtgataaacaggcatacgttgggtgaggtagacaatagtatccgtcggaatacgataatccccaaagtgttgttccgaataccttgcccaggtataccaggcatcttttttgatcccaagcatcagtgaacctcccaatgtaccgttgacggatttccccaacaagctcgcttcaccgaataaccggttacccgcaggcaatggtaatggaacaagttcaatagcccctcccattgcatcactaccatacaataaggaagcaggacctttgcgaatacttacctgaccggcattaaatgcatccagctcgagtccatgatcggctccccattgttgtccctcctgcttaatcccattttctacaaccgaaatccggttgaatcccattccgcgaatcataggtttagaaaagcccgaaccgatatccatggaatgtactcccggaagtgttccaagagtttgtatcaagttccctgtgaagtgttcacgcagaaactctttccctaccacctccatacgccatgtggagttcttattcttcagatgctgataactctccgtcaccaccacttcagataaggacacggctttcagtgaatcgggctcttgagcatgcaaggtagagattaaacataaccctcccagcatacccgaaaaaaatccgatacgcatacttaaatcgtcttagttaaataaaacagagtaagaagacaaacggtaaattaaatccagtctgtcttcgcaatttaaacgatatgataaaaaacaggaggaggtccgcgaagataatgcggatagaaagcgatagaaagctttttatcctgaaaagttccactctcccattttacgtaaaggggcgtataagtcagaagagtagaaggggtttcaataaatggagaaagcataaactgacagatgggacaagtctcacatgtgtgatgggactttccggaatgtgcgtctgtacaggttatcgaagtttcttcggaatgattatgaaaaaccttcacgacagacaagggcataaatgtcatcagtaacatccatgcaagccaaatcctatgtctagtatttctcttcacacccatttatatttaaaccgatgcaaagatagaaaacccagcgtcccaaaaacacccaaaaactatcaaaatacacctaaaatctatcatttgacagtttttaccctgtttaaagcttaattttcccccgtcactgtctaaaaaataccgtaaacttgcatcatcgaaaaacaacgaatattcacaatttaaaaagcaacgttatgaaaagtttaagcttcagaaaagatttaattggagttcaagaagagctacttcgctttgcatacaaactaacaaccgaccgtgaagaagcaaacgatttgttgcaggaaacctctcttaaagcgttagataacgaagataaatatactcccgacactaactttaaaggatggatgtacaccatcatgcgcaacatcttcatcaataattatcgcaaagtagtacgcgatcagacttttgtagatcagaccgataatctttatcatctgagccttccgcaagaatcaggactcgacagtaccgaaagtcgttacgacttaaaagagatgcaccgcatcgtcaattcattacccaaagaatataaagtgcctttctctatgcacgtttccggattcaaataccgtgaaatagctgagaaactggacttgccgctcgggacagtaaagagccgtatctttttcacccgccagcgtttacaggaagaactgaaagactttagacaataggccacatgcattgtcgatttctataaatcattttagtgcagatttttagttgtgtatcaaggagcagaaagagagtgattccctttctgctctttttattattccaaatcagtaaaaaacttcctcttgacagaagataagtatacctctgtcaaaaaaggtatttctttatgaggaatatacatacattgaatccgttcttcttgaggagtcaaaacaaaaaaataaggtaaatcaatattcaccaaaacagaatcgatctccgcctccatgttataaatagcaaatttcactttatttgatttctgaaagctacgcatatattcaagactttggaaatctgttaataaaataatattttgaagttctattgaatcaacatactcattcaaattacgtatttgagcatcaatacatttatcacaattaagttcggaaaacctaaatactaatttgggattgtctattattaaatcacctatttttttctgtttgccatcagtatcaataacagtcagttctttatcaattaattgaccattgaactgtatttcatacattctatcctctttttgcatttctaatatgcccaaccgttctcctgtatcttgtctcagttcagaaagaaacgaatgcactttctttaagcctacatgctgatgataaatatagcaagtattagccaccaagaacaataaaacaattacaaggtacttttttttcattcagcactctcaaattgaaatttcaataatacaggattaccttcgcaattagttatctgtttcaaagactcaaatttagttctatatttttcttttataggagaatccggagacaatataacatcaagcatctgcatcagtgcgcttgcagagtacacagagaccaaagcatcaccgatggtatagaaagaagtaacaggaagatatcctaaatccctcacaacaaaactgttgcctactgtagacttaagcgtactccggtcaacagagagatagcgaaagtatcccttatctgcataacgtcctaatatgtaattcccagacatctgcatataactcaaccctttcacaaaatttccttttgcaacagccagacgaaagctattatttatcggctctatatcatcaggaagattacgttgagtaaaatcaatcgtataaaaaggttgagctcctttagaacttacctcataaatagtatcgttaaagggataaatcagaaaagctgtatcttgatattgactagcataaatagtaaatgcggtagtactatacttatccatcttttcttcaaatggaattaaagcctcttctatcttacgagtagataaatcaaacttataaagattaaaacgatctgattgggacttgttataattggagactaaatataaattcctccccatcaagaacccattcaaataagtaaactcaccacaagaaaattccgtggttctcttatcttgaagattataaactacccatttagattgatgctgatctgaaattaaaacagaatctcctgtaacacaaaagaatccaacagaggtaaattctcccggaccacttccttgacaaccaatcttaccgataaatcgcccggattgatcaaacatgtaaactcctttgcgagttctatcaagtacaaatatacgatctttatagaattcaatccgttcaatttcggataacaaacactcatctttagtctccaaaggaataatctcaaccgaatctctcaacaaaggggtcaaatcaataaagtctttcactttgtccggatcaatcaatatggattgaggtttcaaaatcagcctgtccttcaaaccattagacaacgaacatgccgtgagacagaataaggctacaaagatattcactattttcataatttgtttttcatttattacaattatcttacactcatacctaaagtcaatagcctttgtcatatgattgccttacaaggagtacagtcatttttaaaagatcatcaatgatctctccattcaaataagcctcgtcgtagatgacatttatcctccatgtattctatatccaagtcatctttacaaacaattaataacccacattatttcgagacactcttctatcttttcagacaggatgcaataaacattttgatagtctgattatccatttcggtagttggaatcaatgcttcaagaatccgattatcagtatctacacgcaatagcattggagtgggagcatatttgagttctcttcttattaaatcctttgtgtctacataaatatatccatgatactcattgaaacgctgcacagatgttaaatctgaaatcatcgaaccaatcacctttacatattccttacccttctgcctgtctatactattgacaacagcaaatcccgtcttaatacaagtaccgcagtcatgataattaaacaagaacaaaactttttcatgcaataattcattaggcaaaatagaatcgacactatttaatttctttcctaccagccacgtaatatctttttcaatcaaatgttgaactcttgtgtttctgctcgttcgctctttggcatcatactcttttatctgattacagctaaacagaagtatcattaaaagactaatcggaaacaggtaaagccaatttctcaatacgttcattgctatagtttgttgcaaaaatataatcaggagtaacacaaaaagaagtatagatctcacctggaagcgcataaataacgtccaattgtaattcaggctctgttttcagacacaatatcttatttacccgaaagcctcccttatcccgatccttcagttctgaacaaagcaaatacaaatagccattcatcgcataagcatccgaaataaaagtataataactcttaggatcatatggttgacttccttcgtaagtcaggttatcttttatcaaggaaacagaagataaatcaaaagtagctacttgtttattagatgacaaatcatattttcctaataaagaagaactgcttgtaataccatatagagaagtactgtcttttactaaatgcctctgattaagcaccatattcctcctagcattaccaaaatcatggacgttccctgccaaaacaagtgtaaacaaatcccctctttgccaactttcagcactcttcgtataaaaagtggagtcagtaactgctgataagaaaatagtatctttattcataaagaaacgataatcgttcgcagcaggaactgaaaaagaagatataaattccgaatcaaaatatctttttacgttcacggttcctccatccaatatatagactgtatccttctcaacataaaatcctacagggcgaaccaactctccaggtccatctccaggtttaccgatcaaactaaaatcagaaaactccaaatccataacagccacatctctccgagcctcatccaacaaataaatcttaccatcctgatattgcattgtacccacctgagagaaaaatgaagaatcaggataactctttatgtaagaaacgagttcacatttcaacactttttcaggagattcgaccgtacgtccacatccccagaacaataacacccaaaccggacaaaataacaacaagcctttcagtctcttcctgtctaataaattaaaagaagcgctcataatcaacattctgttcttttaccatcacattccacccaccgagtctctgtaataataactataccttcctttttaattcctcgtttgcaatattcagctccccagcaagtaatactaccatccgccgctcccgtccagctatcataacaagtaaaagtaatcttacatgatcctgaaagcgaaagttcagtatctccaggtgtttctgcttcaatcattgccattgcgtctatcgcagccaaacgcaacttcacttttgcattagttgaaccaactgaaatccaaacattgataaaagaaatcgtaacaacgagcaccacaatcaaactaaagattttccgtttcataataaaaagacttatagatttatactacaaactcaaatcatattctaaatcgtaaatataacatattttttaataaatagcattacttcctgcatttattttattatagataccttaaataatggtttcatgctaaataaaacaatcaattaaagtattttatcgccaagcaaccacttatttaaataaaatcacagactgtaataacagctttccagcttattttccttgtatatctccattatttcacatacctttgtctaaaattaaggtattaaaacatccggatgttatatatcaaaacacccggatgttttatatcagaacatccggatgttatctattaaaacatccggatgttttcagacataacttatagatgttatatacctatataataagaggcaaaaaggaaatgtattcatattaaaaacctaaaatactaatgtccatcaattacgcagttaccaagaaagtagacaagagcaaaggtatcgccaaagagcgatattatgccactacacgcgctttacagaaaaaacccgtaaacagtgtacaaattgctaatcaactcgcagaaagaagctctcttcaaaacggagacgtactctctgcacttactcaattatcggatattattgccgctcacctgaaggaagggcgtactgtttccatcgatggattgggcaatttctaccccagtatcaccagtgaagcagtggacaaaccggaagaatgcaccgccaacaaagtatgggtatcccgtatttgctttaaggccgcacccgctttcctgaacaatgtgcggaaaaccgattttgtcagcctgcaacttaaatacggacgcaagtctgcaaagtcacaaaacggttccgacaaggagacaaccgatgttatcccccaccagcaaagcatctctgaagattcttcattatcagacgaataagcaattaacaatcggttgaaaacttctcaaaaagtttttggtggaaaattgtggggaattgtggggaaatacctacttttacggtcgcttattataataaggtgaaatgatacgttttttaggcaatattgaagcaaaggcggacgcgaaaggaagagtttttatccccgcccaattcagacggcaactacagtccggctctgaagacaagctcatcatgcgcaaagacgtatttcaagactgcctggtgctctatccggaagaggtctggaatgaagaactggacgaacttcggcagcgactgaataaatggaacgccaaccaccaacttatcttccgccagttcgtcagtgacgtcgaaatcatcacgatggacggcaacggacgtatactgataccgaaacgctatctgcaaatcaccggtatacaaagcgacgtacgctttatcggggtagacaataagatagaaatctgggcgaaagaacgtgcggaaaaactctttatggaacccgaagcattcggagcagccctggaagagattatgaaagaagaacggagaacaacgaacaacgagctaaaatgaaagaagaagaaacaacatatcacgtaccggtactgctaaaagaaagtgtagatgccatgaacatatctcccgacgggacttacgtagatgtcacctttggcggtggcggacattcccgcgagatactttcacggctcggagacggaggacgcctgctaggattcgaccaggacgaagatgccgagcgcaacattgtaaatgatccgcattttacttttgtacgaagcaactttcgttacctgcacaattttctacgttatcacgatatcggagaggtagacgctatattggccgatctcggcgtctcttcccaccactttgacgacagcgaacggggattctctttccgctttgacgggaaactggacatgcgcatgaacaaacgtgcaggcattacggctgccgatgtggtaaatacatatgaggaggaacgccttgccgacattttctacttgtatggcgaactgaagaacagccgcaaactggcatccgtcattgtaaaggcacgcaccggacagaaaatagaaacgatcggtgaatttcttgaaatcataaagcctctcttcggccgcgaaagagagaaaaaagagttagctaaagtttttcaagcactccgcattgaagtgaaccaggagatggaagccctgaaagagatgctgatggccgcgacagaagcattaaagcccggaggacgactggtggtaatcacttaccactcactggaagaccgcatggtgaaaaacatcatgaaaaccggcaatgtagaaggcaaggccacacaggactttttcggcaatttacagacacctttccgcctggtaaacaataaagtgatcgtacccgacgaggatgagataacacgcaatccccggtcgcgcagtgccaagttgagaatagccgagaagaagtaagggaacagagtgaaacaagagaagtgaaatggaagataaagaagcaaaaaagaagaaaagcaactccctgaaaagtattctgggaggtgatattctggctaccgacttttttcgccgccagactaaattgctggtactgattatggtgctcatcattttctacattcataatcgctacgcaagccagcaacagcaaatcgaaatagataagttgaaaaaagaactgatcgacataaaatatgatgcactgacacgaagttcggaattgatggaaaaaagccgtcagtcgcggatagaggattatatatcgaccaaagaaagtgacttgcagacatcaacccatccaccttatttaatcagtacgaaatagaagatggctgtaaacaagaaaaatataatgacccgctacttcttcgtcatcctgttgatgggactgataggagtagccattgttgtcaaagcaggcatcacgatgtttgccgaacgacaatactggcaggatgtggccgaccgtttcgtcaaggagaacgtaacggtgaaacccaaccgcggaaacatcatttcgtccgacggcaaactgatggccagttcgctgccggaataccgtatatatatggacttcaaagccggtggagtaaaaaaagacaccatgctgatgaatcatctggacgagatatgcgaaggacttcataagatattccctgataaaagcgcttcggaatttaaaactcaccttaagaaagggcgcaaacagggaagccgtaactatctgatttatccgaaacgtatttcatatattcaatataaagaagctaaacgccttccggtgtttaacctcaacaaatacaaaggcggattccatgaattggcttataaccaaagaaagaaaccttttggttcacttgccgcccgtacgttgggtgacttatatgccgatacggcccagggagctaaaaacggtatcgagttggcttttgattctatcctcaaaggacatgacggaattactcaccggcaaaaggtgatgaataaatacctgaacattgtggatattcctccggtagatggttgtgacctgctttctaccatcgacgtaggcatgcaggatatctgcgagaaggcattgaccgataaactaaaagagctgaatgccagcgtaggtgtggccgtattgatggaagtggcaaccggcgaagtaaaagccattgtcaacatgacgaaagccggagatggcaattattacgaaatgaggaataacgctatcagcgatatgctcgagccgggatcaacatttaaaacagcttctatcatggtggcccttgaagatggcaagatcactccggaagacggtatagatacgggaaacggtatcaagatgatgcacggtcggcccatgaaagactggaactggtataaaggaggatatggctacctgacggttacgcaaattctggaagtatcttccaatataggaacttcgagcattatcgaaaaatattatggaagtaatccgcaaaagtttgtcgacggactgaaacgaatgagtatcgaccagcccctccaactgcaaatagcaggagaaggcaaacccaacataaaaggtcctaaagagcgctattttgcaaagaccactctgccatggatgagtatcggctatgaaactcaggtacctcccatgaatatactgacattctataacgccattgccaacaacggagttatggtacggccgaagtttgtgaaagcagccattaagaacggagaaatagtgaaagagtatcctacggaaatcatcaatccgaaaatctgttcggagcggaccttgaagcagattcaggaaattctttataaggtagtacacgaaggtctggctgctccggcaggttccaagcaatttgccgtttcgggtaaaactggtacggcacagatctcacaaggtgccgccggatataaatcgggacgggtgaactatctggtcagcttctgcggatatttcccttcggaagctccgaaatacagctgcatcgtttctatacagaaaccgggacttcccgcttcgggaggtttaatggcaggtagcgtattcagcaaaatagccgaaagagtgtatgccaaagatttacgcttggacatcaggaatgcaatcgataccaatacggtagtgattcccgatgtaaaagcaggcgaaatgatagaagcaagacaagtattggaaggcctaaacatccagacacaggctgaatttaaggctaaaaagaacaaagaggtgtggggacatgcacaggcagcccccaaagcagttatcctgcagggaaaagaacaattacgcaactttgtgcccagcgtaataggtatgggtgccaaagacgctgtatacctgctggaaagtaaaggattgaaagtaaccctgtcgggagtcggcaaagtaaagagccagtcgttgccccagggaactaccatcaagaagggacaaaccatcagtatccatctgaattgattattatagattaaggtatgaaactaaaagagattctaacatctatccaaccggtgaaaattaccggaaatcaggatatcgagataaccggggttgacatcgactccagacaggtagagtccggtcatctgtttatggccatgcgcggcacacagaccgacggacatgcctacattccggcagcggttgaaaaaggtgccacggccattctttgtgaagagttacctgcagaacttgtagaaggagttacctacattcaggttgccgacagcgaagatgccgtaggaaaagcagctacgactttctacggaaatccgagctcaaaattggaactggtaggcgttaccggaacaaacggaaagacaacgattgccaccttattatataatacgttccgatacttcggctataaagtgggattaatctccacggtatgcaattatatagatgatgaagccattcctaccgaacataccactcccgacccgatcacattgaatcgtttattgggacgcatggcggacgaaggttgcaaatatgttttcatggaggtcagttcacactccatcgcacaaaaaagaatcagcggactgaaatttgccggcggcatcttcaccaacctgacacgcgatcatctggactatcataaaacagtagagaactacctgaaagcaaagaagaagttcttcgacgatatgcctaagaactctttcagtctgaccaacctggacgataaaaacggactggtgatgacacagaacaccaagtcgaaagtatatacttactctctccgcagtctgagcgacttcaaaggaagagtactggaatctcatttcgaggggatgcttctcgactttaacaaccatgaactcgcagttcagtttatcggaaaatttaatgcatcaaacttactggctgtatttggtgctgccgtattgctgggcaagaaagaagaggacgtgctggttgctctcagtacgctgcatccggttgccggacgcttcgatgccatccgttctccacaaggatatacagccattgtagactatgcacacacaccggatgccctggtcaatgtcttgaacgccatacatggagtactcgaaggaaaaggcaaggtaattaccgtagtaggtgcaggcggtaaccgcgataaagggaaacgccctatcatggcaaaagaagcagcccgggcaagcgaccgggtcatcataacttcggataatccccgtttcgaagagccgcaggatatcatcaacgacatgctggcaggactggataccgaggataagaaaaaaacgctaagcatcgcagaccgtaaagaagctattcgcacggcttgtatgcttgcagaaaaaggagatgtgattctggttgccggaaaagggcacgagaattatcaggacatcaaaggagtgaagcatcactttgatgataaagaagttttaaaagagattttttcattgactgtttaagcagatctgattgaaacacccccgcttataagcaccggatgttattcaatcgaaaagcgtaaatcgtctaaccgtaaataaagttatgttatactatctgtttgaatggctacacaaactcaactttccgggtgccggaatgtttgggtacacctcgttccgtgcattgatggctatcatcctggcactgcttatttccagtatctggggagataagttcatcaatctgctgaaacggaaacagatcaccgagacgcagcgtgacgccaaaatcgatccgttcggcgtcaataaagtaggagtgcccagcatggggggtgtcatcattatcgtagcaatcctgatcccctgtctgttattgggaaaactgcataatatctatatgatactgatgctgatcaccaccgtctggctgggatctttaggatttgcagacgattatataaagatattcaaaaaggataaagaagggctccacggtaaattcaaaattatcggtcaggtgggtctcggcttaattgtcggactgactctatatctgagtccggacgtagtgattcgtgaaaacatagaagttcagaaatcggaaaacgaaatcgaagtaatacatggcactcacgatctgaaatctacccagaccacgattccttttttcaaaagtaacaacctggactatgccgaccttgtaggctttatgggagaacacgctcaaacagccggatggattttgtttgtcattatcaccatctttgtcgtgacagccgtgtcaaacggagccaacctgaatgatggtatggatggtatggcagcaggcaattccgccatcatcggactaacgctgggcatattggcttatgtatcgagccacatcgagtttgcgggttacctgaatatcatgtatattcccggaagtgaggaactggtaatctttatatgcgcctttatcggagcattgatcggtttcttatggtacaatgcctatccggcccaggtattcatgggggatacgggcagtctgaccattggaggtatcattgcggtatttgccattattattcacaaagaattgctaatcccgattctctgcggtatatttctggttgaaaacctttcagtacttctgcagcgcttctattataaagccggaaaaagaaagggtgtaaaacaacgcctctttaagcgggccccgatacacgaccatttccgtacttcgatgagtctggtagagccgggatgcagcgtaaagtttacgaagcccgatcagttgttccacgaatcaaaaatcacagtccgcttctggattgtaaccatcgtgctggcagctattacgattataacgctgaagattagataacagaagtgacgagcaacaggctatgagctacaagtgcctgccgctaatcacaaagtatgaacctaaaacttgtagcataaagaaaaagatctatcgacggatcgacaaattccggttgataaatcgaaacctaaaaatcatgaaaagaattgtagtattaggagccggtgaaagcggtgcgggagcagccgttctggccaaagtaaaaggattcgatactttcgtatcggatatgtctgctatcaaggataagtataaaactctccttgacggccatggcattgcctgggaagaaggccgacacacagaagaacagattttgaatgctgacgaagttgtgaaaagccccggaattcctaatgacgccccactgattctgaaattgagagaacagggcacacctatcatctcggaaatagaatttgccggcagatacaccgatgccaaaatgatctgtatcaccggctcgaacggaaagacgaccacaacctcgcttatctatcacattttcaaaagcgcaggactaaatgtgggacttgccggaaacatcggtaaaagcctggcattgcaagtggccgaagagaaacatgattattatgtaatcgaattgagttcattccagttggataacatgtataacttccgtgccgatatcgctgtattgatgaacattacgccggaccatctggaccggtacgaccattgtatgcagaactatattaacgcaaagtttcgtattacgcagaatcagacttcggaagacgcgtttatcttctggaacgatgaccctatcatcaaacgtgaactggacaaacatggcattcgtgcccacttgtatccattctcggcaatcaaagaagaagggtctatcgcctatgtggaagaccatgaagtagtaattaccgaaccgatcgctttcaatatggaacaggaacagttggccctgaccggccaacacaatctttataactctttagccgccggtatctccgccaaccttgccggtatcaccaaagaagatataaggaaagcgctcagtgactttcagggggtagaacaccgcctggagaaggtggcacgcgtacgtggcattgattttatcaatgactccaaagcaaccaatgtaaactcttgctggtatgccttgcagagtatgactactaaaacggtattgattctcggaggaaaagacaagggaaacgattatacggaaatagaagaactggtacgggagaaatgctcggcactggtctacctgggattgcacaacgaaaagcttcatgagtttttcgaccgtctcggactccctgtagccgaagtacagaccggcatgaaggatgccgtagaagcagcttacaagctagcgaaaaagggagaaacagtattgttgagtccatgttgcgcctcctttgaccttttcaagagttatgaagaccgtggtgaacagtttaagaagtatgtaagagaattataaaaatcagagtcctgagccataaaaggttcaggctccgaagagctaaaaacttaaagcagtggatctattaaagaacatattcaaaggtgataaggtaatctggattattttcctttgcctctgcctcatctctatcatagaggtgtttagtgctgccagtacgctgacttataaaagtggcgaccactggggacccatcacacaacattccatcatcctgatggtaggtgcggtcgtagtggtcctgatgcacaacatcccttataagtggtttcaggtgtttccggttttcctctaccctatttcggtagtattgctggctttcgtaactttgatgggagtcatcacaggtgaccgtgtgaacggagccgcccgctggatgagttttatggggttacagttccagccttcagaactggccaagatggcagtaatcatcgcggtttctttcattctatccaaaaagcaggatgatgaaggggccaatccgaaagcttttaagtatatcatgatactgaccggactggtatgtatgcttatcgctcctgaaaacctttcgacagctatgctgttgttcggagtagtagtattgatgatgttcatcggacgtgttgcattcaagaagttagccatgttattgggcggtctggcattggttggctgtctgggagcagtatttctgctggccataccgaaggataccgatatcccgttcctccaccggtttgacacttggaaaagtcgtattaccaactttacggagaaagaagaagttccggcagccaaattcgatattgacaaagatgcccagatagctcatgcacgcattgccatcgctaccagtaacgtgataggtaaggcaccgggaaattccattcagcgtgacttcctgagccaggcattctccgatttcatctttgccattatcattgaagagttggggctggtaggaggcgcctttgtagtcatactctacatctggctattggtccggacaggccgaatcgcccaaaagtgcgaacgtacattcccggcattcctcgtcatgggtattgccttgatgttggtatcacaagccatattgaacatgatggtagccgtcggactgtttcctgtaacaggacaacctttaccgctaatcagtaaaggaggtacaagtacactgatcaactgtgcctacatcggcatgatactgagtgtcagccgctataccgcttatctggaagagaaaaaagaaaatcctgctcctctgctcacccagagtgaaggaaatgaggcgattgcaagcgaggcacagactgcggccgaacctacagcagaggttttaaacagtgatgctaaatttgaagagtaatatgaataaagaaaataataaagaaggacagggtgatgccttaagagtcatcatcagcggtggtggtaccggagggcatatctttccggccgtatccattgcaaacgccataaaagagttacgtcccgatgcacaaatcctgtttgtaggagccgaaggcagaatggaaatgcaacgagtaccggatgcaggctatcagattatcggattgcctgtagcaggattcgatcgtaaacatctgtggaaaaatgtcgccgtattattaaaattggtacgcagccaatggaaagcacgaaacattatccggcaattccgtcctcaggtagcagtaggagtaggcggatatgcaagcggtcctactttaaaaatggcgggaatgatgggagtacctactttaatacaagagcagaattcatacgccggagtaaccaataaactattggcacagaaagcacgaagaatttgtgtggcgtatgacggaatggagaaattctttcctgccaataaaatcattatgacaggtaacccggtacgtcagaatctgctggcggaaaaaccggaacgtgaacaggctattcgttctttcgggctgaatccggaaaagaagaccattctgattttgggtggaagcctgggggcacgcaccatcaataacacattgattgcgggattgcaactgattcgccggactacagacgtgcagttcatctggcaaacgggaaagatttatcatcaacaagtgacagaagctgtaaaagcagcgggagagatacccaatctgtttgtaacggactttatcaaagatatggctgccgcttatgctgctgccgacctggttatttcacgtgccggtgcagggtctatttccgagttctgcctgctgaataagcccgttatcctggttccgtctcctaatgtggcagaagaccatcaaaccaaaaatgctttggctttggtgaataaacaagcagccatctacgtaaaggatgcggaagcagaaaacaaactattaccggtagcactggaaacgatcgccaatgccgagaagctgagcgaactcagtgaaaacattgcacatctggctttaccggattctgctgtcgttattgcaaaagaagttataaaattagcgcaacaatcatgaatatagaaacgattcaatctgtatattttgtcggggcaggcggtatcggaatgagtgccctcgtccgctattttctttctaaaggaaaagtagtggcaggctatgaccgtactcccagtgaactgactcaacatcttatagaagaaggagcacagatccattacgaagagaatatcgatctcataccggaggcttgcaaagacaaagctaccacattggtagtcctgacccctgccgtacctcaggaacatgccgaattaacttacttccgtgataatggattcgaaatacagaaacgtgcacaagtactgggcaccattacccgttccagcaaaggactttgtgtagccggcacacatggtaaaaccactacctcaacgatgacggcccacttgtttcatcagtcacatgtaggttgtactgcttttctgggaggtatttccaaaaattacggaacgaatctactactctcttcaaccagcccttatacggtgattgaagcagacgaatttgaccgttcattccattggttgtctccttatatgtctgtcattaccgcaaccgatccggatcatctggatatttatggcaccgaacaggcttatctggaaagctttgaacactacaccacactgattcagcccggaggagcactgattatccgcaaaggcatttccctacagccgaaagtgaaagagggagtgaagatgtatacttactcacgtgacgagggagactttcatgctgagaacattcgcatcggaaacggagaaatcttcattgacttcgtagggcctgacattcgtatcgacaacattcagctaggagtaccggtaagtataaatatagagaatggtgtcgctgcgatggcacttgcccaccttaacggagtcacacctgaagagatcaaacagggaatggccagtttccggggtgtggaccgccggttcgactttaaaatcaagaataaccggattgtattcctgagtgactacgcacatcatccatccgagattaaacaaagcgtgatgtccatgcgtgagttgtaccgggacaaaaagatcactgcggtttttcagccacacctctatacccgtacccgcgacttctacaaagattttgccgacagtctgtctttactcgatgaagtgatactggtagatatctatccggcgcgcgagcaacctattccgggagtaagcagccggctgatatatgacaacctacgtccgggtattgaaaaaagcatgtgcaagaaagaagaaatactcgatgtactgaaagcaaaacatatcgaagtattaattacattgggagcaggagacatagacaactatgttccgggtatttgtgacttattgtcccgaagaatggttccttcggacaattaatttgtaaatcgtcaaaacaataaatttccttatgataaaaagaattcttctgaccatcgtcatgttacttctcatagcctaccttatagcagctgtgacagtgttcaacgacaaacctgcccatcaggtatgccgtgacatggaattagtgatcaaggatacactcaatgccggtttcgttaccaagaacgaggtggctgccatcctgcagaagaaaggcatttatcccgttggaaagaaaatggaccgggtacacaccaaaacattggaaaaagagttggataaacatccactcatcaatgaagctcaatgctataaaacgccaaacggcaaaatttgcgtggaagtaacccaacgcgtaccgattctccacatcatgagcagcaacggtgaaaactactatttggataacaaaggaaaaatgatgccgcccgatgcaaaatgcgtagcacaccgggcaattgtcaccggaaatgtagaaaagtcgtttgcaatgaaggatttatataagtttggtgtatttttgcaaaacaatccgttctgggaagcccagattgtacagattaacgtgctgcccggaaaagaaatcgaattggttccccgggtaggcaatcatattatctatttgggtaaactggaacattttgaggataaactgaaacgcttgaagaccttttacgaaaaagggctcaaccaggtgggatggaataaatattcgcgtatcagcctggaatttggaaatcagattatctgcacaaaaaagaaacaataatttgtaaacagctaaacgtacctttgtgttaaagagataagtctataatacgaaagggaataaaataggattttatatggcaacaacagattttatcgccgctattgaactgggttcatcgaagatagccggtatagccggaaagaagaatagtgatggaagtatacaggtattagcttatgccagggaggattcgtcttctttcatccggaaaggagtgatctataatctggataaaacggcacaaagcctgacttcaatcatcaataaactggagggggctctcaataactcaattgccaagatctatgtgggtatcggcggacaatcgctccgtacggtgcgcaatgtggtaagtcgcgatcttgaagaagaaactattatttctcaggaactggtcgactcaatctgtgatgagaacctcgagataccactgatcgatatggatatactggacgttgctccacaagaatacaaaataggaaacaatcttcaagccgaccctgtcggtgtagccggaagccacattgaagggcgttttctgaatattgtagcacgtgcttcgctcaagaaaaatctggaacgctgcttcgaacaggctaaaatagaaatagcagacctattgatctcacctctggttactgccgatgcagtactgacggaaagtgaaagacgctccggctgcgcactgatcgactttggtgccgacacatctaccatttccatttataagaataatatcctccgcttcctcactgtgctgccgctaggaggaaacagtattacccatgacctcgtctctcttcagatggaagaagaagaggccgaacgtttgaaaatcagatatggcaatgctttctacgaagaggaagaaggcgaagaacctgctacttgccaattggaagacggaaatagaacgatagagttaggtaaactgaataatatcatcgaggcacgtaccgaagagattatcgcgaacgtatggaatcagattcaactttcgggatatgacgacaaacttctggccggactcatcatcaccggaggggccgccaacctgaaagacctggacgaggttctacgcaaacggagtaaaatagagaaggtgagaaacgcacgtttcgtacgcaataccatccatgcagacgaagacgttgtgaagaaagacggtacacaaaacaccttattcggactgcttattgcgggcaacgaaaactgttgtttattggaaacacccgctccacagccgcatatacaacctcagccccagcccgaaccggtgaacatgtttgaagaagacgaaagtctgaaggaacaggaagccgctgcccgcgctgccaagaagaagaaagaagaagaagagaaaaagcggaaagaagaagaaaagcaacgcaagctggaagagaagaaaagaagggaagaagagagaagaaataaacctaactggtttaaatcgactttcgacaagctctctaatgaaattttctctgacgaagatatgaaataaagtgataattcataatacaatataatatggacgagatagtacaattcgatttccctacagattcaccgaaaatcatcaaagtgattggtgtaggaggtggtggaggtaacgccgtcaaccacatgtaccgggaaggcatacacgacgtaacattcgttctctgcaataccgacaaccaagcattggctgagtctcccgtaccggtcaaactgcaactgggacgttccatcacacaaggactcggtgccggaaaccgtccggagcgtgcacgtgatgctgccgaagagagcatcgaagacatcaaaactctgctgaacgatggtaccaaaatggtgtttatcactgccggaatgggtggaggaaccggaaccggagccgctcccgtcatcgcccgtatcgctaaagagatggacatcctgactgtcggaatcgttaccatccctttcatttttgaaggcgaaaagaaaattattcaggctctggacggtgtagaacgcatcgcacaacacgtagatgctttgctggtaatcaacaacgaacgcctgcgtgaaatctactccgacctgacttttatgaatgcattcggcaaggcagatgatacgttatcaatcgcagccaagagcatagccgaaattatcaccatgcgaggtacggtcaacctggactttgcagatgtgaaaacgattctcaaggacggcggtgtagccatcatgagtaccggattcggcgaaggagaaaaccgtgtgaccaaagcaatagacgatgcactgcattcacctctgctcaataataatgatattttcaacgccaagaaggtaatgctgaacgtctccttctgtcctgcttccgaattgatgatggaagaaatgaacgaagtacacgagttcatgagcaaattccgcgaaggtgtggaagtgatctggggtgtagctatggacaactcactggatacgaaagtaaagatcactgtattggctaccggtttcggtgtagaagacgtaccgggcatggacgacctacacgaaaaacgcagtcaggaagaagaagagcgacagttgcaactggaagaagagaaggagaagaacaaagagcgcatccgcaaagcatacggtgaaagtgccagtggaatcggaacacgcaatctgcgtaaacgccggcatatctatctcttcaatgcagaagacctggataacgatgacatcatcgccatggtagaggactctcctacttacttacgcgacaaaacaactttgggtaaaatcaaagcaaaagccgcactggaagaagagatagcaacagaagaggctatagatgacagtggagttatcacattttaattaaagtaaaatatcgaatcattaacccggatttaccaattgtaaaccgtaaatcgttaaatcataataacatcatggatttattcgaaagagtcagcgaagacattaaaaacgcaatgaaagcgaaagataaagtagctctcgaaactctcagaaatgtaaaaaagttctttttggaagctaaaacagctccgggagctaatgacacccttacagatgcagatgcactgaaaatcgtgcaaaaactggtaaaacaaggtaaggatgccgcagaaatatatataggacaaggtcgtcaggacttagctgatgcagaattggctcaggtgcaagttatggaaacttatctgcctaagcagatgagtgccgaagaattggaagccgcactgaaagaaattattgctgaagtaggtgctaccagcggcaaagacatgggaaaagtaatgggagtcgcttctaaaaaactggcaggattggccgaaggacgcgcgatctcagctaaagtaaaagagttattgggataagtctcaaaacagaaatactttccaccccggatgcaagtcagacttgcatccggggtattttgtttatggcttgtttataatatatatccctccaatatgcatgaagcactaatcaaacagttccttcaatacatccagtgacttcagtataggaaaatcgggaagatgcagccgataatattcattaataatagccagacaacgggctctttccgtacggttcattccaaaaagatgcatggtttcataattcatacgcatcaactgcaacaaccgtccggcttcatcgggctgtatataagaagaatgcagttgagggcgaacggacgtaaaagtggcattcaacatatcaaaatagtcccccgcatgataatcgtccaggttggggtacagccccaaaaagcgtgaaagacgcatcagaaataccagatggaaattagcaaaactaatcttacaggtatccaaccataatatagaatgttgtaaataggcaaacaacggacggttctcagcctcctcacgaatggcacgataaagaaattcagcgagaaaaagagcgatagccgatttaaaaggatcatagggaatagaagtaaagggactgaaagatttggcctccttaattctaaaaagtgaagtattcggtctgtaatccgcctcaaattcgattaaagccaatggttgaaacaacaccgatttgacagtagccttcttagaacgaggcacggtgaccaaaaaggacgcacgccctgacaactcagtatacatctcgacgatattcgatgtatcgttatactttaatacatgaagaacgattccaaccgttttttgcaacatagctctaacttttctttccggtaacaaagctacaaaaaaagaggaaatagacaatcgaatactactatctcaaaaaaaaatcattctttcgccagaaaataaaatagtaaataagaaattgattatcaatacataacctaaataaaaacgaaaaaccatcaaaaataatcagaaaatttttccgcgaatagtttggtagtttcaaaaaaagccctacctttgcactcgcaatcgggaaacaacgatacagaacgaaagcaaagtgaaacaaaaagagcagaaatgctcaaaacaggatggcccgttcgtctatcggttaggacgcaagattttcattcttgaaaggggggttcgattcccccacgggctacaattaaaaaaataaacgaattaaaacagattagtcgagatggcaaatcataaatcatcaatcaagagaatcagacaagaagaaacaagaagacttcgtaacagatattatggtaaaaccatgagaaatgctgttagaaaacttcgttcaactactgacaaagcagaagcaactgctatgtatccgggcatcgttaagatggtagacaagttagctaagacaaacgttattcataagaataaagctaacaatctgaaatctaagttggccatttacatcaacaagcttgcttaagaaataagatatataacagactctatataatattagaagccggacttttcagttcggctttttatgctttcaattacccggtcgggtttatttttaattcttcttttttcactcttcattcttctctaactcagatattttcactatatttgctctgttattataattaggaatcaaattatgagcgaagaacagaatcccaccaataacgggtcttattcagcagatagtatccaagtattggaaggacttgaagcagttagaaaacgccctgcgatgtacattggtgacatcagcgtaaagggacttcatcacttggtatatgaaattgtcgacaactctatcgacgaagcattggccggttattgcgaccatatcgaagtaactatcaacgaagacaactctatcaccgtacaggataatggacgtggtattccggtagatttccacgaaaaagagcagaaatctgccctcgaagttgccatgaccgtactgcatgccggaggtaagttcgataaaggttcgtacaaagtatccggaggtcttcacggtgtaggtatgtcctgtgtgaatgcattgtctacacacatgactacccaggtattccgcaacggtaaaatctatcagcaggaatatgaaatcggtaaaccgctttatcccgttaaagaagtaggaatagcggaccacacaggaaccaaacagcaattctggcccgatgacagtatctttaccgaaaccatttatgattataagattctggcttcacgtttacgtgaattggcttatctgaatgccggtctgcgcatctcgctgacagatcgtcgcgtagtgaatgaggacggcagtttcaaacacgaaactttctattcggaagagggtttaagagaatttgtacgcttcatcgaatcgtcacgcgaacacttgattaacgatgtgatttatctaaacacagagaaacaaaacatccccatcgaggtggctatcatgtacaataccggattttcagaaaatatccattcgtacgtcaataacattaatactatagaaggtggtacgcatctggcaggtttccgccgcgccctgacccgtacactgaagaaatatgcagaagacagcaaaatgctggagaaagttaaagtagaaatctccggcgatgacttccgtgaaggtctgacagctgtgatctctgtaaaagtagctgaaccccaatttgaaggacagactaaaactaagttgggaaacaacgaagtaatgggtgctgtcgatcaagcggtaggcgaagtactaaactattatctggaagaacacccgaaagaggctaaagcaattgtagacaaagtgattttggctgctactgcacgccacgccgcccgcaaagcgcgtgagatggtacagcgtaaatctcctatgtcaggtggcggtcttccgggtaaactggccgactgctcggacaaagacccgcagaagtgtgagttattcctcgtcgagggagactctgccggcggtacagctaagcaaggtcgtaaccgtgcatttcaggctattcttccactacgcggtaagattctgaacgtagagaaagccatgtatcacaaagcgcttgaaagcgaagaaatacgcaatatatacacggcactgggtgtcactatcggaacggaagaagacagcaaagctgccaatattgataagctgcgctatcataaaatcattatcatgaccgatgccgacgtcgatggatcacacatcgacacactgatcatgacttttttcttccgctatatgccacagatcatccagaatggctatctgtacattgccactcccccgctctacctttgcaaaaaaggaaaaatagaagagtattgctggacagatgcgcaacgccagaagtttatcgacacctatggtggcggttcggaaaatgcaatccatacacagcgctacaaaggtttgggtgagatgaatgcccagcagttgtgggaaacgactatggatccggaaaaccgtatgctgaaacaggttaatatcgacaacgcagcagaagccgactatatcttctccatgttgatgggtgaagacgtaggtccacgccgcgagttcattgaagagaatgcaacgtatgcaaatatcgatgcataattcgtaatataaacaccaacctcacatcttacaacgaagaagcgccggcgctgaaggaaaatccttcggaccggcgcttttctttgaattcctcccgggcttatcgaggttgtcgtcccaatactactcgtcggaaacgattaacaatctcattgcccatattcatgcgggtactatccacccgatgtaccgcagcaggggtaaccgcatccttatatttggccttacctatacggaacttcattttgtccagattgcccgaaatattcactcccgctttaaacggcaacggagacttcaagatggagatgtgatagttaaagttcatatctaatccttgctcacctccaacagcagctttataacggtctatctctaccaggaaaggatagacggtcacattaccgtcgtgtaccgtcacattgacagagatactatcgaatacattctcttttttattcttaaacatcaacatctttgagatctcagcaaaggtttcaccatccatcaggaccaggctgtctcctttgatgtgaatggccgaacgcaaagtggggatacggatattcattgccgaatccaaacgggcatcggcagcaacatcaaacataacccggcccttgaaagaacgaagcataggcactatcgtatcgagtgcaggaacaaagtcgaccagcttcgcaatattgatgtttcggatcttaaaatcaaaaccggcatatccgccgcggggactaccggccttatagaccatcacagccttcatatcggcatcgagggcacgcattgaaagatcttccagatgtatggcctgattcttaatatctaccgctccatgtacattctcaaacagcattttctcaaaaatgaccttcttcagatctgtttgcaattcaaaatctatatttcggggaatcacaaacaatttcatctccgaaggtacgctgtcggtaagcacttccgtagtatcctcggggaaagaaagagaattaatcaactgattacaatcgatcagatcagacgtaagagacaaatgtgccgtcaacttctctcctttcgtcattgccctgtaaacacccatcatatcgcctgtagccgtcatattggagcgtccgatacggacagaagcattctttaaagtaatcttcgggccatccaccgtcaccgctgtttttgacatgcgaataggcaagccgaattccggcgtacggaagcgtaagcgattgaacccaacaatccctttaggcatccacagggagtcattcagcttatcagccttcatcttgatgcccgccacattcatagccatgcgagttcctgccgcactgaagaaaagcgaatcggcacgaagtgaaaaatcaatcgccggcttcgttacatccaccccctgaggccccagtgcagcttgtgcttttgcacgggcactgtataactttatagaatcgcccatcgaagcacggagcttactgacctccatatcgcactgcaaagagacaatgcggttggtatcctgcggattagtcgaagaaacattggcaaccaaccgttcgatgtcagaagagagaaaacggcttctcaacaccagtttacggacatccatctgcgcctgcaaggtttcgttatcacggaaacggaaagtagcattacctagaaaatcgaaatccttggcagtatccttcaattcaaaatctttcaattcaagtttgcctcccaacttcatgcgcccgatatcctgcttcttcaaagcagaaaggcggcacttcatccccatatccgcatccagttttcccgtgattgtcacgctttcctgcaatggaaaggttttagccagtgcatccaggtcgacagtcgacttggtatggaaagtaatcaacggatcatccagcaaatcgtctaccttcgcatcggccaaaacttcagtatgcgcccctttaaaatggaatattttcaggtttagatacgaaggctgatgacgcatcaagtcgacatacgcatcaaaatctgccgttacctcatcaataccgtatggtaaatccttatattgtgccgaagcctctttgataccgatcttgagtgaaacggcaggcaactttttgtcaccatacacacccctcaccctaccgctaacggtaacttcacctttagccgagactttagtgtccttcacatacgatttcggaatcatccgcaacaccgtctccatcgaaggggcatgcaaaccatattccagatccataccgattgtcttcgccacggtatcccgccggaaagctccgtttacatccagccggataccattcacatcgagttccgtatccttcagtttccagacagcggtctgcctgtccaccataatatctgtccgtaaagaagtagctatcttattgaccaacagttctccctgctgccagaaaagaatattcttgttgtcaaatttcaaccctaaagtagaaataccctttgtcagcgaaagcctcaacttcagattggcatcatcgatgcgtgagtaaatatccgtattccgatcatcgaaaacaagattggcatgtttgagttctatattccggatatcaatctcactattaaaatcggtcgatgcagtatcggccggtatcgtatcgaccgacgcacgggttacctcccaattggctttcccggttttattccggtaggcatatacagctacctcttccaacgaaagattgtgaacaacaatgcgattttccgtcaaatatgctatcgggttgacggtcagcacacattccttgaaagacagtaacgaatcggttttgcaccagctactatcattcaaggctttagacaccaaactaccgttcttcaccttcaatccgaactgtgggaaagttgaaaagaaagtcaactctacgctctccatatccaggtgtgcattcagagtctgattggcagcatccagcaccaccggagtcagcttcttcggagttacgatgaaattaatcacaaaagcaatggcaacaagcagcaccaaaagaactgttcccaacgtgatgccgctgatcttaagtgttttctttacctgtctgttcatatcatccctctatcctgcaattcttttaccgcaatctccagttcatcataccactccttaccgaatttacgaatcaacggctccttcaggaagcgatagaccggaacattctcctttttacccaacaatacagcagccttacatacatcccaacgatggtaattcactgcctgataaggtccgtaattgcctacccgtataggatacagatggcaagacaccggtttataaaagtctgtttttcctccccgatatgctttctcgatggcgcaatagcaataccccttttcatcgtaacaagtaaatacacagtctttgccattcacaatggaggtcaccagatcaccgtcccgatcggtatataccacgccttgcttatctattaccgcacgagcttcgggcgacagttcatcccaaacaaccggaagcacctcttccaatttctccacctcttccagttctaccggagccccggcatcaccttcaatgcaacactcacctttacaggcatccaagttgcacacaaacttctcgcgaagcacatccaggctcacaacaacgttgtctatttgaatcataattatcggtttatattatacaagttacctaagtgtaaatagaaggaatctctcaagtttttcatactcttaaagagatattcagatctgatagtaaagccacctgagtttgatagattatcatgtaaattagaatattgacaaacaaataattagcgataaaatttataatcttatagtggctaattgcataacagatcatctattatcactacgtttattaaagacaaagttacagaaatatatggttcgacagatcgttttcgccgggaatttgcataacaagaagataaaacgtatcctaaaagacaaaaacaattacgctttctcatgccggatacgaatcatctgcaatcatgacacaggatatgtaatgataatcatccgctcaccactctcttcgagtaactgatagctaccttggaaagtttctaagtacagccgattgatggtatgcaaaacatcaaactccttttcactttcggcagtcataaaaatggggctgtttacaactttaatttgcaaataatcctcgcttgggcgggacaagatgaatttcaccctgaaaagcccctcactttcttcgggatattttagcacagaagcaagcattttcataaaccggttggtatccacatcgatcagcagcatatccggttccgtgtggaaatcaactttcgttctattttcagtttgcatctccaccatcagcctggcatcggtacataactgaaccacatcatactcctctaccacaaacttcatcattcccgattctaatcgggcaaggtccagcacattgaatatcaggccaatcaattttgaagcacacttcttaattgttgcagaatactcctgctgtttttcctgtttcaaattcgtctcccggcacaggcggtcagacaattccaccacagtatccagaggaacccgtatttcatctgtaatattccgcaaaaaaacctctttcatcttatcggttgctacgaccacggcatacgattccgccatttccttctgagatttcaccaactctccccgaatccggatcaagcgtatcactccccacaccaacaaaacaacaaacagagacaatcctactaccgccacttgcaaaaagcgcttctctcccaattctttgtcaagcaaagctttccggatacgatagttggcctccaccgtctcttcattcattcgcaaagtagctttatttacagaatcgcacatcacagccgctgttttataagtccgggcagcctcttcatatcggccgacatccacataggcatctcccattattctccgaatctcaatctcatacataggctgagtacccttaaaagcagccaatgtacgttcaaattcagggaaacatcgttcccagtcctgtcttaaataataatatcccgcccaagaaaagtgataattgactgctgtagccgaaaaacagtcatcatcataaaatttggcagcttcattgagatgtatccacaagggatctgcgtcaaccatacccagataaatcttgcaatacatcaactcgatagtcaacagagtagatctgtacactccaagcatagacggctttttcttaattactccgtcaatcaattgccgttgtgctttcaattctccaagagcctccttatatttatctttcaggtaataggaacttgccagatatccatgtaccatgagtttgtccccgaaagtcgttccttcaatctcaagtgccttcagatactgttcgattgctttttccgtgtttcttgcgaaaacatacgactttccctccgtgatatatgacaaaaacactccacggtcggcatgcaaacgcacagcttcttcacgcatctttctcgattcaagaatggcatactccgtgtccccctccgatcccttcaactggagcacataatgcaaagccagaaaatagttgtcatatttcttataacgataacacgcttccctcagggtggcacacgtcttttccatattctcaccgtccatcctgaacgtatagtaacgaaaaatcccgtattggagttccaactcaccctccacatcttttatctcccgggcaaacaccaatgccgaatccagtaactccaacgcccagctttctttaacgtgtcccattgcagcctctttcgcaaaaacggtccgagtggtgtcggcaggcatcgaccgatagacatgaaagatactgtcacgcagtacacgatcacccgaattggcagccgacataagcaaggcggcaccgaccaaaccaaacaatagaacaaccagtctcttcatcggttttcctcctgtttcaaagggtgagtaaaaataaaacgggcccctttgctataagtggagtcaacccggatatctcctcccatacgattaatgatcagcttacagatagacagccccagccctgtaccctggatgccttcattgagtttttcgaaccgaccgaatacagcctcttgattttcaaggggaattccacacccggtatccgttaccataaactcaggtaccccggcttcatttatccgcagtgtcaatgtgatatatccctccttcgtaaattttgtggcattgaccagtaggttgatcaatacttgctggagcctgcacggatcagtttccatttccaaagcagacaattctgtctcaaaaatcatctccgcagaagtctgtttgatatttctcagcatctccaccacattccggcataaagccaccacctcatgcggaaccacggagaatctcatatttgccacatccagacacgaaacatcgactacgtcatttaccaaatgcaacaataaatcggagtttaacctgatcacgtcattacactgcgcacgaacttcatcgtcaattcccggagtaatcaaaatttcagagaaacctgccaacgcatttaagggagtttttatctcatggctcatattggaaagaaatacgctcttattacggacagactcttcggccagcctttttgccttttgcaactcttctctggaaaatagaagttttctctccgctctcctcaaatagagaagtcctacgaataacaaaacgaccagacatagaatggtgataaacaccaatttccatattttcttctgctgcattccgttttgtaagtccaactcgtcaatggaatattgttcacgcatatcctcaacatgccggccggcataatccacaaacaaagaatctcctttcgtaatcaattccttatatgtcagtgctgcatcctgaaaatccttctcttgcattttctgctctgcacgatgccagtttatgctatccacagcccacttttcagaagcaagggatacggacaatccacatacaacgaacatccctgacaatataagctgtttcatctttatattttgtgtaaggttagcaaagataactcattaaatatgaagcaacaagcatttagataaaaaagaagtgtcttcaagaggtataagcctcccgaaaacacttcattttatgctgatagctattgtagtaaaaagctattaattatttaatcaaattgcaacctgtcatctcagccggttgaaccatatccaaaatatgcaggatggtaggcgccacatctgccaaacgtccgtctgccacttttgcttctttattctctgtcacgtatacacaaggtacaggattcaaagagtgagccgtattcggggtaccgtcttcattcaaagcatggtcagcgttaccatgatcggcaatgatgatagcttcgtaaccttgagctttggctgcttcaatggtatctttcacacacgcgtctacggcaactaccgctttctcgatagcttcgtaaataccggtatgacctaccatatcaccattggcatagttcaccacgataaagtcatatttattctcgttgatggcagccaccagtttatctttcacttcataggcactcatctccggtttcaagtcgtaagttgcaactttcggagacggaaccaggatgcggtcttcgttatcatacggagtttcacgaccaccgttaaagaagaatgttacgtgagcatatttctctgtttcggcaatatgaagctgtttctttccgttagcagccagatactcgcccaacgtattagccacgttttccttatcgaacaagatatgcacacccttgaacgaagcatcgtacggagtcatacagtagtactgcaatcccggtattgtgtgcatgcctgcttccggcatatcctgttgggtcaaaactacagtcagctctttggcacgatcgttacggtagttgaagaagatcaccacgtcaccttctttgatagtaccgtctacaccggcattcacaatcggtttgataaactcgtccgttaccccttcatcataagattcctgcatagcctgcaccatgtcggtagctttcttaccaatgccgtttaccagcaggtcatacgcttctttcacacgttcccagcgtttgtcacggtccatagcataataacggccaatgatggaagccactttaccggcagacttggcgcaatgcgcttccagttgttcgataaagcctttaccgctcttcgggtctgtgtcacgtccatccataaagcaatgaacgaaagtgttctcaatattatattctttagcaatatcgcaaagtttgaacagatggtccagagagctatgtacaccaccatccgaagtcagtcccataaaatgaacattctttccgttttcttttgcgtaagagaaagctgaaacgatctccgggttcttcaggatgctgttgtcacgacaagagaggttgattttcaccaaatcctgataaactacgcgtcctgcgccgatattgaggtgacccacttccgagttacccatctgtccgtcgggcaaacctacgttttcaccgctggcctgtaactgagagtgaggataggtctccatcagataatcccagtaaggagtagcagtgttgaagattacgtcatctttcccgtggtcgcctaatccccaaccatcaagaatcattaaaagggctttcttactcataatattctaaaattaaattgtcgttctatttttcgggtgcaaaggtacaaaaaagttaattacgaacacgtttaatctatgttaagcaatctccccgccggacaaaaaggaagaaaaaatgccgcagatttgaaatgatttccttatttttgcgctgctttaaaaataaaacagaatatggacgattcaaacccgcgaacgtacaacagtattaactaacacgaacagagtcattctgcggtaatgcctctgctcggacattaacaaacgaaaggaggcaataagatgagaacatatctttattgtgaggccggctttgtgaaaaaagcacaatggcttcctaacagctgggtcaatgtagtatgcccggacagcagtgatttcaaattcctgaccgaaaccctgaaagttcccgaatcttttttaaatgacattgccgataccgacgaacgtccgcgtacggaaacggaaggcaactggttgctgaccatactgcgtataccggtccagaacgctcaaagcagtatcccttataccaccgtacccatcggcatcatcaccaacaatgaaatcattgtttctgtgtgctaccatcagacggatatgattcccgatttcatcgaacatacccgccggaaaggcatcgaagtacgcaataagctcgacttgattttccgactgatctactcttcggctgtctggttcctgaagtatctgaaacagataaatatagacatcaccgctgccgagaaggaactggagcgaagcatccgaaacgaggacctgctgcgattgatgaagttacagaagacactggtctattttaatacttccattcgtggcaatgaagtgatgatcggcaagttgaaaaccatcttccaggataccgattatctggatgaagagttagtggaggacgtgatcattgaactgaagcaggcattcaatacggtcaacatctacagtgacattctcaccggaaccatggacgcctttgcatccatcatctccaataatgtgaatgcgatcatgaaacgtatgacaagtctttccattacattgatgatccccacgttaatagccagtttctatggcatgaacgtagacatacatcttgaggagatgcctcatgccttcctgctgatcatcctggtatccgtattcctgtctgccctctcctttgtgatcttcaggaagataaagtggttttaaggaaagtttattttgagaacaattccaactgtccgtcgcccaacagattgaaagtcatgcgatgatacggagtagtaccgtgcccggcaatagccgcacggtgctttttcgtaggataacctttgttatgctcccagtcataacatgggaattcctgatgcagtttgttcatgtagtcatcacgataagttttggcaaggatagaagcagcagctatcgaaagatatttgccatctccctttataacagtagtatgaggtatgtcggggtacttcttgaaacggtttccatcgatcagcagatgctgaggacgggttttcagccggtctaccgcccggtgcatggcgagaaacgatgcattcaggatgtttatcttatcaatctcttcgggcgaaacaatgccgacggcccaggcaaccgcatcccgctcaatcacttcgcgcaaagcatatcgctgcttctccgacaactgcttggagtcattcaacaattcattctcaaaatctttcggtaagataacggcagcagcataaaccgcacctgccagacaaccgcgtccggcttcatcacaaccggcttctatcagttcttcgtttaaccagggtaagagcatcgtttcttttatttaacacggcaaatgtaatcaattaaacggaaatgaacaaaagagtgaaccgaatctcatcttactatccagaataagaagatctcccctttcagccaaaagatgaagaaggcaagcatccgtcatcccatctataacacatgaagaataagagaataaacgtccgtcataataactttatctcagcccgcatgcctgtgctcataagcccgcgtacacggcctcatgggcacaggcatgcgggacggagcaggagtcaagccataatcgctaaagatataaaggaaaacaaaatgctattaaccacatttatcctgaaagaaggaacaacatccatctcaccatcaaccgtttaacattgaatccgccttaaaaacagagggtggaagatggaagatcaaagtatattttctgtaggaaaggaataagatacttcattcccgattaatcagatgcagttcggtacgactaaagtcggacaatcgcacctcataaactccggcatctcctaacttgccatcgatcccttcactatatccacccactataatcaatttatcatcagtgcaatacaggcccccctcccgtaacttcagatcaatttgatatgcttttatctcgttggtatataagttatatacttgtatcaccccattttctaaaatataaaccttatctccaccacgagccagagctgccttaccgaccggaaaccataatcttcctcttttcctccacaaaccggtaatcaaatcataggtaaatatatctgatagagtcctttgtctatatcctccgaataaaaaaacagtatgtcccacaagaatcccgtttgtttccatccccaaaggcatttttcctgcctcataccaaacacccttcttcaaatcaagcatgtgtatcttatctgaatatttttgccatccgttctcaacccgataagtagatcctcccataacaatcaacttatcatcgtaaacaaatgcagctgccgaagcagcttgatgtggatttaccggatctgtcaataatgtatcccgatggatatcatatatctccactgtttcatcaagatactcaatcttccgattcgttgaaaaacgttttccacccataacatagattttaccatcattgtaaagagccgaatggtaagcacgttctcttaactttttatttatgatagtccaagtatttgatataatatcatagacatatattttattactatacttttcataaacaaaccctgatggcaatcctccggatcctgttaaactaaaacccattggaggttttatctgagatctatctccacctgtaagataaagcttcttctccaatgaaatcattgcaaacgaatatagcggtacaggtatcgatgatatttgtgtatatggtaaacgtaaataagatttctttatgccataaaccgtcacttctcccaatgcaaaaggttcttcttgcaatagaatcacatttttcttttgcaacaaagaggttacggaaaaacgttttgtacaatatccgacaaaagaaaaacaaagagtatctgcatctcgtagtaactctccattatttatcataaactcaccctttttatccgcaacagatactcctacccccaaatcagtataaatatttgctccaactaaaggctgcttcgtttttgcatcgacaattctacctccaacttgagagaataagctggaactgtcaaaaaaagtaaggaatattaccaaggtcaagtacttccccatttctataaatttttgaagaaggtattccaaaagtttccttttcttccataccttcttcaattaaatactctactaagaaactgttttgaatgtatcatctatgttttgaacgactttccggtctatttcaaaactctcggggttcacttcaaaactcgtatttaccacagattaatatcgccagctatcaatagattaagctcgttcgatgaaactccatgttactctgtggtgaatgatgtcccttctcagaacaggctccaggcaacagttaatcctgccataacaatagcaaccatgctcatcagtttaatcaggatattcaggctcgggccggacgtatctttaaatgaatcccctaccgtatcacctaccacagtagccttgtgcacctcgctacctttacctccaaaattgccttcttccacatacttcttcgcattgtcccatgctccaccggcattggccatgaagatagcaagtacaaaaccactactcagtccgccaatcaacagtcccaatacaccgggaacaccaaatatcagtccggtaaggattggagcaatgatggcaatcagagaaggcactaccatttcccgctgtgctccttttgtagaaatagcaacgcaacgttcgtagtccggttcggtttccccggtcaggatacctttcatttcacggaactggcgacgtacttcatctaccatatgtccggcagcacgtccgactgcattcatagtcagaccacagaacaggaatgccatcatcgaaccgagaaacataccggaaagtaccttcggattcatcaaatttacctcataatagttcataaaatccacaaaggtagcattggccgtactgatcgtgtctccatttggaaaagtaagttccaaattaccaagacgagtcaacccaatgcggatctcctcaatataagaagccagcaatgccagccccgtaagagcagccgagccaatggcaaaaccttttccggtagctgccgttgtatttcccaacgaatcgagcgcatcggtgcgtttacgcacctctttacccaaagaggacatctccgcattgccaccggcattgtcggctatcggaccataagcatccgtagcaagcgtaatgcccaatgtagaaagcataccgacagcagcaataccgatgccgtaaagtcccattcccacattattgaaatcaaaaccggaagccaacagataggaagcaataataccgattaccaccgccaccacaggaatagctgtggacaacatgccgagtcctatacccgaaatgatgactgtggcaggccccgttttgccactttcactcaatttctgagtaggccggtaagattgggaagtataatattctgtcgaacggccgataacaatacccacaaccaatcctacaactaccgcacaagaaatccacatccaattgtccaattgtaataaccacaagataaaaaaagtggctgctacaatcaaagccgaactcaggtttgtcccccaagccagcgaaccaagcagatctttcatggtagcattctctttggtacgtactgaaaaaataccgattatagaaagaatgatgccgatagcggcaatcagcatcggagctattacagctttaaactgcataaccgtatcgcccgtatgaataaaggcggccgcacccaaagcagccgttgccaaaatggaaccgcaatatgactcgtataaatcggcacccattcctgccacgtcacccacattatcacctacattatcagcaatggtggcaggattacgcggatcgtcctcgggaataccggcctcaactttccccacaagatcggctcccacatcggcagcctttgtataaatgccacctcccacacgggcaaaaagcgcctgcgtgctggcgcccataccaaaagtcagcattgtagtagtgatgatacagagtttatgagtgggtgtcagcacatcggcaggtatcgcccaattgagcaacagataccaaaaagagatgtcgagcagtcccaagccgaccactaccagtcccatcacagctccgcttcggaaggctattcgcaatccggcattcaatgacgtacgagcagcattagccgtacgcgccgatgcgtaagtagctgttttcattcccaaaaagccggaaagaccggaaaagaaacctccggtcaggaaagctatcggtacccaggcattctgcacctgaaagccataagccattacagagaacagaatcaccagtccgagaaatgcccagccaacgattttatactgctgtttcagataagacatagcgccccgacgcacggcagcggcaatcttaatcatttgtggagtaccttcactctccttcatcatttgtttatgaaaatagagcgcaaaacagagagccagaacagaggcaaacggaacaagccaaaaaagaatgctatccatagacgtacaatatttagaggtttaacgaaagtctaaaagtattgaatctaaacgagataaccaaacattttcgacttttgctgatctcccgcctctaaaaaacgaatacaggcactatgcactttatttctcttccttcttcacatagaatgccggacaacggctattcaggaaaatgattttaccttcgcggaaagtcagtctgccataacgtttataaagtaattttcggtgttgttcatcggaagccccttttcgctccaccaatgagtcggacatcacaaacccggtactacttaattttagggtataccagatacgaggattcttatcacgggtcacccgacgtctattcacccgataagtttcggtaccactcgtgacgcgctttgtgaagatatgcaccgtatcccgataatggaaacgcaatccatcgtaatataccttttccggagattctgaagaactcttcctctcccacaactttatatcatacaccgaatcgttgaccgggataattgacaaacgataatcctgtgtcatgagtccgtccgcccggtgaattctgtgttctcctatcatttcgtcgggaatcgggcgcctgtggggtgcgcaggcggcaaacaaacaaagaagcacaaacaaagctccctgaattagcttcatacctgttttcatcctgttttattttaagatcctcaaaattacatatttttatttatgtaacaataaagtaccggaatgatatttccactaccccggaagctcttttaaaagccactatctgccggagaacgcttaagaaacagagctctgaaccacaaacatccatttgtttcttcccgtttcatttgtgaatataatgaagtttatcttactttgcacacacaatgcatatttcataacatcaacaacaataccatgaaaaaattacttgcaacattactgattcttgtagcttgtattcatgtcaatgcacaagagtccagacagattcgcatctcgacagatcggacggaccttatcctggaagttgctccggacggacgtctgtatcaatcttatctgggtgacaaactactgaacgaacaagacctgaaaaacctttccggttcctcacgaggatgggaagtttatccggggtcgggtggagaagattatttcgaaccggccgtagccattacgaacaacgatggcaatctcagcacgatcctgcgttatgtatcttcggaacagaaagcagtggaaggtggaacagaaaccatcatccggatgaaagatgaccaatatccggtggacgtcacactgcactatgtagcctatcctaaacaaaatgtcatcaaaacatggagcgagatcaagcatcaacaaaagaagccggtcgtgttatggcgttatgcttcgacaatgctttacttctcaaaccaaaaatattatctcaccgaattcagcagtgactgggctaaagaggtgcagatgagtacacagcaattgcaacccggcaaaaagattctcgatacgaagttgggtagccgtgctgccatgcacatgcaacctttttttgaactcggactggaacagcccgctcaggagcatcagggacaagtagtattgggcaccatcggatggacaggcaactaccagtttactttcgaagtggacaatgaaggcaacttacgaatcatccctgctatcaatccatacgcctcggactatcaattgaaagcaaacgaaacatttaccaccccggagtttatctttacgttgagtaacaacggtacgggtgaagccagccgtaacctgcacaattgggcacgcaactaccaactaaaagacggcaagggagaccgaatgactctgcttaataattgggaaaatacttacttcacctttgatgaagaattactgggcaaactgatgaaagaggccaaacacctgggcgtagatatgttcctgctcgacgacggatggtttggcaacaaacatccgcgcaacgatgaccatgccggcctgggcgattgggaagcgatgaaaagtaagcttcccggaggaatccctgcattagtagagaaagcgaaagaagccggtgtcaaattcggtatctggattgaaccggagatggtgaatcccaagagtgacctgttcgaaacacatccggaatgggctatccattacccgaaccgggaaacttattatttccgtaatcagttggtacttgacctgagcaatcctaaagtacaagacttcgtgtttggtgtcgtagataagattatgacagagaatcccgatgtagccttctttaaatgggattgcaacagtccgattactaatatttattcgccttacctgaaagataaacaaggacagctctacatcgaccacgtgcgcggtatatataatgtattgaaacgggtaaaagagaaatatcctaatgtgcccatgatgctttgctccggtggaggtgcacgttgtgattatgaagcactgaagtacttcaccgaattttggtgttcggataataccgatccggtagaacgcttattcattcagtggggcttctcacagttcttcccggccaaagcgatgtgtgcacacgtaacaagctggaacagcagaacaagtgtgaaattccgcaccgatgttgccagtatgtgtaaactcggtttcgacatcggactgaaagacatgaaagcagatgaacttacttattgccaggaagcagtagccaattataaacgcttgaaacctgtcattctggatggtgatcaatatcgtctcgtatctccatatgatggcaaccacatggcagtgatgtatactgcccccgatgcttcaaaagccgtcctctttacctacgacatccatccgcgtttcggcgagaaactactaccggtaaagctctgggggcttgatgcccaaaagatgtaccgggtgaaggaaattaatctgatgccgggtcggaaatccaatttgtcgggtaatgaaaaaatcttctccggtgactatctgatgaaaataggattgaatgcatttacgacttcacaaaccaatagccgggtaatagagttggtagcagagtaatcttactacgataaacctacaaacagataccaaaggcgggacacctgagagtgttccgcctttcatttatgctcgatttagaactgatatataaaagcaaagaaagatcattaagaccttaattaccacttattattatattaaagaacgaaacaatgtaataaatattaagaaaagaagtttatattttatatttttgcagcgtacatacagtaaccattactctatatatgaacaacaacatagaatatatcagcaagataaagaaaggagaagaggcttctttccgtcattttgttaatagctattcgaaagacttgttctactatgcacagtgtttcgtacgaaccaaagaaaccgctgaagaagtagtcagcgacgtctttctagacgtatggagacactgggaagaaatagatggtatcaaaaatataaaagcttggttgcttacattgactcataacaaagccgtctcctatctacgaaaagtggaaaactcagcatacatttcgtcttgggaggagatggacgatttccaaataaccggtaatctgcaaacacccgacgaagagattatcagtcgggaagagatcgctcaaatcaatcgcctcatccaaaccctcccgcccaaatgtaaaatggtctttatcctcgcaaaaatagaacgtttgccttacaaagaaattgctaaaatgctgaacatctctgtaaagactgttaatatacacattgccaaggcattagaaataatttcagaagctcttaaaaaataaagcagaaaataattaaaaaaaagcagaatttaaataggagattcttaaagaagttgcgtctttatttatataaccctattaaagtaatgagaaagaataagtttaaattatttgcttccttcctgaataagaatggcgatcattcggaaaagaaattattcgcatctccggaggaacaagctgaatatgataaacttgactttctctggaatcaatgttttcccccagaaacagaggctacggatatatgggaaaaagtacaagataaaataaatgccgacagtacacctattgatctcatcaagaaaaacggtaaatccatacaatggttcaatatcctgagatattcattggtagctgcatctgtagctatgttaatagggattacttgctttcttttgatgaatgatgaagaaaggcacgatttaaataagatagtgcaaagcctgcaaacagaaatacctcaagatataaaagaggttacactggttgtttcggaccagaagaaaatagaattggataataatgcccaagtcacttattctgctaccggacaagtacaagtcaactccaataaacttacagaggatgacggcaaagaggcatacaaccagattatcgtccctaagggcaaacgttcacaaattgttttggccgataacagcaagatatggattaactccgggagtaaagtcatttaccctcgtacatttgaaggaaagtacagagaaatctatgtggaaggagaagtgtatttgaaagtagcacatgatacttcgaaaccctttatcgtaaacacctccggatttgaggtaagcgtattggggacatctttcaatatatcagcctataaaaatcaagaaaaagctactgttgtattggtagaaggttcggtaaatgtgaaggaccagcagaaccgccatatcaaaatggtgcctaatgaaaaggtagagctcaaccaggcaggcataacaggaaaagcgaaagtagatgcacgcgattatatcagctggattgacggaacatggactctgcaaggagaaagcctaaagcaagttttgcaacggttacaagattattatggtcagaatatccgatgcgacaccttagtagaaaacgagcaaatgtttggcaaactctatttaaatgatgatttaaatcaggtaataaaatcgattctatctattttacctactgaatatacaataaaaaacaatgtaatctatatagaataacacaagttttaagtaaccaatgtttaaccttaaaaaacacaccattatgtagaaagaaagcgaataaaaaagaaaatcggataatacgcccatattatccgactctaatgactttttattaaatcacaaactttaatgattaactaaaatcaatgtaaaagtatgaaaaagaaagcaattccttgtcataaggcagggaggattacgtccttttttttattaattagtatttttttgcttataccgagtgttaatactcctgtttatgcagcaaagacttatgcccagcaaactgttttcactctccattcaagtaataaaacagtaaaagagatattggactatatcgagaaaaacagtgagtttgttatactgtattcaaaggatcttttacctgtattacaaaagagagtgtcaatatcagtagataaacaaaatgtagaagacattctgaatatcctgtcagaagaggcaggattaaagtataacattaataatcggcaaattacagttagcaaagtaaaagaagaagccccacaacagcaagtaaaagaagtaaaagtcaccggaaaagttctcgatgaaaacggtgaaggagttccaggagccaatgttgtggtaaaaggtaataaggcacaaggcacaatgacagatatagagggaaactttacccttacagtcccagcaaatacagttctggtagctacttttatcggttatattcctaccgaatttcctttaaatggtaaaacaaacgtcattttaaagataactccagataccaaacaacttgatgaagttgtcgtcgtcggatttggtgctcaaaaaaaggctagtgtagtaggagctgtacagacggtaaaagctagtgaactccgctcaccatcaagtacactaagcaattcatttgccggacgcatcgcaggtgtagtagcagtacagcgtggtggtgaaccgggtgctgatggagcaaacttctggatacgtggtatttcgacttttgccagtaacacgtctccgctcgtttttattgataatgtagaagtatctattagcgacttaaatgctctttcaccagaagtaatcgaaggattctctattctaaaagatgcaacagctacagcactatatggggcacgtggtgccaatggtgtcatgttgattaccaccagaaacggtaaagatatggaaaaagcacgaattaacattcgtgttcaaaattcttttacacagcctaccaaaaccgtaaaagtagcagatggcgtagactatatgattgcaagaaacaatgcagtactaaaccgcactccagatgcacaaccttattattctcaagaggttattgatggaacacgtaatcaattaaatccatatatttaccctaatgtagattgggaaaattatctatttaaagatttcaccactactcaatctgccaatgtaaatgttaccggtggtggtaaacgtgtcacttatttccttagcggtacactaaacaatgataacggtatgctaaagaaagactccaagaacaactttgataacaatatcaatcaactacgtttatccttacaagcaaatgtgggtgtcaatttaacgtcaaccaccaaggctaacgtgagactaaacgctcaagtactggattactcaggttctgccgctggaaccgatgcgatctatcaaggcattttcgaagcaccacccgttatgtttgctccagtacttcctgcacaaaatggcgaagactatatcctttttggtaaccgtaatggtggcccaatagccggcagataccgtaacccatatgccgaaatggtcagaggatattccgaaaagaacgaatctactatgattgcgagtcttgatcttgagcaagacctcaaattcattgttccaggattaaaagctaagggtctggtatctttcaaaaactgggctacaaccaacgtagtacgttcttttaccccttatttttacggaatcaaagactacgaactaggaaccaacggagaatacaattacacctatgaggccatcacaaaaggtagtaaagcacttactacgactacatccaatggaggtgaccgtttacttaactatcaactttcactggactatgcacaaactttcggagataaacacgacgttggagcaatgttagtatatctacaaagagattacaacgaaaatgcaccagctgatttttatgcgactttacctgtacgtaatcaaggtattgcaggacgtataacttatgcctatgataataaatacatgattgaagccaattttggatataatggtagcgaaaactttggagaaggtaaacgtttcggtttcttcccttcagtagctgttggttacaatatctccaacgaaaactttttcactccactaagaaatgtcgtttccaacctaaaaatcagaggttcttatggtaaagtaggcaattcgtcaaccgattcacgcttcccttatctaacctacgtaaatctatccggagcgtcctatacattcggcaacgactggcaaaacacgggaacaggtgccgtaattacgagatatggtgcagcaggtgcacgctgggaaaccggtataaaagccaacataggatttgatttgagcttattcaattcacttaatatcacttttgactggtttacagaaacacgtaaagatatctttatgcgcagaaacatcgtgccggcagaatcaggaattacaggaaacctgcgtccctatgcaaatttagggaaagttaaaaatggaggtattgatctaaatattgagtataataaagctttctccaaagatctgattgtatcgttaaaaggtagcttcacatatgcaaaaaatgaacttcttgaagcagacgaacctagttatccagaaaacgaatcctaccgatcagaaatcggaaaaccactgaaccgctatacaggtttgatagcactaggattatttaaagatgaagcagatgttgagaatagcccggaacaaaccttctcccctaatctgaaaccaggagacattaaatacaaagatttaaatggagacgggaaaatcgacagtaatgatatgactgaaataggtgacccaactgtccctcaaattgtatacggtttcggaggttctatgcaatataaaaactttgacttctctgtctttttccaaggagtggctaaaacaagtttaatgatgcaaaacatccatccgtttacatccgatcaaacaactttgctcgattttatagcaaaagattattggacagaggagaatcctaatccaaacgcagaatatccccgtttaatcagtaatctcgactcacataataactttatgaattcgacttactggttgagaagcgccgctttcctacgcctcaaaaatgtagaaataggttatacttataaagtggcgcgcctctttgtttcaggacaaaacttatttaccttctctccattcaaacattgggatccggaacttggtggaggtaaagggttaacttatccaaacttacgtgttgcaacaatcggtttacaattaacattttaaatgagttcatatgaaaaagctaatatttattcttacactcctttctgcagttctcttccatagctgtgactatttggatatagtgccagacgatactgccacattggaagacgcttttaaaaatgaaacaacggctgagaactttatctattcctgttactcttttatccctcaatacaacaactgtcgtactaacttcagttggttaatgtcaaacgaaaccgtttgttccaaacattgggggctacaatggttctcttttttgcagatgcaacaattacaatatagctctagcaatccggttttagatatttggcaacaatgctatcagggtatcaagcaatgctatatatttcaaggtaatattgacaaagtagtacctatgacaatttcagcagcagaatacgaggccaaaaagaaagtatggcttgcagaaaccaacttcttaatagcttacttccattcagtattgttacaaaactatggtcctatagtggttgtcgactcagatattccattggacggagaaggagaaacattcttccgtccccgtaaaccatatgacgaatgtgtcacaatgattggagaaatgtttgataaagcaattacggatttgcctttaactgtaccaaacagtgatcttggacgcgcaactaaagttgttgcccaagcactaaaagcaagaatgtatctatttgcagccagcccactatacaatggcaataatgaattttactcggattttagagataaaaacggaactccattcatcaaccaagtatatgacaaaaacaaatggaaggcagcaatggatgaaactaagaaagcaatcacactggccgaacaagccggaaatgaactataccggtacgtaagcagtaaaccacttagtaaattcgatcaggcagtagccaatcaacgttatacaatggtagatccatggaataaagaacttatttggggatacagtggcaaaaaagagactggtggtgatcaaaacttcctacaagtattggttattcctaaaggattctgtcctcgtggtcaagctcctattggtggtatcggcccgacactggaggctgtggagtttttctattctgaaaatggaattccttgtgatgaagacccagcctataaatgggaggatcgaatgaaaattatgcctaatgactccactatttatttgcaccgcaaacgtgaacctcgtttttatgctttcgtaggatatgaccgtggcccatacgaaataaatggtgatactgtaactttaaagcttcgttttaaagaacaaaatggtgtagcagctgcagacttaaatgctgatcatctttatggcggatatgctttaaagaaaggagttagcccttctaaccaagcattaagttcaggtacattcactgttaacgcatatcctttcccaattatccgtttaggagaattatatctaaactatgtagaagcgtgtgctgaatatagtggaacactggatgctgatgcaactcattactttaatgccattcgagaaaaagctggtttgccaacacttgcagaaacttttggtaatccaacaggtgatgcattaataaaaatagtacgtcgtgaaagaatgaatgaattgatctttgaaggacattggttatatgatctgaaacgttggaaagaggctgagagtttttttgagaaagatgctaatggtatgagaggattgacttcagcaggtgcaacagcagaagagttctatcaagcaagagttttacctgaacgtccgctaattttcactcaaaagcaatacctataccctatcaagcaggattacattgacatcaacccaaatctaattcagaatccgggatggtaatttaaatcaaaattctttttttgatagaataattatatgatagagggtgaatgagttcaaaaattgattcaccctctcttttttaattttaaaaataaaatagtttatgatgtcgtacataaaaagtaaaaatacagcatgtcttatactgtttattttctgtctctacactactattatccacgcagaagaaagtaacttaaagcgtcttgctaataaaatggtacctaaccaagcaaaaaatatcgtctttgaaagaattatagacggaaccgatttctttgaattagaaaccaaaggtaaaaaactgattattcgaggaaataacggcatttccatggctcgtggtctaaaccattatatgcgttattatctgcgcaagaccacaagttggaccggacataatttatcatatacatcttctttaccagtagtaaaagaaaaaatacgtgtaaatgccacgttgccattaagatattatttgaattattgtacttatagttactctatggccttttgggattggacacaatgggaagatgaaatagatcgcatggcaatgcaaggcattaatatgccattagtagcagttattggacagtatgcagtttggcaaaacacactccgacgtttgggatactcagagaaagaaataattgatttcttaccaggcgcaggttatgaagcatggtggttaatgggaaaccttgaaaagtttggcggtcccgtttcacaacaattcattgatcggcaaaccaaacttcaaaaaaagatgttagatcgtatgagagaatatggtatggagcctgtactacaaggcttctacggcatggtccctaacagtatgatcacaaaatttcctaatgcggacatacgagatgccggtaaatggattacatatcaacgtcctgcattcttagtcccttcggatcctctatttgccaaggttgcagagatattctatgaagagcaaaagaaattatttggagaatctcggtactatggtggagatccttttcatgaaggaggcaattcaaaaggaataaatataacagaggctgcctcaaacatatataaggcaatgaaaacaaataatccaaatgccatatgggtactccaaggatggagtggaaatccctcggtcgcattattgaaaggacttaaacatggagaagcattggtactcgacttaatggcatgtgcccgtcctcagtggggtggcgaaccttcatcatcattccatagagaagatggtttcttggatcataactggatatggtgtgctctacccaattttggcggacgcataggaatgtacggaaagcttcagagctatgccacaggtgttataaaagccgagcatcatcccaaaggcaaatacgtatgtggaattggaactactccagaaggtatagggacaaatcccatcaattatgatatggtatatgatatggcctggagaacagatagcatagatataaaaagctggatagctaattataccacatatcgctatggttccgagaacagcaatgctaaagcagctatgctccaattgtccacttctgtatataactgtccctgggctgcagatggtccccaagaatcttatttctgcgctcgcccatcattaaaaatagattatgtatcatcttggggaacagcccatctttattatcaacctatcaatgttctccaagcacttgaacatctgttaaaagcagaaaaagagttaggatacatcgatacatatcgatatgacgtggtagatataactcgccaaatgttagctgattacggtaagtatatccacaaatgcatatcagacgcttacaaagagaagaatataaagaaatttgatttatatacttcaaaattcctccagatgattcttgaccaagacttattgttaagtacacgaaaagaattcttattaggagaatatataagacaagcagatacatgtggttcgaacccgacagaaaaaaggatgtttataaataatgccaaacgtcagataacaagctggacttctgtaaactcaagtctacatgaatatgctcataaagaatggaacgggattttgagcactttatacgctccgcgttggaaagtatacttcgattatcttcatgctaagttggaaggaaaaaatccaaaagaaattgacttttttgctatggaaacctgttggatagaaagtaaggaaaaattctctgcagtacctgtcaataaagaaatagaaatagctaaaacaatttatcacaattatgctgatgagataaatcaagtttatttaaaataaaccaagtcctatattatttatatttttccataaaggagttttaccttaatcttatcctttaataaagagaaaacagccttagataaatatataaatctgcaatataaataatggcgagcttggaataaaagcttgccattatcacaatttaccaattattttcattccaaaaacacagccgtcccactagcagttaccatcaacatactgccacttcccccaactgtttcgtaatccaaatcaactccgatcacagcattagcgcccatttggcgagcctgttcagacatttctttcaaagcagtatcttttgcctcacgaagcacttcttcgtatgaaccggagcgtccgcctactatatcacgaatactggcaaaaaagtcacggaagacattggcacctataatagtttctccggacacaatgccataataagtggttattcgttttccttcgatgattggagtggttgctaataacataattcttgtttcatttagaggtttatattaatattagacgataaagaaagaaaaaggttgcaggaatccttcatttattatctatttatacggatcggtcgttggaagtaatactgtacggtacttgctccgccttcccttggttgacggaggaaaaacagacctcctccccaaaagagttaaagacagagtcctaaagtcattcaatacattccagcaagcccctatcaaacataaaaaaatgtcgcaaaagcaacagctttcacgacacttcaatatctgtcagaatacacatgcctcagaacatcttactgacccgttcgataccagctacaagagcatcaacttcctcttttgtattatacacggcaaatgaggcgcgaaccgtaccttcaatgcctaaacgacgcattaacggttctgcacaatgatgtcctgtacggacagcaatgcccaatcgatcaagtaaggtacccagatccaaatggtgtatatcgcctaccaagaatgaaattacactgcttttatgctcagcctcaccaaaaatacgcatgttcggaatttctttcagccgttgcatagcatagactgtaagctcatgttcatgtaatgctattgggtctaagccaatacctgtgacatagtccagcgctttggcaagcccggtagtggcaatataatctggggttccagcctcgaatttaaatggtaattcaccgaagacagtcttttcaaatgagacagactgaatcatttctcctccaccctgataaggcggaagacgttcgagccaatcttcctttccatataagacgcctattccggtaggcccatatattttatgacctgagaaaacaaagaagtcagcatccaaatcctgtacatccaccttcatgtgaggaatggattgagcaccgtcaatcataacaggtactccatgagcatgtgccgtggcaatcatctctttcaccggattgattgttcccagtacattggacacttgggttacgctgacaatcttagtacgttcagaaaaaagattttcgtactcttcaagtaacagctcacctttatcattcatcggaatgactttaatcgcaatccctttacgggccgccaacaactgccaaggtacgatattactgtggtgttccatcactgaaacaatcacctcatcaccctcttgcatgaactcttcaccaaaactggagacaattaaattaatgctctccgttgtcccgcgagtgaaaatgacctcacgagtactacgggcattaatgaactgacgtacagtctcacgtgaagcctcatgcagctccgtcgcctgctgagacaagaaatgaactccccgatgtacattcgcattgaccgaataatattcgtctacaatcgaatcgatcaccaggcgaggcttctgagtagtcgcaccgttatctaaataaaccaaaggcttgccatataccgtacggctaagtatgggaaagtcctcacgtatcttatgaatattcattttatcactgattatttgcaaatagaacatccctggcacttattcagttcaccgcggaaacgtttttcaaccaacaaatgcagacgatctttcaacgcctccagacgaatggtatcaatcacctcgttgacaaatgcaaacatcagcaacagacgggcctccttttcggcgataccacgagcacgcatatagaaaagagcgttttcatccagttgacctacagtagctccatgagagcattttacatcgtcggcacatatctccagttgcggctgagtatacatacgggcatcacgagtagcacagaggttacggtttgtctgctgagaactggtatgttgcgcatcaggacgtaccagtaccaaaccggcaaaagctcccacagactgatcgtcaagaacatatttaaacaactcattgctggtacaattcggcacggcatgatctatcgaggtattattgtccacgtgttggtttttatcagcaatggccataccacaaagattgatctcggcaccttcaccggcaagagtaacttctgtcgtattacgggttgtcccgttatgaagtgtcattccattaagcaatacattgctgtttgctccctgtttcacatacaaattactgaaacgcactgtactggtatgagtctcttccaattcataaagatcgaaaacggagttctcttctgcaaacacttcaataacttgagttgccaagaagtttacattatccattgcatgatcgcaaataagcaaacgggcctgagccccttcttcaaggataatcaacacacggcggtttaccatgaaattaacatccgcacgaagtatattgaccagttgaataggtctatcgacgatcacattcttcggaacatacatcaatactccatcctgtgcaaaagctgtattaaaagccgtaaccgcatctttcgaagtatcagccaacttaccataatacttcttcacaagttccggatgctgttcagccatatttctcaaactaccgaagataactccttcaggcaatccggacttaggaagcgcctgattgtagaatgcatcgttcactacaaaaaacaatgaagtgctcatgttcggaacatcacatttaaacacttcataagggttcaccggaatgggcagccggttcaagttcaacccataatccggctcaaagaatttactgacatccgtatatttgtatttctcttgtttccgtgtaggaaacccctgacgttcgaaatcagcaaaagctgttgcccggggggcattcaacgcctcagcgctatgacgacagatcatcgcctcacactgagaaaagagatctatatattgctgttctgcattcataattaaactcattctcctaattccttcttaatccaatcatatcccttctcttccaactcaagagcgagttccggaccggcagtctttacaatacgtcctttgtaaagaacatgtacaatgtccggctttatatagtccagcagacgctgatagtgggtgatgacaatacaactggtatcgggagttttcagtttatttactccttcggctacaatacgaagcgcatcgatatcgagtccggaatcagtctcgtctaagatactgagacggggttcgagcatagccatctgaaaaatctcattccgttttttctctccacccgagaaaccttcatttaccgaacgattggccaatttattatccaactcgaccactgcacgcttttcacgcatcaatttcaagaactcactggctgtcaaagcgggtaatcctttgtacttacgctgttcattgacagcagcacgcataaagttcaccatgctcacgcccgggatctccaccggatactgaaaactaagaaaaataccttcgtgactgcgatcttcagggctcaattccaaaagatttttaccataaaacgtgatgcttcctttcgtcacttcgaaagcaggattacctaccagaacagacgaaagcgtacttttacccgaaccgttaggtcccataatggcatgtacttcgcccggcttcaccgtcaggttaatgcctttcaatatctctttgccgttaatgctggcatgcaggtcttttatctctaacatgatcttatcaattatttcattatctattcttttccaaaaataacctcgtccaaccattgtaatatggaatttccgtccgtctgcgtaatagtaaaagggaagttaacctttacccctatacttacggtctgccgcatcccattgctacgtacaaatccggttccacgagaattggtcttctctatctctccacttatctttccggcaatgcccatccggaaattatattccaaggtgagagcaagacaagaaagaaaatatatatcagctcccaccacaggagaaactgtgaataatggttctttaattcggtatcgataatcgtaatctttacgaaactcttgccttgaaggatcgtaataactgctactgcccatcccctcctgccttcgtggagagaggttccatccagtagaaagtcccccataaggttggattgcaaaccgttgtggtaagaaataataccgccctcctatttccagattactcattgaggcagaaatacctggattcaaacctatttcttcacctgtatatcctcctttcagagagaaacgggtataaggaatataatactccaacattaaagtatgtatatgtcctgcagaaacagcttttcccgaaagtgtattctttgtgactatcggccaatttcctccccaagagccactgatcgcccacctcctttcttgatcgtcaaggttttgtgccagtactacaccaacataggacaggaatatcaatagccaaccaacacgtttcgtcttcattatcctacactgccttcaagagagatcgtaagtagtttctgagcttctacggcaaattccattggaagtttattaagtacctccttagcatagccgtttacgatcaatccaatggcatcttctgtagaaataccacgctgattacaataaaatatctgatcctcactaatcttactggtagtcgcttcatgctccacaactgccgtttcattatggatatccatgtaaggaaaagtatgtgcaccacacttatcacccaacagcaatgagtcacactggctataattacgggcattatcagccttttcggctacacggaccaacccacggtaagagttctcgctcttcccggcagatatacccttgctgacaatcgtactacgggtgttcttacctaaatgaatcattttagtacctgtatctgcctgctgataattattcgtcacagctacagaataaaactctgcagtagaattatccccggaaagaatacaagacggatatttccatgtaatagccgaacctgtctcaacttgggtccatgaaagtttactgtctactcctttgcaattgccacgttttgtcacaaaattataaactccacctttgccttcggcatcgcccggataccaattctgcacggtgctatatttcacttccgcacgatcatgtaccatgatttcgacaatagcagcgtgtaattgattctcatctctcattggagctgtacacccctccagataggaaacatagctatcgtcatcagccacaatcaatgtacgttcaaactgaccggtattggcagcattgatacggaaataagtagagagttccataggacaacgtacccccttggggatatagacaaaagaaccgtctgagaatacagccgagtttaatgccgcgaagaagttgtctctatacccaacaacagatccgagatactttttcaccaagtcgggatgttcacgcacagcttcactgaatgagcaaaaaataatacctttctccatcagtgtttccttaaaggtcgttttcactgacacagagtccatcactgcatccacagccataccactcaatgccatctgctcctccagtggaatgccgagtttattgaatgtctttatcaattccggatcaacttcatccatactcttcgggccctccttctttttcgtaggatcggcataatatgagattgcctgatagtcaatttccggtatacgcaaatgtgcccaagtaggcatctccagcgttaaccaatgacgataagctttcagacggaactccagcaaccactccggctcgttctttttagacgagatcaaacgtaccacgtcttcattgagtcccttctctatgatatctgtatgtacctccgtagtgaagccgtatttgtacttctcctgcgtgagttcttttacatatttattgggttcttcttgttgcatcatttttatttgaatatatattgttgtgtaacctcttttgctgcgggaaagaagatccccgcaaagctttccataggataatataacaaggactgctccttctttgtttggctaatcaactgactatcggagtctataaactgaatgacacagataaccaagctcaccaataaaagatatttcaaagctccgagcccggctccaagcatgcgattcagccagccaagtgaaaccgcctccaatgccttggttaatactgaagccaccaatgtaaagattagcggtacagcgatccagataatgacaaatgccagtatctgcgccacagtcatggaatcagtcaccgtagggcataacttcacagccagtgaggtgtacaaagcttttgctgccaatagccccacaattaatccgagaatggaagcaagctgccggataaagcccttcataaatccgacaataacaccggctccaagagcaatcagtatgataatatctatggtcgtcattctatgtaaaacgaaaacggagacacggagttgtaatcactctgtgcctccgtatattttcagtttcgtgagaattataaagtttgcttcacttctacttcttcgtaagtttcaatcatatcacctaccttcaaatcgttgtagttaacaagactgataccacattcgaagtttgtacctacttccttcacgtcatctttaaagcgcttcaaagcattgatggaacctgagaagattactataccatcacggatcaggcgagccttatccgaacgtttcaccttgccctctttcacaacagcaccggctactgtacccaccttagtaatgtggaatacctcacgcacttcgatagtagcagttactacctctttcacttccggagcaagcataccttccatagcagccttcacctcttcgatagctgcatagataacagagtacaaacgtatgtccacaccttcctgttcggcaaacttacgtgcggaagccgatggacgtacctggaatccaataataatggcatccgaagcagctgctaatgtcacatccgattccgaaatctgacctacagccttatggatcacatttacctggatctgttcggtagacagcttgattaacgaatcactcaaggcctcgatagagccatccacgtcacctttcacaattacgttcagttcctggaagttacccagcgcaatacgacgtcccacttcatccagtgttaacagtttctgagtacgcagcccctgttcacgctgtaactgttcacgtttattggcaatctcacgggcttcctgatcagtctcaatcacgtggaaagtatcacctgcagcaggagcaccattcaaacccagaatcaataccggttccgatggccctgcctgggctacacgctggttacgttcattgaacatggcttttacacggccgtagcttgttccggcaagtacaatatcccccaccttcagcgtaccgttagagaccaatacagtcgcaacatatccacgtcccttatccaaagttgattcgatgatagaacccgtagcattacgattcggatttgcctttaagtcgagcatttctgcttcaagaagtactttctccatcagttcaggaactccgagacccttcttagccgagatatcctgtgactgatatttgccaccccactcttctacgagataattcatctgagccaatgtctctttaattttctcgggattagcatgaggcttatctattttattaatagcaaatacgataggaacacctgctgctgctgcatgattaatggcttctttggtctggggcattacatcatcatcggcagctacaataataattgcgatatcggtcacctttgcaccacgggcacgcattgcagtaaatgcctcatgtcccggagtatcgaggaacgtaatcttacgtccatcttccaatgtaacatgatatgcaccaatatgctgtgtgatacctccggcttcacctgcaattacatttgctttacgaatgtagtcaagcaacgaagttttaccatggtctacgtgtcccatgactgtaacaatcggagcacgatgttccagatcttccggcgcatcttcctcttcaacaatggcttgggctacttctgcactgacatattcagtcttaaatccaaattcttcagccacaagattaatcgtttctgcatccagacgctgattgatagaaaccatcataccaatgctcatacaagttccgataacctgatttacagatacgttcatcatgcttgccaattcattagcagtcacaaattctgtcagtttcagtaccttgctttctgccatttcctgatcttccagttcctgcatacggttggacgccatgtcacgtttttctttacgatatttggcacctttgttcttacctttgcttgtcagacgagccaacgtttctttaacctgctttgctacatcttcttcgcttacttcctgctttactacaggctttttgaagcggtctttattattgttattacggtttctattctgtccgccgccaccttgttgatttcctccacggttattattcgtacgctcactgtttggagtagggtgtgcaaaattagaagcaacattgttcacatctactttttccttattattgttgatgcgattacgtttcttcttaccgttaggatcaaggttttccttaccaacgaccttagcttgtttactatcttctttacggatttccttgatgatggcttccttcatctgtttcttctgatcctgacgaagcttttccttctcttcacgctctttccgcttttcctctttcgatttcttcttcggacgtgtcgactgatttaatgcagccaagtcaatctgcccgataacattaatcttagatacaaactcagtcggacggatcttaaatacgccctcctcttccttctctactggagtaaccggtgcttctgctaccggtttctcttctttcttctctgttttttctggagacaccacgacttttggttcttctttcttgacttcctcaaccactttcttttctgtttcaacaggcttttcaaccaccaccggtttcggttcttctttcaccggtttcggttccgaagtagcaggagtcacagtgacttcttcttttttcacttcgtttacaacaggcttaacctcttccgctactttcttttcctcagcagctacaggttgtggttttggctcttctttcatcggttctttctcaaccttccggttcagtttatctaaatcaatttttccgacaggtttaaacttcggacgcacatcttccggaatgaccgtcttaatcacatcgtcagcaacagtcttctccggttccttcttatcataaccatcgatagaaacagatgccttgttgcgatctttgttttgacgttcctgaatgaaacgttccgattcaagtctaaggttcttatctgtgctgaactctttcacgagcatagcatactgctcctcggtaattttcgtattcgggtttgcctcaacggtataccccttcttttgcaagaactcaactaccgtcgcgattcctacatttaaatctcttgtaactttgtttaaccttatcgtcatattttaatttaaagaataatggagaaagaataatttgataatcgttcaatatgccaatgtgccaattcctatacgccctttctttttattggcatatcggcacatcatcgcattgatctattattcattatcttcaaactccgatttcaaaatgcgtaatacctcgtccaccgtttcttcttcaagatccgttttttcaatcagcatttcgcgaggtgcattcaatacagacttagccgtatcaatgccaatagccttgatagcatcgatcacccatccgtcgatttcatctctgaactcgtccaaataaatatcttcatcctgcgcgttttcatccaactcacggaacacatcaatggtgtactcagtcaacatactggccagtttaatattcaaaccgcctttaccaatagccaacgatacttcttccggtttcaagaatacttctgctttacgttcttcttcattcagacgaatagaagaaatcttagccgggcttaaagcacgctggataaacaatgaaatattagatgtataattaatcacatcaatgttttcattgcgaagttcacgtacgatgccatgaatacgacttccctttacacctacgcaagctcctacagggtcaattctgtcatcataagattctaccgcaatcttggcacgttcaccgggaatacgggcaatctttttgatggtaatcaggccatcgtttatttcaggcacttccatctcgaacaagcgctgcaggaaaaccggagaagtacgcgagaggataattttcggattgttgtttttgttgtccacgcgtgccaccactgcacgggcagtttctcctttacgataaaaatcgcttggtatctgctctgttttcggcaacaataactcatttccttcatcgtcaagcaacaacatctcttttttccagatctggtatacttctgcgttgatgatagtacctactttatcaatgtatttattataaatactgtccttttcaagctcaagaattttagaagccagtgtctgacgaagattcaaaatagcacggcgaccgaacttagcgaaaatcacttcatcggttacttcttcacccacttcgtaagaagcatcgattttttgtgcttcagtcaacgaaatttgcatattcgggttagtcaaatcctcgtctgccactacctcacggttacgccatatttcaaagtcacccttatctgggttcacaattacgtcgtaattttcatcagtgccaaacattttcgcgatcacactgcggaacgactcttcgagcacgcttaccatcgtggttctatcgatattcttcagttccttaaattccgaaaatgtatcaatcaagctgattgtttcttctttcttggccataattatttaaaactaattaagtatttagtatattttatatcatcataggtgaaggtttcatcctcttctaccaattgaggacgtttggctccttcgggttttactttcttttgtacggtcacaacaaacttttcttcatcagcatctttcaagaccccgctcagtttgcgtccgcctttagtcagtacttccacctccaggccgatgtggttatagtactgttgcaatactttaaatggctgtccgattccggcagaacctacttccagctcataatcttcctcttcacggttcagtttcgactcaatgaagcgactcagctccacacagtcttcaatccaaacaccttctgcatggtcaatttcgaccacaatcttgtcatcagggctgacggtcacttctaccagaaaatagtctttatcctccagccattcttcaacaatctgacaaacagttcttttttctatcattgattaactattaagaacaaaaaaaggagcttaatcgcccctccacctttcatccgtttcgggtgcaaagatataaataatctgttcgactacaaaatattagagaaaaaaaagaaatgataagaaaaaaacagaaactaccgacacttcaaccgaccataaaaaacataattattgtcgctatcttgaatactttccatcaattcgcaaataggcgactttgttgaatgtcaacttgcttacaatttagagaaatttcctaaagacctttttccctgcgcaaataaagaagaaaacaagttgattcgcactacatcataaacctttataaacaagactattaccatctttcatccgatctttactccggcccgcatacccgggcccacgagcataggcatacgggctcggataagattcagccctttttcactaaagacacgaagggaaacacaatgcttttatagacataagcagataagacaatagatacattatgctatataccaagctattgcacttgctttttctactaaaatgaaaggtggaagataataccctcctattatcgaattttcattaatgccatatctgtaggaacagagaagagtgtttcttctgccgatgatacttgactacaagagcttagcaacattagcagaagaaaacatttactcaaaaatttagccaaacgatacattaaactcttaatgatattagcctcgttcagcttttatcttcttcacacgtgcacacgtacgatgtccataaatgataatcactacgaaacagataaaaggaagtatgaaagacaagtttacagcaggcatacccaacaatgtatgttggtcaataatacaagcctgtaatggtggcaacacagagcctcccagaattgccataatcaaaccggcagccccaaatttggcatcatcacccaaaccacgaagagcaatgccataaatcgtgggaaacattagtgacatacaagccgaaacagctactaaacaatacaatccccatatgtcttgcaaaaaaatcacacctaacgtaaaagcaccacccgcaatcgcaagaatcttgagaagcatccccggattcaggtagcgaagaataaatgtacacacgaaacggcttatgcaaaaaataatcatagcaattatattatattcctgggaaagcacttcagcagccttctcctccattccctgcgacataaacaagcgcgttccatattggataacaaaagtccaacacataatctgtgcacctacataaaaaaattgtgctatgactccttctctataatggggaattttaaagatacgcttcaatgtgggtataaaatcaatattatggttcttatcgccattcttaggcattttaacggcacgtatcacaaaaagcatcgctagaattactaatcctataatcagataaggagcaatcaacacagagagatccgactctttcaatacttcaaactctgccggagacaattggctgcgttctaccgtatccataggattcagacgcgcctgaatgaaattcatggcaacatacatgccgagcaatgatcccatcggattaaacgactgcgccagattcaatcgtcgggtcgccgtctcttctgtacccatcgataatatataaggattagcacttgtttccagaaacgagagtccacatgtcaaaataaaataagcgagcagaaaagggtaataatcgcctgtcatctttgctgggaaaaacagcaaggcacccaaagcatatagtcccagtcccaacaggataccggctttataagagtatttgcgaataaacattgcagcaggaaaggccattgcaaagtatcccccgtaaaaagcgacttgtactagtgctccatcagtgacgctcatacggaatattttcgagaaagcctttaccattggattggtaatatcgttagcaaacccccatagagcaaaacaagaggtcactaagataaatggtaggatataacttactccatctttatggagaatggaacggttggtgtttttcatgaattgtcgggttattcaggataatatacctgaggttctacactgtttatgataatttcttttaattcttcccaagaatcgacttcgccttgggcttttgcctgcactaaaatattgccgatagcagtggcttctaccggaccggcatacacaggaatacctaaagcattggcagtaagctgatttaacagacggttctggcagcctcctccaataatatgaagctgtttgaccggtaccggcagacatcgattcatctgctctactcccaatttataacgatatgccaatgactcgataacgcaacgaacaaattctccttgagagactggtgtccgtaaatggtgcttatgacaatacttaatgatcgactcttccatatggtcgggattgcaaaaagcagaatcatccacatcaatcaccgaacggatatccgacactgtagcttcagctattgcacaatcataactgatttcctttccctgttctttccattcagccatcaaacgttgtaaaatccaaagcccagttatgttttgtagaaaacgtatcttaccttgtattccgccttcattcgtaaatccggccacacgtgcttcttctgtcagaatcggttgatctacctctgccccgagtaaagaccaggttcccgaactgagataagcccgattgggttcattggagggaacggcaaatacggcactggctgtgtcatgcgaaccaacagcaacgacattgatacatcccaaaccggtttcatctgctatttcctgcttcaatttgccacggacagttccgggaaaaacgatttcaccaaaaagcggacggggtaatcccaactcactgatcaagttatccgaccaattacgctgacgagcatccagtagctctgaagtagaagcgatacaatattcattgttcgctactccggtaagaaaatagctgaacaggtcaggcataaataatagcttatcagccacccggagttgcacatcatcattctgcttcatactataaagttgaaacagagtattgataggcatcacctgaatcccgatttcagcgtaatgaacagtctgatcaatctgtttaaacactctttcaggtataccatccgtacgggaatcacgataacagaccgggttgcccagcaacttaccatccttatctattaacccaaaatcaactccccaggtgtcaatagccatactttttacttcatagcctttccgggcagcgacacgaagtccgtttttcatttcttcaaaaagagaaagaaaatcccagtaaacacagtttccaagttttatctgccgattggcaaaacgatatacctcttccagttttagcttaccttcggtaagggtaccggccataatccgaccgctacctccaccaaagtcagctgctaagtaagtactcataagctggtagtcattatctattttgttttctttcccaatacatatacctccaagtcatcaatctcttccggcgtcaagaccgaatagtcccctccggattgaactatgatacggcaagccatctcaaagaaagtagcacgttcgtatacctgatcaaagtccttgccacataccacctgcccatgattagtcagcaatacagaattatgttctttcatcgcttccacaacagccttggcaagcgccggagaaccgggacggtagtaaggaataataggaatctctttacctacatgacaagggatctccgcagttacattgaagttagatggtttatttttcatacaagaaacagccgtagcatattccgactgaaaatgcaaaacgacatttacatccggacgctcacgaagaatccccagatgaaaggtactttccatggaaggtttcacaccgttttgaggcgtacccgtagcaatattacaaatggatactttctctttctgcaaattcggcacccaagaacctgttccggaaacaagcgcttcttcaccgattctccatgaaaggttaccgctactgcacaacatcaatttggcatcgccatagcgatgtgcctgagcaaggtattgctcgatatgttcattggttatcataatgctttcttatataaatcaagaataatttcttttgttacttcccgtggattgcccggcgtacatacatcagcaaacgctgctgtggccagacggtcaagatcactttcctgaatacccaagtccgacaagtgttgcggaatattgaccctcaaagataatgtttttacagcttcgactgctgcttctgccgccttttctttagtcatgtcagtagaatacacattcatcgctttagctatctcaacatatttgtcaagagctgcaggagcattgaactccataataatgggcaataatagagcattggccacaccatgaggaatatcgaaaatagctcccaacggatgtgccataccatgcacaactcccaaacctacattcgaaaaagccatacctgcaatatattgagccactgccataccgttacgtgcctctgcattcgatggttcttcaacggcagtcacaagataacgattgatcatttcaatagctttaatttcgaacatatcactcatctcccatgcccctttggttattaaaccctcaatagcatgagtcagtgcgtcgagtcccgtagctgcagtcagacttttaggaagtgtgtacatcaactcagcatccactatcgcaatagacggaatatcattaggatctacacaaaccatcttcttctggttctgttcatctgttatcacatagttaatagtcacctctgccgcagttcctgcagtagtaggcaacgcgatgatgggaacagatttcttcttggtatctgccactccctccaatgaaacgacatcactgaattccgggttattggcaataataccaatcgcctttgccgtatccatagaagatccgccacctatagccaaaataaagtctgcaccggaagatgcaaatgcctcgacaccggctttcacattcgacactgtaggattgggcttaatctcactgaatatttcataaggaatcttggcagcttccagcaccttaagtactttgtcagctactccaaactttatcaaatctttgtctgttgcgacaaatgctttgtgcagccccaaacgtgaaatctctttggggagcacttcacgtgctcccggaccgaagtaagaaacttcgtttaatataaatcgattaatcatgttgtactcttctaaaggttatttataaataggaccataagtagtacaagctctataatctgctccttctttatccataccaaaagcattccaagctgccggacggaaaatctggtcttcttctacattatgcatgcaaaccggaatacgaagcatggaagccaatgtaatcacatcctgcccaatatgtccataactgatcgccccatgattggccccccagttattcatcacagaatatacatctttaaaggccggtttatcacacaaacgaggaacaaaccaggtagtaggccatgtacgatccgtacgttcgtcaagtaatttatgaatctccggatcaatctctactgtccagccttcggctatctgcagtactggaccaagaccttttatcaggttcaaccgcatcatagttacaggcatacctccttttgataagaaattggaagagaaaccacctccacggaaataatcgcgattagccggataccaggtagtagcctccagacacttctcaacttctccttctgtaatttcccagcaaggtttcatcgcaggttctccgttagcattcgtctgctgtccggttccgtcaagagtagttgcccccgaattaatcaagtgaataataccgttagcagccattcctgtcaactctttaccggtcacacgtttcactgcttccggactccaatatgtgcgtacatctgaaaaaatctgtgcacgattcgtcagcagatgaccaaacagcatagccacaccgttacaagcatcgttttctgttgcaacgacaaaagcctcacgaataccattccaatcgaacgaagtattgagtaatgcttcagagaagtcgccattcggatagaaatcggtccactgacgctgcccttggaaacctgccgcaatagcattatgccccaaagcctcttccttaaatccgagttctttcaatttagggtttccctgcatcagatcgcgcatgatgattgtcattttcacaatgaactcccagtcctcatctttttgtgcacgggtcttcgttttttcaggtatattaaagtcattgccctcattctttttgcaatatttttcagtccaagccattgccttggcatactcttccttatcatagattccttcggccatacgacgaataatctctgtcaaatcaatcgattcattacgcatgcccagatattcctggaaaaagtccgggtttacaatcgaaccggcaatacccatagaaacactgcccatagacagataagatttgccacgcattgtggctacagcctgagccgcacgtgcaaaacgcagaattttttcagctacatctgccggaatagaattgtcattcaagtcttgtacatcgcgaccataaatgccaaatgccggaagtcctttctgtgcatgtcctgccagcacagcagccagatatacagctcccggacgctctgttccattaaatccccaaacagctttcggataatacggattcatatccattgtttcggcaccgtaacaccagcatgaagtgacagtgatagtggctcctaccccctcacgttcaaacttctccgcacaagcagcactttcagccacacgtccgatggttccatctgcaatcacacactccacaggggttccgtctccattcttcaaattagaagtgatcaactcggcaacagcttttgccagattcattgttttttcttcaaggctttcgcgaacgccgccctgacgtccatcgatggtgggacgaatcccgatttttggatactttttcatactatattattaagtttattaaacaatcttcctatgctgacctgtgctgacacacaggtctgaaaagctcttttataaagaagcccttaacctgacctccgtaggcaagtaatcttgtatggttttcccctgcaaaacaaactcagcagctttatctcccatcttttcccaatccacacttagtgcagttattccctgatctatcacttcataagcaggtgtatcattatatccgatcaagccaaaatcaaccccacattgcaatccctcaaccctacttttcttaataatacttactacatctatttggcgaattgctatataaacttctcctctgcgaacctgaagtccctcaatatcactcaccacttcacaaccaagatgttgatcggcacaaaatctctcaaaaaagtcacggctactccggggatgcatactatcatctactaacacgaaaacgagtttttgatattttctcaatcgatctgccagttgaaatagcgcattatagaatccttgatcaaagtcctgacaaacataagaaaacccctctttctcaaatttaccgaaatcaagaagaagaagtttggatggatttatcttataaagattaggagacagtttttcgttatcgaagttcatcacaatatatttattataccgccccaacgattcacggatgatggtattgaacaaacgttcattgtactgatgaaacagcaggtcgactttatagcggatagacaaacgctttacaaaactattgtaaagtgcatacttaaaaggagaatattcatcaagcagaagcaatacattcttcaatctccccacaacgtaatacccttttcccggagtagaatcaataatccctctttcttttaaatcaagaaaagctttaaacacagtatcacgggaaacttcatacgcctgactgagctgattaatagaaggcaatgagtctcccgatttatatactcccatcgagatatcaaaactgatcttatcagccagttgctttactttggtcgtttgttgtccaaaagttattttcatacgtatcaataaaggttatttaattgtagatagctatgctgaactatcatgatacaaagaaaggtagtttattctggataagcaagataaaatggtatgttatacaacatcaaaggcagagaacaaagcaattatttatagtaatcatttactctacaaccaacagagctactcttacttaaatatagaaaagcatcccttgtgttacaagaaatctaaatctattgactttactaatttaaagtacaagtccaagtctatatttttatgatgaagtgccaaaggatataaaaccgttccagtttttgagcaatagaatatatatgtcatatctttaaattcctcctgaggcatggcatacttttccgaacaaaaaatagacgacaacttaagtttataaacggtattatagatttccatattcttcttcaatttatcagggacaaccaccactaaatccgaagtactggataattcagagatttgtttaaacaaccatttattacaaacatcacaaataccattaggaaacacaaggacaaaatatcctgcaaattcttttttatcagaaattacatgtggaataatccctgattctatttgattaactattaattcataattttgttttttctgatgttccaactcttgccccaacagtacttccctgttttgttggtaatagtagtatcctataaacagacagttagtaaatagacacaatgctaacaacgaataaaaaattatatcattactttttctcataaaaacaaactattatatcatttgaattttcatctaacatatcatctagttttaccatccacttttctcctacgctttttttacacttctttttcaactgcataattctatcaaaatcgtaaaaagacaatgtataataatggatattctcctgaacattagcacgatataaataatcttcaacagggacaacctcatttaatatcaagtcatcatatacccatttatatgaatgtacgctataatcagatttatctataatattccaaaacagttcttttttatacatataagtagaactcacaaagcgctctccttcaaataaattacgatgcgcccaaataaaaggactattttcacaaacatctataaaagactgaaatgtatgatcttcattataaagttctttttccggaaaagtatattcattttgtttaaaagcgatgtatccagtcatatcattagcagataaccgacaaataccatttctaaaaacctcgtaataatagatttcatcctgaacacgatataaacaatcactttgatcaaaagaaatatactcactagactttttatccatattcaatattctatttacgattgtcccctctttcttattatacacataaagtttatactcttccttttttttctctcgggagatcgattttaagaatatataatttccaccattatcaacaacaaaatctgtagctgaaagtatctcagacggtagccgaaagcgctctaccattttttgtttctgcaaagaatattccacaacttctgttccagaattaatcaataaatagatagatccatctaatagtttaatactccaaatatcatatgcttcttcaggtccctgcccccatttcaaaacggtttttaaatatcggccttcattattaaacaaatggaccccaccctgatcagactttccttgcacaatccacaaagaatcatacttaaatactttatttattgacgctaaaacaatatcattcaattttacaatttcacatctagaaaagagagcagataatgtgatagtatcctcttggggtatgatacttaccatagtatcggcttggataatatcggagtgtttaacaggtcgattacatcctgccaacaacaacacgaatataaacaaattcaagtacttcataactaacatattattagaataaaccggaagaggaaaacacctcttccggtaacatttgaacaagtaactattattttttacaaaaaattgaatatgaacaagtgcgggttggatcaggatccgaaacacatcctgtagcatttttgggacttgtacaatattgattatgggctccagtatagtttcccggactgttttcataagtagctgctacagcttctattccagatagagttaatgtctcagcatcatccgatttcacaacgacattaagcacatttacaacaacaattgtaaataatgccaaaagacaaataattttcttcttataattcataaatattttttttaaaattcatatttcaagaaatcagtgagaagaactttcctcccattcttatctctaattgttttattttatatttgaagcatatcttagtccctccttggactgattcaaagtgggtttactaaacactaataatacaactcactcctttttaaattaatactctttcaaaaactgcgcccattcataacataggaaactttgctatcgcttatagggcaatctacattaccactgccataacaacttgtaggaacatctccttcacctgtagcaagcgcttcaacattcactaaagccaattcactcaaatattgcttattattcattcggcaaacagtcataacggcaataccgactaataataaaaaggcacttacaaaaaaatttctcatactccgatttgtttttaacggttacaaatctatggaaaaagaaaaggaataaaaaaacaacaagaaggaatcgactgacattcactgacaaacaataaaagcctatataaacctccgaaagcagatccgaaagcttatacaaaattctcaaatacaaacattataaaatttgcatctgataaatttcctcccctaaatattcaatttgtatggtcataggaagctgccttaacaaatcacgcaaacgttctattgctttatggaaacaatcgggagaaatagattttcccggccaaacatctgccataatttgagacatagacagagtatgattctcagccttaataaacaaaactaaaagaacacgctgctggggagtaagagatacttccatgttttcgcagatcaatacacctttaccaacatccagtttaagatcatctttcaaatcgtatataggcagagtcccctttttaacagcaactgtctgaatataagtagtaacctcttttattttaggagggtgaacagacaacttatatatatagattgtaagaatcacacaaagcacaaaagcaacaacaactccaataagagtccaaactatatttacaaatactgagaaaaaagatatagatacaaaccctaagatttcaatttcacatctatagcctacataataagtaaatatcgaagaataagataaacaagaaaggctatccggactaaaagaagagcggaccactccattattatcagaaacagttaattttaatcctgtacgaataggaaatttctgtctttcattcaacatagtcctccatagtatattcaacgtatctacactcaaaggatgtgttaaacaaacaacagtatgcagtccttgctctccaggggaagacacgatatttttgcgaatcttcattgcatcaacccgaaaactatacgtaccgtactcgtcctgtatagtaacttttttgaaggctgtatccactgaagagacgaaagagtcttcacatccatatctccaactttccacttgatccatacctcgtttttgcaattctacatgaaaagcttcatgaaaaacactatccgcatatacatgcaatgcctttacttcttgttcatatgcatagttcccccctaacaaaccaagaagggcataccctccaatcaaacaaccaaaaattgttttttcccaagacattaccattcgtttttcacagttaatttcagcaaaggtatcgttattcttgtaatgaataaaacaaatcactatctttatcacggatattataaaaaaagaatagaataacattatggcacatcgtcttaacactaacaagcaatttatggtaggaaacggcattttggcatttgccgtcatatttgtcgtggtcatctttgtatatatgagtttaagattacaacgagaaaaagaagctaatcgtcattttagtgaaacatactccattcagttgacaaaaggcttcgtgggtgattctatttcactgtttgttaatgacagtctgatcatgaataaacagatcaaagaggaacctactgccatcgaagtcggacgcttcgcagagcaaagtgcactgatgattgtaaacaatcaaactgaaacagtagccgcatttgacctaagtgagaaaggaggtacttaccgttttgaaaaggatattgacggtatcaaacagctgccacaaaaatgagaaggcaagagcttttccagtttaaaccatagaatataaaagattcgattcacactcatgaaaaactaaaagccgattatccatgcagacaatcaatctgtaataatcggcgaaatctgtggtgggaagaactttacgacatttgttttgtaactgtcatgtcagatctcagtcttgtacctcttcaactcttcgcgtagttccaatgctttcccatcggtaagcccatttagcaagtcccaaaagcgatctccatgattcatctcgcaagtatggcaaagttcatgcaaaaggacgtaatctatcagatgttttggcaacaatacaaggaaataagagagatttatctttttacgagaggaacagcttccccatcgcccacggctcgaatttatctgcacgctctcgtagggtaaacggtgcttctctgaaagcatatacaaccggggaggcaagataatctttgcattccgtcgcaaagcttcttcaatcacttttcgaagccaatcctgcaaattcgagtctgtaaaatcagctgttggaggacagataatccgcatctctcccaactctgaatgtgccaaaaacctctctcgtttaccactaaccagtgataatttgaagtattctgtctcaatccgatagttcaggtcaatcaaagggcgcaccaacttctgcctggaatccagtaatcggggacgcaacttctctattgcctcttttacctctcgcatcgtaactcccagaggtatactaatgtaaatagcatccgctttcgtacgaaaaacaagccgttttgcacgcacattatcgcgtacaaccaaacgccctaactctttatcttcgataaccctatccaatgttactcttaattataaatacaaataaacggattattttgcataaaaaagaaagatagatgcaacttttcatagccgacttacgtctaaatcaatagaaacctctaaaaacgaaataaaatgaaaacaattttcagaatgttatcggtattactgctaactacaggtttattgagtagctgtatacaaataggtgaaggtatccaacccagcaagaagctcatcacaagagactataaagtgaaggagttcaataagattgatgcggggactgtgggcaacatctattatacacaatccacagacggaaaaacggatctgcaaatctacggaccggataacatcgtagcactgatacaagtagccgtaaaggacaatacactatttttgagtatcgataaatcgaaaaaggtacgcaacttcaaaaagatgaaaataaccattacatctcccaccttaaatggtatctcctttaaaggagtgggcgatgtacatatcgaaaatggattaactacggataatcttgatatagagagtaaaggggtaggtaatgtggacattcaatcgctgacttgccaaaaattgaacgttcagtcgatgggtgtaggtgatgtaaagcttgaaggcacagctcagatagctgctcttcattccaaaggagtgggcaacatagaagcgggaaatctacgagccaacgcagtggaagccagttcacaaggcgtaggagatataacctgtaatgcaacagagtccattgatgcagccgtacgaggagtgggaagtattaaatataaaggtagccctactataaaatcactcagtaaaaaaggagtgggaactatcaagaatatctaatataacaaatcagaagagcatgaaaaaatatatactatcgagtcttacaattacttttttgttactcagcatcacagcctgttcgcaaggaaagcaaatcagtggaagttccaactacatcactaaaaatataaaagtcggttcattcgaccaaataaaatcgatgagtagttcggatattgtttatacacaaaaacagggcgcccccaccgttcagatttatggccccgacaatatagttgaattgatggaaacctctgtcagcggtcgaacattaacgattaaattcaaaaagaatacctccatccgtaatagtgggaaactcgagatcagagtatcttctccatcattaaaacacttatctatatatggatcgggaaataccacttttacaaatggaataaaaagccatgatgaactgcaaatgtctatttatggctcgggaaacatcagcggaaacagtttctcatgcacaaaactggcagcacgtatttacggttcaggaaatgtcaacctgaaaagaatcagtacatccgacacccaagtaaacatttccggctcgggaaatgtactgctagacggcaaatcgaccgaggccgaatatcacattgccggttcgggagacattaatgctaccgaattaaaagtagagaatgtcaatgcacgtattagcggttcgggcagtataagatgttacgccacagaaaatctgacaggaggagtcagtggcagtggaaacgtagcctataaaggcaacccgcaaataaacttttctaaaagaggactacagaaactctaaatataaaaactctctcttagtttaacttcgctctatgaagacaacgtagtataaacataaaagggctactgcatcacgcggtagcccatttatttagttagttttttattgaaattgagagaattgaaacttcacagcctcaagtcaaaaagttgttttaattaagcacactaactatattatatgtttaaagcaaatgaaaatgtctttttatttgtgcaataaactccggactcatattccccgtaaagtttaccacagcaaagtgattcttttcgtgcatcaacatcaccagttcaacaatcgtactttttttcttacgaaccataatctgacaattctcagatttgtccttaaaagaaagaaacgattcaaaccgaccggaattcttctctaccaccttcaaagctgcattgaaatacttttttccttccacatcagaagtaagcacctgcatgcttttgagattagagatcatatccagcacctccttatctttttcagcatcgcttttcataatctcctccatcattttcggactgatcgtaacacaagtcagattggaatctgcctgatgttcagccatgaaacgtgaagcaaagtcctgggccgaaacagccacagacagcaatgccatccagcacattaaaagaacgctcttcattattctattccttcatcacacgaaccggttcgacctttacactgtctcttacgacctgatcctgcgatttatttataccttcagacaacatcatcaacgcagaagaaacttgtttgtaagccacttcgggatcgtcgtatgtgtccttgtaagcatcataattataatccaaagcctcatcggcaaagaatgtatgttgtgctacattgcccaatgataaaatcaatgcaaccacggcaacagccttaaataaaggcataaatcttccgaccattgtcagatgttttgcttttaccacaggtgcctctacctgagccagaatacgtgcatcaaagtcttttcccagccctgcctcctgttgaacagtctgataaacaaacagttctttgtaacggagcaaatgagcaggcacctcttcctccgaaaagaaagagcgcaattccgattcttcttccagagaagtctcacattgccagtatcgctctaaaagctgttctatatacttataatccatattcatcaatctctaaatacctttgttttaccttttgtcttgctctgaaaagattcacttttacctgttcctctgtcagattcaagatttttgctatttctttatagctctctccttctatatccctcaactgcataatgagccgttgcttctcaggaagttcgttaatcagacgatggataatcgacatccgttcattattgaccaattgatcataaggcccggatatttcggattcttcttccatttcaggtgtgagttctacattctgagcttcttttttttggcttctgtctatagccagattttttgctacagtcaggcaatatgcctctatagatccgaattgtgtccactcttcacgtttattccacactctaatcatcgtatcctgaacaacatcctctgcttcggccctgtcgaaagtgattcggagtgccaaacgaaagagtttatccttcaatggcaatatgtcgtctcggaagctgatttcttgcatctctattaagttgacggatgagctggtgaaaagttacagaagtactcctattttttttgaattatttttttatccgagttcccccatctgtatgaatagctgatgctaaggtaattacaacctcagacacacctgcattaattgcctcaaaagaattttcaagcttcggtatcattcctccctgaataaccccctcggcaatgtagcgttgaaactcggcatgattaatttgggggatgacactctcatcgtcattttcatcacgaagcacgcctttcttttcgaaacaataaaccaaagtcacatcaaaaatagcagaaagggcttttgctgtttctccggcaatggtatctgcattcgtattgagcatattcccttgtccgtcatgcgtcaacggcgccatcacaggaacaacacctttatgaatcagatcggaaagtagcgtagaatccacacgctctacgtcccctacaaaaccataatcaacctctttcacaggacgcttcattgaacggattacattcatatccgccccggtcaatcccaaagcattgacaccgcgagcttgcaatccggctacgatatttttgttcaccagcccgccataaaccatagtcaccaccttcaatgtctcagcatcagtgatacggcggccattaaccattttgctgtctatacccagttgcgcggctattttcgttgccgaacgtccgcctccatgcaccagcactttatgcccttcaatggctgcaaaatcattcaacaactgatttaatgtagcttcttcttctacaatcttacctccgactttaatgactgtcagtttttccttcatcttttctttcattacaaattatgagttatgaaccacggattacaagccacgagctacaagaaacgagactgatatcatgcagtattcgtaacttgtagctcgtcgtttgttgttcgttgtttattgtaatcctttctatttattcaagataagtgtatccatacaatcccgaacgatagttggaaaggaattctttaccttcttctaccgaaatttttccctctttaacggactttgtcacccatgtttccagggttcgaaccagtttcttcgggctatattgtacatagtcaagcacttcggcaaccgtctcaccatcaataatctgttcaatgttatatcccttctcattgacagaaacgtgtactgcatttgtatctccaaacaagttatgcatatcacccagaatttcctgataagctcctaccaagaataccgcaacataataaggctctttctgcttcaagctatgaaccggcatatagtgtgccacattcctggtagagataaaattggctattttcccatcggaatcacaggttatatcttgcaaagtggccgaacgatccggcttctcatccagacgctgaatgggcataatcggaaaaatctggtcgattgcccaagaatccggcagtgattggaaaagtgaaaaattacagaaatatttatcggccaacaacttggacaatccacggaattcatcgggggcatgtttcaacccaccggctatttgattgatttcgcgagtaattgaccaataaagacgttcgatctgagcacgcgttttcaggtccacaattccatgactgaacaagtcaagtgcttcttcacgtatctgctgggcatcatgccacgcctcgagcatcttattctggttcagcgtatcccagataccataaagttcttgtaccagttcgtgtgcatccggagcaatctcttcttcatcatcccattgaggtaaagtagccgtttcgagcacctcgaaaatcaacacagaatgatgtgctgtcaaggcccggccactctccgtgatgatattaggatggggaataccgtttttatcactggcatctaccaacgtagaaatagagtcgttgacatactcctgaatagagtagttcacgctactctcgctgcttgacgaacgggttccgtcataatcgactccaagccctccgccaatatcaacaaattcaacattgaatcccattgcatgaagctgcacataaaattgagaggcttcccgcaatgctgttttgatgcgacgtatctttgtcacttggcttccgatatggaaatggatcagtttcaggcagtccttcattcccttactctcgaggaaatcgagtgcttcgagcagttcgctggaagtcaaaccaaacttgctggcatcccctccggactcctcccacttgccgcttcccgaagaagccagtttgatacgaataccgatattaggctgcacattcaactgttttgccatgcgggcaatcagtttcagttcattcattttctcaacgaccaagaaaatgcgcttacccattttttgtgccagcaaagcaagctcgatatagctttcgtctttatatccattacagataataagagagtcagaatcggtattgacggcaattacagcatgcaattccggtttggaaccggcttcaagtcccagattaaatttcttgccgtggctgattatttcttcaacaaccgggcgcatctggttcactttaatcggatagatgataaaattctgggctttatatccatattcttcagatgcctgtttaaaacaataggcagtcttttcaatacggttatccaaaatatccggaaaacgtacgagcatcggagccgctacatcacgcaactgcaactcgtcgaccaattctttcaaatcgacggctacgccatctttccgcggtgtaacaacaacatgacccttgtcattaataccaaagtatgaagtcccccaacctgtgatgttgtaaagttcttcagaatcttcaatacgccactttctcatttttctgttattcagttgtttttaataaataattggacggcaaaaatacgtattaatctacaggttgccaattaaattgacattaaataatcgttcctgatatccgttatttccgttacgtgtgtcatacaagcttgccaattgggtagcttgtttataaaaataatcacgcaatgcagctactgagtatattccgtctgcccggtaaagcggaaattcttccggcagggacaaactgacttcttcacgggattcataactcaaagcctctaccatatcacacgaaaaacgatattttttctgcatattagtattcaggctccagggaatacaacgctctgcatactcccagccccgatccggatgggtcataaaataataggcaataaacaacccgagatatagcaacaaatattcatctttttctctcccaaccaaggcttcttcagcccgtgcacacatatcggcagcaatttccggcttcccggctttacaggcataataagccaacttcatataggctctcaggttagcttcataacaagagacctgtctggtaattaaaggttgggcacgattataagcttcctcaaactgcccggtttcaagataataatccaacataaaattcagttcgcatgcctcacaagtcagatcatccattttttccgccaacattttatcaatgcattctttagctttcgcgtattccctcattttggtatactccacagacagacgatgatagtacgtacgcaacgagtaaccatttcgcaagatacgggttttataatcttctcccactgcctctacctgttccatcggtatgctgggaagatcgaatgtacaagaccatatccatttatatttccataaaatatcatcttcatttatctggtccttatgattttcataactgtccaggattttagaaaacacagcaatttcttcagcatcagccgaaaggagatttagctcgtaaataagatccaatctcatctccacagcccattgtacatcttcattctcgtctgcaatgcgaatagcttctctcagcaaattggccttttcgcggggatgcaggttgtcgttttgtgcctgcaacagtaatttttgtatttcaagtgtatatttcatgctttcgtttaattgagaaagtttataaaatcattcattttggcagtcatcaattcagaaagagagtgattgaaaagttccatctcctcactgttcacgggatattttccttgcaaaagcgattgtacatacagaatgtgcacaacatgctgaaacagcttgttgtctccctggattctcagcaatgtctgcaccatctcattgtcggcattgaaagtcaatgtgggtggcaaacgttttttggcatttaccgagcccaataccgccgccaacggattattggcgactttactgttctcttctttttcttcggctacgaatataaccggagtatccaccggagtgaaatgcttcaaccggcaaatacacccaaaacgtttcaaaagttcactggctttcgtttcaaaggaccggtgctctttattaccctctacttcggcaaactcttccaacagacgggcaggtgaaatctcctctaaagacaattcttgattaagccggatatattttttcaacaacgtttcatcgaatgtataagcagcattaactaccagcctgccttgtgcaccggctattctgcgcacttgcctgaaatcttccagattgcgtgtataataaatagtattatttgacgaacggatactaccgaaacttcttattcccttattcgtctcaaacggaagataatccataaacagacgaagtaactcattatcttccgaagcaatggctttaatgtgaaagtgatgaacatccagtattttattaaaaacggaccgattgttctgcaccaaagcccggagatattccttgatagcgaccccaatctctttccgggcatctttcaatgaatcgttgctgacaaatgattcgcgggaggctgtggaaagcagtccgtcggcattcaccaggcaacgaataaaaaatgcccaagaaggcaacagattgcaatcgtcctcactaagcaacatccgcttcagatatactttatgcgaattacgcacagagaattgcgtacggaaaggcaatacatagagtacaccttctatccgtccatgctctgtccgtataggaaatgcatccagggcagacgattggaagacctttgtcccataatccaataactctttccgggtagctttcggatcaagccagacgggcgatggggtattaaccaactcttcttcttctccacgatgtaaatagacaggatatggcaagacttctccataatttaccaatatctttttaaacacttcgtattcgaacagatgagcccattcatttttaggcctcaacacaacccttgaaccgatctcccactcttcatcggggaaagtagtctgataagtaccgtccacctttccgcaccagcaaacaggatttccccccattgccgaccggctctctaccctgatttcattggtcaccacaaaacaagacaacaagccgataccaaaccgaccgataaaatcgtcggcatcgggagtgtctctctttgaactttcacctatcactgtgaggaaacggtatacctcctcttccttcagtccgattccattgtcctgaaagaccatcgagccatccccattcaggaagacatcaatacgtccggagtaattttcatcgatgttgtgcaatgcagtgatggcatccacactattttgcaataactcccggacaaaagtattcggattactataaatatgctctgacaacagggcaatcatacctttaagattgacctgaaacagattattaccttctttttccattctgtttttatcgttgtcttcttccagtaattttcaaggctttcgcgtttccgttttcggctgctttctcaaaccactccatagcgatctcatcattctcctctactccattacccatcaaataggcattgcccaattcgaactgcgccttgtcactattatgctcagcagctttcatcaaccattgaagccctgcttccgcatcgggcacacagccttcgccatacatcagcatcttacctaaataataatacgaagccacattgtcatttccggcggcatcattaaaccatcggtaagcttctgtataattctgttttacacctactccgttgtaataacacaatccggtgcgatacatactcataacattgccactgcccgcagccaaagtataatatttgaatgcctctgtttcattgtcttccacaccgatacccatctcgtagcagattcccagcccttcattataacattctgcttcagccgctttcttgaagtagctgaaagctttctccgactcattcagtttgtcataatcgtaaaggtaatattcacccatacgcaacatagccaaaggtatatcatttgcaacagccttctcgtaccattccacagcttgtttgttatcttcgggacaggcaccgtaaccaaagaaaaagtagtctcccattttaaattgggcataaccataattttgttcggcagcctttgtcatatattcaacagcttgatgaggattctcttctatcccactaccgtattcataagccaaccccatttctgtaagacaacggggttcgttattctctgcacccttagtaaaccattcaagagccttatccggattctcttccgtaccaattccattcttatagcaacgcccaagagcgaagatcgcatctccatctccccgttcggctgcctttgcataccatgcaaacgcttcttcgggccgtggctcaccgatgactcccctatccaaataaagtcctacacgatacatcgcataaggatactcctgtccggcagctttttggagcaagtcgaaagctttctcataactttgttctaccacctcaccattttcgtataagaatgccaattctaccattgcaaaacatgaacccagctctgccgctttttcataataggcctttgacttcccggcatccgtaactccggaataaccattagccaaataaagagccgcccgtgcatacccgtcagcactgtccatagacacagctttttcataatactccatagccttctgataatccggttcttcagaaagcaatccacgctcatacatccagccgatacgataggctgcactaccggaccccagctcgatagctctctccaacaactgacaggcatacgagatattctcttccaccaattcaccgttgaaataaacattggcaagcgtctcgatagcttctacataattgtcgtcgacacagcgctgcaggcacatcaacccacgttccacattcttatactcatcattataaagatagatcaatgctaattcataggcacaatatgattcacaataaagcatccctttctccagccattcaatggctttaggcatatcgagccactcttcttcctgatagttatatccaaggaaattagctgcagaccatacacctgcatgccaggctttctcccacaactcaaacgccagctctttttgcttccctagttccggatagcggaaatagagagttgccagattttttaaagaatatagattaggaacaagttccagcgacttctcatagcatgccgcttcttcagccacacttccttcttctatatcaagtgcgtcgcccatcgcggcatatacatgggcacgcaggcgatggccttcgggaagttcgtcaagcaactcttttcgcataagcagggctttctctttactgccggtgtgctgctcggcataagcccggtaatattttccccatagcaaagcttcgggtgaggataaagctgcaaatcgacgctctccttctgccctatcctgttcgcagtagaaacccatataacgccaataagcaacggttgcctctgcttccgggcttcccatttccgccgctttttcatagcaagggaataacaggctgagatcacgtttcccataacgggcttccgaatattgtgcacctttctgtgaccacccggcaccgttgaatacagccacacgatcacatacactgatcactttctcccaccagtaggcatactcttcctcattaagatccacttctacgttacaatcgtatgcactgaatattaattcaaaaaatccggctgtcagtgcttcgtcctcatgggtgtccaaggcatattcgcacacggcaagtgcttcccaccaattttcggcgttcaacaaagtgacaggtgtaaattgagggaaccatgcggcagccggttttccggatgattggatacgatgggccagggcttcgaatttctcttttaaagtttccataattgtctgatcgttttatttatgttgtaacacactgacaggcataaaacctcacagcgactgcaagatagtaatattggccgacagaacaaaggatagagaagaaaaaagggatagccgaagcagaaaataaggtttcttaaaatttagcttgctatatgtaagttcaaaagtttacgcagttgttgcacggatgtttcaatctgactacggtcttccagtttgtctgcacaatagatataattagcctgacgataaaaaggcgcgcgtttttcgagtgcctgtacgataaaatcgagtagttcgtcatctttcttcccctgcaatatagggcgctgttgtttggcaacccgcaaccggctaaacaataccttggggtctacatccagaaagacggtagtccccacccgattcatatactccatgttatcgaaaaagcaaggcgcccctcctcctgtagagatcaccacatcctcaaactcacctacttcatgtagcatgttcttttcaagttccctaaaactggcttctccccgctcagaaaacaactctccgaccgttttgtgaaaacgctcttcaatataccagtccaaatcgataaatgggatgtgcagttctcgtgcgagagcctttcctaacgtggtttttccggctcccatatagccggtcagaaatatacggatcataagcaaacggcattttcgcacaaagatagatatttattgagagaacaccgaatgacccacatggtaacttttcgggttcttcttcaaatttggtggtaaattctttatttctttattttcaaattgattattgtcctttttgctttaataagaaaaaacagacaccggctgaataagataactcaagcttcggaagtgaatttacgtcgtctgaaccggtatcttcatctttatacctttcttcaattaacattgttaacgtcttttgcaggttgtcaggttcttgtgcgcaaataacaagccttttgcatttaaaggacttcttattcacatccaaagaacaagttttaactctgtgttaaaacaaagcttttgaggagagaaatcttactttttaaagacattgattttcagatggtttagtctaagattagcttcctcacctcacggatggactcttcgggtgaaagccgggatacttccttttttgtcaactataaaagagggcttacacgtccgaaaactgaattagattccatgagtaaaagaaaacttaccaccaaattcgaagaagaaccccaaaaaatcatttcgatcttccgtcttaccccctctgtttttcaggcaatacggaggcccataagcccgcatgcctgtatccatgagcccgaatatgcgggcttatgagcacaggcatgcgaacccggataagggtgtcgttctttttcataaaagacttaatcataacacattgcacacaaagcgatgtaatgctactcaacaagtcttgaccaaagataaaacgatatcccctccttcggtgaaacaaataaaccttatttaaataccttgacccgggtatccaaatctttaaaatctttatcgccaggtccctgtaccggaagtccaaacggcatttcggcaatcagatgccactcttcaggcaaatgccaggtatggcgtacttcttcatcgatcagcggattgtaatgttgcaaagaagctccgaagccgacatcttccaacatcgtccatacagccagctgatgcatcgcagaagtctgcagcgaccacccggggaagttatccttataactgctgaatgcttcctgcaatcccttaacgaccgactgatcttcgaagaataaaacagttccgtatccgcttgcaaaagagttgtcgattttggcttccgtcgttttaaaaacttccggtgggacgatctttcgcaatgtttcttttacgatatgccataatttcttatgattctcacccagcaatagcactacacgagtcgattgagagttgaaagcagaaggcacatgagtgacagctaaattgacaatccgctctatttcctcatcagaaaccggagactggtttgttatcgaataataggtccttctgtgtttgagggcctcttcgaaggattttttcataaaaatactcctttctttattagattgattcttttaaattaaaacaactgacaaacgaaagttgttcggtaatggaatatattcgtacctttaccacccgataagttgaaacatcaaatatgggcaaacaaaaattttacgttgtatgggatggagtcactcctggtatttatacctcctggaccgaatgtcagcttcaggtgaagggatatgacagtgccaaatataaatcttttgataaccgggaagaagcagaacgagctttcgctgcatcaccttatgcttatattggtaaaaatgcaaagaaaaaaataaccggaccttccactgagatgctaccggcagcagtcatagaaaacagcctcgctgtggacgctgcatgcagtggcaatccgggcccgatggagtatcgtggtgtccacgtggcaagccggcaagaaatttttcatttcggcccgatgaaaggtaccaacaatatcggcgagtttctggcactcgtacacggtcttgctttgctgaaacagaaagggttcgacatgccaatctatagcgacagtgcaaacgcaatcagttgggtgaaacaaaaaaaatgcaagacgaaactctcccgtacggcagaaactgaagccctgtttgtattgatagaacgcgcagaaaaatggcttaaagaaaataagtataccactcccatattgaaatgggaaaccagagaatggggagaaatcccggcagacttcggaagaaaatagactctaaaaattcttcaataaaaatgatggattaatccggaaatagactccgacagaaaaactggtagtgctaccgggagaagttaattctccattggcactccgcattgtccccgggaaaaactgatatgcatcggccttcaatcccagtgcataatgcttcccgaacatgcgggaatactctatcgaacagagcagagtttgcggtttatcataagttataccctctttcttggtagatactgttccgaaatagggaattccaaacatcgtaatgaaatcgttgcagatccaatgccccatctttacgcggaagttgcccaaatcaacaaaagcactactatagactccaatgcccttatgataaggccataactcacctttctgttgataataaccggcagcatcaagttctacattaacacgcttcaaaatccggcgatcgatgttccacgtcactcctgcccctacggcaccgttcatcaacgtttgtactgaactctcacgaatcgtgtcgatctcgcctccgcgatgttgcgccaatatttgcaaaggaatatagcaatggaaagtcgaagaaggggcattcaacttgaaccgtgtagataatccgacagtaaaagcttcctgatgagtatcatcccgaaagataaaactctgccaatcaatccaagcatccagatcgatccagggagcacctgccaatacctgaaaacccgtctccggatcggcagtcaaattcaactccggattatacaaaggtgcaatcagtccatgattggagcctccatatatattccctaaaatcaagtctactgatttcatcgatatttgtgcccgaaaaaaaggcaaaagatgagcacctttctgatattgttcacctttccacagtgctatgtcttgataagaaacactcggatatcgataagccccactaaaccacaacatatggactcctccttccaacttgatattcttcaaaggataatatacaaatttgggttgtatccagagtcccggcaatgaatagccttttatcactgtaccggcaaattcattgtctttgaaaaagctgatattgtccaactccagaagaagttctccttttcgttcggggcttattttataatcggtacggcaaactcgctctaccagttgcgcctttgcggggataactcctcctataaaaactaatactaaaaggcatctacataaatattgccatttttttgtcatgtctatagtgactgcatatcattcagtcgtttataatatccgtttttagccaataattcttcgtgttttccgcgttctacaatttccccttcgtacagcacacaaatttcatctgcatttttgatggtagagaggcggtgggcaatagcaatcgtcgtacgtgttttcatcaaacgctccagcgcttcctgtaccaaacgctctgactcagtatccaaagcggaagtagcctcgtcaagaatcaaaatgggaggattcttcaagatggcacgggctatgctgatgcgctggcgttggcccccggagagcttgctgccccggtcaccgatattagtatggtaaccgtcttctttctccatgataaaatcgtgtgcattggctattttggcggcctcaatcacctgctccatagtcgcgttctcaacgccgaaagcgatattattgaagaatgtatcattgaacaaaatagcttcctgattgacatttcctatcaggctgcgcaaatcagagatacgaacatccttgatattgactccgtctatagtaatcgtcccttcctgcacatcgtgatagcgtggcaataaatctaccaacgtagactttcctgaaccggactgcccaaccaaagcaacggttttacccttgggtacagtcaggttaatatgttgaagtacttctttcttcccatcataactgaaagaaatatctttgaactcgacttgttcttccaacccattcaacggtttcgggttcggaatctccacaatcttattttctgctttcagtatcttatcgacacgctccatagaagccagtcccttagggatattatatccggctttcgaaaattccttcaagggattgataacgctataaagaattaccatataaaagataaatgtaggagcatcaatggaagagtgatttcctaatatcagtgatccgccaaaccacaatacaaccacaataagcaatgtgcccaagaattcactcatcggatgtgctaatgcctgacgcatggcaaccctattggtagcgtcacgaaactcattactgcattccgtaaaacgatttatcattttttgctcggcgataaaagccttaataatacggagtccccccaaagtttcttcaagttgagacatcgtatcactccatttagcctgcgcctcaagtgattgcctctttaattttttacctactttacccatgatccatcccatacccggaaccactaacaatgtaaacaaagtcagttgccaactggtgataatcaacgttccaaaatacatgacaatcagaatcggattcttgatcaacatatccaatgaacttgtaatcgagttttcaacctcacccacatcaccactcatacgggcaatgatgtctcccttgcgctcttctgaaaagaaacccaatggtaaactcatcactttagaataaaccatgatgcggatatcacgaacgactcccgtacgcaaaggaatcatcactgcggaagaagcaaaatagcacgatgttttcaataaagtcatgaatgccaggaacaaacccaaaaacagcaatgtaagagaaggaccgtttatttcaatcatccgagtcacataataatagaaattattcacagcgatgtccttcaagccctctcccgcagcatcccaaggaataaactcatagactttattgtccatcttaaaaagaatctgaagaatcggaatcaataaagtaaacgaaaatatattaaaaacagccgacagcaagtttaagaatacagcccatcccagaaatttcttgtaaggcgacacaaaccgccgcatgagttgaaagaattccttcattatatcttatttatgtttagggcacaaagataacagaaaatctttagtgaatttataaatcatcgcataaacctacactatatttcttacttcaagcccaataactaacatttgttatcgaaataataaccaatatattaaaacagatcattccattttcaatcactctccaccacaaaagctatcccccctattaattccgatcaaagtcacatatagcaaaaattataactcaccgacaagaacaaacagtgctgttacacttacatttagaccccaatttagttttagaacctctaaatattataaaagtatcccacttttctccattttttagtaacattctaatataaacgttctatctttgcacaaactatataaaatatagaatatagcaattacctaaacctgcttaaaagaatggaagtaaataaacctctgccgcttattagcatcattgtgcctatatacaatatagcagaatatgcttctgaatgcatacaatccttaatcaatcagacctacaaaaatattgaaatcatcttggtagatgacggctcaaccgatcattcgcctgctatctgcgatgaatttgccgaacaagacgaacggattaaagttatccataaaagaaatggaggactcagcgatgcacgtaatgcagggttagacgtggctacgggagaatacatcggttttgttgatggtgacgactgggttgatgaggatatgtacgagactctatatcacttgatatacgaacatcaagctgatatttcaatttgtacacactatacagaactgcccaacagaacaaaagtaaaatataaatcaaaaaagacaaagatttttagttctcaaaaagcaatagcgactttaattgaagacaaaataatccaaaattatatctgggagaaactattcaaacgtgaattgtttacagaactccgttttccggtaggatggagttttgaagacatagctttatgttataaaatatttcataaagcccggaaaatcgttttattacagactcctaaataccattatcggacccgaccgggcagcattacaaacagcacacgtaatccgctcaaagagtttcaatatttgcaagcgttacatgggcaatttcagtttgctgccgaaaataacataaaagtaaggaagcccaaaaagttggttcaaaaaacgtttcattttattaatcacattattattttgccgccttcttcgttaaagaataagtatatcaatgatgctttcgaaatagcacatacttatgattatttaaggaattgggaaataggagttgcagccaccctaagacgctttttcgtatataattattttaatgcgtatgcctcagtaattatcacctacagaaaatatattccggcaagaacggtaaaatcgacaacagaattcttctttgtaagacgagtggcaacctctttggctacggctatgagatcaattctttatatctaaacaataagagcaatataaaagtcctttatttcaaaataagtattacatttgtatcatcctcaccttggaagaagctgtaacataaagctttttccggttttaaataataactgaactaagatgaaaacaactcttattatctctacttacaatcgaccggaggctttgtccgtatgcctggacagtgttcgtttccaaaccgttatgcccgacgaggtcattgttggcgatgatggctccacttcagaaaccaaagatttaatagagtctttcaaaaaggattttccggtgcctcttatacacttatggcaagaagacaaaggttttcgcttggctatgatgcgcaacaagtctgttgcggcagcaacaggagattatatcattgaaatagatggagatatcttcctccacaacaaatttgtagaagaccacaaacgattagcgaaaccaggacattatttgaggggaaccagagtgaatctggggcagaaactaacagaagaaatctgtaaatcaagagtaaaccgaagaatttatccttggacaatcggtatacaaaacagggctgagacagcaattcactctacaccggtttctaatttctttgctgacagatacaaaaagaacgtatcttccggactgggatgcaacatgtctttctggagatccgattttctggcaattaacggatatgatgaattttttgaaggctggggaaaagaagatgatgacctgactcaccgtttacaacggaaaggctgcaaaaaacgttctttaaggttcgccggcatcgtatatcatttgtggcatggacacgaaagcatggaaagtgaccagaagaatgcagaatatttccggaaaaacaatgaaaagaatatagtgtactgcgaaaacggagtaagtaaatacttaaaacaagaataaaaatgggtgacagtctggtatataaattgcgtagtgggaaaccgcctaaattcatctacttcgcttatgatatgttgaagatggctattccctcctatttttatagaatgcagctgaagagaacaatcgcccaactatcaaaacgtccggacagggcctatattgaagagcgtgttagttattataacaggttatccggaaataatcatcccatcccgcagggaacgcatgtagaaaataaaatcaggtatctgatatacagaggaaagttaggcaactacaaaatgtcatactttcacaaggcctacttttttgatgccagagaatatacacgttggttcagtcctgatttaagatggcaatattgtccgggagatgtttatttcacaccggattcacccaccattgtaaaaagcagattgttggccggtgataaccaaaactccgttatcctaaaattagatgcacttcgccattttatgtttgtaaatgataaaagatctttcacaaccaaaaaggactgtgccatttttcgtggtaagatccgtgacagtcgtatccggactcaatttataaaaatgtatataaatcatcctctatgcgactgcggagtagtaggtcacgaagcaggcatacctcaggaatggatggttgccaagaagacgatccgggaacatctggaatacaaatttattctgtcacttgaagggaacgatgttgcatctaacctgaaatgggtcatgtcttccaactctattgcggtgatgacccgccctacttgcgaaacctggtttatggaaggaaaactaattcccgactaccattacatcgaaatcaagaatgatttctctgattttgaagagaaactcacttattacataaaccatccggaaaaggctcaacaaataatcgatcatgcccacgaatatataaaacagttccagaacaagaaacgggaaagactcatttcacttcttgttttagacaaatatttcaaagcgactggacaaagcggagaaatgtaataactacaaaccataaactcaatcaccatgatacacattgcatgtaacatcgactctaactttacgattcactgtgctgtaaccctgacttcattgttcgccaacaatcgtaattctgaattttgtgttcatatcatagccagtactttgccggaggccgatcaaaaagcactttccagcattgcagagtcatacggaaacaaaatctgtttttatttcccggaaaaagatcttttaaacaatttttccatcaagaaaagtggaaacagaatttcgattgcaacatactatcgttgtctcttatcccggatactgcctgtaaatattgacaaaatcctatatatggactgtgacattgtggtcctgaatgatataagtgaattctggaatacagatattacgcaatatgcaataggatgtatagaagatatcggtagtgacgaagaggaatactattcccgtttgcaatacgacaagaagtactcttattttaatgccggagtattattgatcaacctgaagtattggagggaacacaaaatagacgaaatgtgcgaacagtattttctggcacattccgatcgtatccggttcaatgatcaagatcttctcaatgcactgttgtataaggacaaattattcgtacctttccgctggaatgtgcaagacacgttctaccgccgaacttacagccacaaggtgaaagagcatagcggcttaaaagaagctttactgcacccggcaattcttcattataccaataaaaagccatggaattatgacagtatgcaccctttgaaacaagaatattttaaatacctcgacatgacaccatggaaaggaacacgtcctattattgactttcagacacgtgtcatcaccggattcaaaagactcctctacataacaggaataaaaaaatcaaaatatattaatctgaaagactatgagcttgctcaataagtttcaaacaagtttgtacgtcaaagccacgggctttggcgtactcttcggctaatatggcaaacatctcatgagtaccgggaagacgctcaaaatttttacatcccgcttctatacccacatttccaaaacgcatacggtttaaatcgatgatctccacttctactttttcatcaattgttcgaaaaagaatgttaccggcagagtaatccttgtgcaacagtccattctcatgcaacatggctgtagtccgggctatggcacgtaagatctgctcctgattcggaaacaccgttttttcaaagtcacgatatgtataaggacaatctgacttcaaacacacaaaataacttctaccgaacaaaagccatgaacctgtagaataatatcccacaggcgccggtgatccgatacccaatttacggagcatcaaagcataggaatacgaacgtttggcctttgaggcacgaaaaaaattatagataatacgattcaacagatgaggtaattggtaggactttacaatcagcttcttaccctctacatcaaactctttaagctcgttacgtcctttgtaaatcactttcccccctgtttcgaatacagtagggagctcatgtacaaacgaagataattcctgaaaatcagggtttacgccaattttcgtcagcctctttgtcataccatcaaattttatctaatcctttagtaaatttcaaccagtaatatttaagcggattagtatatttcaactgtttccacggacggctactatgcggacggtgccaaacagtcaaggtagtaaacagatagttaacaaaacccttttcaagagcctgatgagaaatggtcacatcaaaccagtttttctccgggttcagagaatggaaatcaaaagcacgtaaaaagtcagtcgtcagcaaagagcagcagaagctaagatgcttcttctccgggaagacttgattctctttgccttttgcatataaatagggataattgatcgcctcatgttcatctactgtcaccgcagcagctataccgcaatctttgcgagcctgcgcaccatcaaaaagagactgtaaagtatgtttcttcacaatcacgtcagattccacgatcaacaatcccgcttcggcggcaatggccttctcttgtgccatctggagcaccagcaaataattgggagaaggatgagaagtgatctcggacagattgaccaattcaaatcccatcttaagggatgcctccttcaattgtttcgtattttcatcggtgctgaagtcattgtaaatagtgtaatgaaaaggaacggtgaaatctgattttaaaatagcttcaaccgtttgcaacgtcaactcgatagaatcttttaccggagtaataatgtggatacacttcattatgaatataaattgtctaagttcaaacttatcgtaatgcgcattaccgggcaaatctatgcaatattttccatatagccaatctttcctgctttttatttcctacctttgcatgcaaacccctaaccaatcatgaaagtaattgtagataacaaaataccttacatcagagaagctatcgaacaaatagcggacgaagtaatatacgcccccggaaaagattttacgcctgaactagtgcaagatgccgatgcgttaatcatccgtacacgcacccgttgtgatcgttcactgcttgccggaagcaaagtaaagttcatcgcaactgccacgatcggattcgaccacatcgatacggcttattgccgtgaagccggcatcacatggactaatgctccgggatgtaattcggcttccgtagcacagtatatccaatccgcactatttatcttacagcagacccgtggtatgaaattgaatcaaatgaccatcggtattgtaggtgtgggaaatgtaggaagcaaagtagctgatgtagcccgaaaattaggaatacaagtgatgctgaatgaccttccgagagaagagagagaaggaagtacaatgttcgcttctttaaaaagtatagccgaaaaatgcgatattatcactttccatgtacctttatataaggaggggaaatataaaacgtatcatttggcggacaagcatttcttccattcgctgaaaaaaggagcggtaatcatgaacacttcacgcggtgaagtcatcgaaacagaagcgctgcttgaagctctccggtccggcattctgtctgatgctgtcattgacgtatgggaacatgaaccggacatcgaccttgaactgctggagaaagtaattataggtactccccacatcgccggatattcagcggacgggaaagcaaatgcaacccgaatgtcactcgaagccttatgccggttcttccggatagaaaccgactatcggattactcctccggaaccgaagaataaactgatttctactgcaacttatgaagaggcatcccttatgatttacgatcctcgcagagacagtgatgccctgaaatctcacccggggctcttcgaacaacttcggggagactatcctttaagaagagaggaaggtgcgtatcggatcgtaataactaaataatcatggacataatctgtggagaatgtccccgatcattttataagctgtttacaacgcgctctatgatcttggggaaccattcatattccaatgcatgaacttttttagccacatccgcaggggtatttccgggaagtaccgggcattttgcctgaaaaacagtacttccctcatcgtaatgctcatctatataatgtatagtaatcccactttcggactcacctgccattaccaccgcctcatgtacccggtcaccatacatcccttttccgccaaatttaggtaaaagtgcagggtgaatatttataattttatcaggataagcatgcaaaagtgcatccggaatacgtaacagaaaaccggccagcacaataaagtctatctgatatttacgcagcaaatccaagatggactccgcagcttcccaatcagacttcggaaaagccctataaggcactcctaaacgacatgcacgctccaaaacatacgcatctttcctgttagaaagaaccaatctcactctaacagaagcatttttttcgaaataccggataatgttttcagcatttgtaccggagccggaagcaaaaatagcgatattttttcccataatcagaccttttagtgcacaaaacagtgaaaaatgtgcaaaagattgcatttatttaatcaaaaatttgcgcaggacgataaatatttattcctttgcaccgcaaatttaaagaaataaaactaattattaattaaaaacttaaagttatgtctgaaattgcatcaagagtgaaagcgattatcgtcgataaattgggcgtagaagaatcagaagttacagaaacagcaagcttcactaacgacctgggagctgattctcttgacactgtagaacttatcatggaattcgaaaaagaattcggtatctctatccctgatgaccaagctgaaaagattggcacagtacaggatgctgtagcttacatcgaagaacacgctaagtaattcgatttcatcagtatggaattaaagagagttgtagtaacaggtctgggcgccattactcctgttggcaataatgtcccggaattctgggagaacctcgtgaacggggttagtggagcaggacctattactcatttcgatgcatcgcaattcaagactcaatttgcatgtgaagttaaaggcttcgatgcaactcaatatatcgaccgcaaagaggctcgtaaaatggacctgtacacacagtatgccgttgccgttgccaaagaagcagttgcagactcgggtcttgatatcgaaaatgaggatttaaacagaatcggcgttatttttggtgccggtatcggtggtatacgtacatttgaggaggaaacgagtaattacgcccttcacaaagaaaacggtcctaagtacaatccgttcttcatccctaagatgatttcagatattgctgccggacagatttctattatgtatggcttccacggcccgaactacgcaacttgttctgcatgtgcaacttctactaacgccatcgccgatgcattcaacctgatccgtctgggtaaggcaaacgtgattgtatccggtggttcggaagccgctatcgcagctgccggtgtaggaggtttcaatgctatgcatgcattgtcaactcgtaacgacgaaccacaatctgcatctcgtccgttcagtgcaagccgtgacggctttgtgatgggtgaaggtggtggatgtttgattcttgaagaactggaacatgcaaaagcccgtggcgcaaaaatctatgcagaagttgccggcgtaggtatgtctgctgatgctcaccacctgacagcatctcatccggaaggactcggtgcaaaattggtgatgaagaatgccctggaagacgcagagatgagtcctgaagaagtggattacatcaatgttcatggaacatctactccggtcggagatatatcggaagccaaagcaatcaaagaagtatttggtgaacatgcttttgagttgaatatcagttcaaccaaatcaatgacaggtcacttgttgggcgctgccggtgcggtagaatcaattgcaagtattctggctattaagaacggcatcgttcctccgactatcaatcatgccgaaggtgacaatgacgagaacattgactataatcttaatttcacgttcaacaaagcacagaaacgcgaaattaatgttgccctttcgaatacattcggattcggcggtcacaatgcttgtgtaatcttcaagaaatacgctgaataaagtcgtgttacgtaataaaatagataagataagactcctgttccgcaaggatagagagtcttattcttgtttttaccgtatactcgggttctatccccgcaacatcaggctgtacgagcaggctctactgcataaatcaacggcagtacgttcggaaaaaggacgtccgttgaacaatgaacgcctggaattcctcggtgacgccatccttgacgccatcgtaggagatattgtctatcaacacttcgaaggtaaaagggaaggattcctgaccaatacacgttctaaaatcgttcaacgtgagactttgaacaaactggctgtcgaaataggcttggataaactcatcaaatattcgacacgctcttcctcccacaacagctacatgtatggcaatgcatttgaggccttcatcggtgcaatttatcttgaccgcggatatgaatgctgcaaacagttcatggaaagaagaatcatcgaaccttatatcgatttggataaactttcacgtaaggaggtcaacttcaagtcaaaattgattgaatggagtcaaaaaaacaagatggaagtttctttcgaattgattgagcagtccctcgacaaagaaaataatcctgtattccagacagaagtgcgaatcgaaggcatactcggtggatcaggaacaggatactcaaaaaaagaatcccaacagaatgcagcacagatgaccctcaaaaagattaaaggagatcctgagtttatggcaagtgtacaagaagccaaaacacagaataatgtacctgcagaagatacgactcccgaatcagaaacgtctctgaccgcagaaaatcaacagatcgacgaaattatatcaaccgaagagatcagtgtgtaatccaaatacagacactgtttatccaaagcagattcccatccggcgtccctgcaccacaagatcgtgttcctcggtcaccaacttcaactttccggctacctcctctaatgcaacagaagatatctcatcccctttcaaagcaatcatacgaccgaactgtccattagcgatcagttctgttgcatgtcctcccatacgggtagacaagttacggtcgaaaggtgtaggcgacccaccacgctgaatataacctaatacagtttcacgtgtctcaatacccgtttcatattcaatctcctgagcaatatattcggcagcacgtttacgtccatcggtctggatgccctcggcaaccactacaatcgaatagggttttcctttcttcaagcgatttaaaatcgtatctcctatatttttaatattgtaaggtatctccggtaccagaataacatcgcctccacctgccatgcccgaatataaagcaatccaaccggctttatgtcccatcacctcgatcaccatcacccttttgtgcgaactcgccgtggaatgaagccggtcaatagcatccgtagcaatactcactgccgagtcgaatccgaaagagatatcggtaccccagatatcgttatcgatcgttttgggcacagaaacaatattgattcccatcgcagcaaactttgcagcggttttctgtgtaccattccccccgatacacactacacaatcaagacccaattctgcaatattacgttgtattaacgcaggtttatctacatccgagataatgccttgtttacgaaacggtttctcccgcgaagttcccagcatggtaccgcctaaattcaacaatccggacaaagatttttcagtaaacgattctacttctttcgtcaacagtccctgaaaaccactgtgaatccctacaacttccatcccgtaatgattaatagctgttttgcataccccacgaattgtagcgtttataccggggcaatcgccgcctgatgtaagaattccgatcttcattgctgctctttttttattgaatattacgtatttaaaagaaaaaagctactctattacatacaaaagcatgacatatcctcacttttaactattatttccgtcgtaaagatagaaaaaaaagataattaaggctatttttgcacgactaaacattatatgttaaagagcaatgaatattacaaagattataagcaaagtttttgattcccgtttaaaagcaatagatctttacgatacacaagccggagaaatacaacaccgggtattgactcgtctggtgaaacaagcagaaaataccgaatggggaaagaagtacgattataaatctatccgcaattacgaagactttaaaaatcgcctccccatacaaacctacgaagaagttaaaccttatgtagagcgtctccgcgcgggcgaacaaaacttgttgtggccttcggagatacgctggtttgccaaatcttcgggtacaacaaacgataagagtaaattcctcccggtcagcaaggaagccttggaggatattcattaccggggcggaaaagatgcagctgcaatctactttcgcatgaaccccgaaagtcgtttcttttccggtaaaggattaattctgggaggtagccacagcccgaacctcaactccaaccacagcctggtgggcgacctttcggccatattgattcaaaatgtcagtccactgatcaacctgatacgcgtgccaagcaaacaaatcgcgttaatggacgaatgggaggctaagattgaagctatcgccaacagtaccataccggtggatgtgaccaacctttccggtgttccttcctggatgctggtactcatcaaacgtatccttgagaaaacaggcaaacaaaccttagaagaggtatggcccaatctggaagtatttttccacggcggtgtggcttttaccccctaccgcgaacaatacagacaagtcattcattcttctaaaatgcattatgtcgaaacttataatgcatcggaaggctatttcggcacacagaatgacctttccgacccgtctatgctattgatgatcgactatggtgttttctacgagtttattcctttggaggatgtagaaaaagaaaatccccgtacttattgcctggaagaagtagaattaaataagaactatgcaatggtgatttccacctcttgtggattatggcgctatatgattggggatacagtaaaattcacccgaaagaatccgtataaattcgtcattaccggacgtaccaagcacttcatcaacgcattcggcgaagagctaatcgtagataatgccgagaaaggacttgccaaagcctgcgccgaaacaggagctcaggtcagcgaatattctgctgctcccgtatttatggatgcaaatgccaaatgccgtcatcaatggcttattgaatttgccaaaatgcccgattccatcgagaaattcgcaatgatactggatgctaccctgaaagaggtcaattcggattatgaagcaaaacgatggaaagatattgctctccagccattagaggtaattgtagcacgcaagggcctctttcatgactggcttgcgaagaaaggaaaattaggcggtcagcataaagttccaagactaagcaatacaagagattatattgaagaaatgattgctttgaatgaacggtgatgaacgaccggtggttttgaacgatcaacgatgaatataatgtaaatagcgcagcccactcatcgttgatcgctcatcgttatgatccctcctcccaacaacaaaccgtctttgtaaaaagcggcagcttgtccttctgcaatagcagataaaggttcgtgcaatcgtatgtgtagcaacccttcaggagtgattgtaaccgaacaatggttttcttgtttccgataccgtattttcactatgacatcatcacagcccaacagacgagattcatccactatgttccaatctttcagccacatttctgatttctcaagtgatttcaagaatgccaataccacttcattcgtttccggatggatttcttttacgaaaacagcacgattcaactgaatgcccaatcctctacgttggccaatcgtataaaaaggatatccctcgtgccaagctataaaattgccgctttcatcgaggaatcgtcctctctctacttttctgtatatgttacggttcttatctccggactcatcacaaagacatttcttcagaaagctacgataatcgagcggacaaaaacaaacaccgatactatctttctttttcgagaccttttcaaatcccctcccggcggcataagcacgtgcttcagacttagtcattccacccatcgggagtaacatacgttgcagaatctcttgctttaacccccacaggaaaaaggactgatccttatccacatcttcagcaggtgcaatataataattcccatctatccactgttttctcacgtaatgtcccgtagccaaataaaaaatgcccatttcatcggcgatttttgccaacaagggccatttcaactgattattgcaaagagtacagggtaccggagtatgaccggacatatattcatcaatgaagtaatctataatctgttcttgaaaaactttgcgagcgtcatacgtaatatgaccgatacccaaacgagcagctaacgcacgggcatcctccaaatattcagtagaaccgttgaactcataaaaacgaaaagtaacccctgttacttcataaccggcttcaagcaataacatagcagccacagaactgtctgtaccgccactcattcccaacaagactcgtttgtttttttccatcataccgcaaaattacataaaatcccgtatctttgatcctccaaacccgatagaatgaaagaagcacttaccacgaaccaagttgtcattgtactcgtagagcaccctgttttgggactattgctcgtaccgtacaccgtcggccgggccttggacaatacgttggaagtgatcgaacaggcttttcatgcttctcccgatgccctgaaaaaaatgaatgaagtggaacaaaaagctatcgacatagcttcacactatactgagaaatatttgatgggagtctattcacgtgagaagacagttcccaaattcctccgtaaactaaccgaggacagcaataaactaaagcaacaaatccgccctttcatcgagaaaaagctcttggaaatgctagaactgatatgtaacggacagcttccgttctatcaaaagccaagtggcagcaaacaactttatgaacaccacgcgtaccgcgtccatcctcacaacctaaaaactcatttttcattcaaagtaaccgaagaacacttcagttatcagttgcagtgctacgatgatgatactccggtttcattaatggagcagaaacctgtcgtcgtccttacctcaaatcctgccactctgctgctgggtatggatttatatacttttagccacatcgaagcctcacgtttgttacccttcactaaaaaagaacgtatcagcgcagatgcttcactaaccgaaaaatatatagataatatcataattcctctcgcacgttatcacgacatcagtatacaaggattaaaagtcgtcagagagaaacgtccgtgtaatgcttatctctatcttgaagatacgatttataacgatacattgttacggcttgattttcgttacggcgaacagtccttttcaccgcagccctccgatgaaaccaggaaatttgtctttcgtgagcaagaagaggaggaaatcgtcatacactatttccagcgtaattcaaccgctgaaagaaaagctgtacatctgcttcagaaagccggcttgcaatgcatcagtgactcccatttcaagctatcatccgcggctcccgaaaagaacattaccgaatggatcagccaccatcgccaaatgttgctcgaagagtttgtcttgtccagtgatacacaaaacaaaccgtactatcttcccgaaatccggatagaacagagttgtgaagacggtcccgattggtttgacctacacatcactgttgtcatcggcaatcagagaattcctttcagccgcttccgaaaaaacatactggaaggcaatagagaatatatcctccccgacggacgcattgtccttctacccgaagaatggttcagcaagtatgccaaccttcttgaagcaggcaaagaatcagacaaaacgatccgtctaaaacgcccctttatcggtgtaatagaatctattttagaaaaagaccgacaaagcacaagcatcaaaacgctgctgagcaaagaaattcccgtacccatcgggcttaaggctaatcttcgctcttatcaacagaaaggcttttcatggttggcaaacctctatcttgaaggatttggcggatgcctggccgacgatatgggattgggcaagactttacagacactcgctctcctgcaatatgtctacaaaccgggaaatacaaccgaagcaattcgggaaacaatcgatttgaaaaaagcggaaagcacttcggattgcctccctcaaaaacaagtattcttcgatgaaaagggacaattttcactctttcccatgcaaagcaaagaggaagaaaactcccggatcaccccccaagttccacaaattccggaaccggttcaaaagcaaaaccggatatcccccttacacggtaccctgatagtcgtacctacctcccttttacataattggaaacgtgaggcatctcgtttcaccaatctgtcaatgatggaatacaatggaagttcacccaacgaaattacccgattgaaaaaatatttcgaccgttatcatttgattttcactacttatggtacgatgcgcaataacatagcaaccttaagccaatatacattcgaatgcattgtccttgacgagagtcaaaacattaaaaacagcgaatccctcacgtttcgttcggccatacagctacgcagcaaacacaggctgatcctgacaggaactcccatcgaaaattcactgaaagacctttgggcacaatttcattttcttcaacccgaacttttaggaaatgaaaccactttcagcaagcattttatcaatgccatccggcaaggagacgaacgaatgaaggatcgcttacgtcagctcatcacaccattcatcctacgcagaagtaagcaggaagtaaccccggaactgccatcattaaccgaagaagtagtttattgcgatatgacagaaagacaaaacgaactctatcaacatgaaaagaacagccttcggaacatcttactggaacagactgcagagaagggacaacaatctttcacggtactcaatggaatcctccgtctaagacaactctcctgtcatccgcaattggttttacccgatttcatcggtgattcgggtaaattatatcagattatagaaaccttcgaaacgctccgcagcgaaggacataaagttctgatcttctcttctttcgttaaacacctggaattagttgccggtgaatttcgtaaacgcaaatgggattacgctttcctgacaggctcttcaaccaatcgtccggaagaaatagcacgctttaaccgtgaccccaagatacaggcttttcttatctcactcaaagccggaggtgtaggcctcaacctgacacaggcagactatgtattcattatcgatccttggtggaacccggcagccgaatcacaggccatcgcccgcgcccaccgtatcggacaaaacaatcaggtgattgcttaccgttttatcactcaaggcagcatagaggagaaaattatacaactgcaagaagaaaagcgcaaactggccgaaacctttattacagataccgagcagcttccggcactaaccaaccgagagtgggcccgacttttaggatcatagccttcttcccgctgcttatcaggccggttctctcatacattcaagatcagaaaaccgcactgacaacctgcatggtgtatacactttccacttcgggatagtcatctgtaaacagatccaggagatcctcataaaagccataaggcaccatagccacacttcgtgtcttcgacggataatatctctgaacaatatatgtcctttccataccatccaactttatttcatatttccgatatgaactattcccaaccgcaagagaactacgggtgaaagtcccttctttatatttctcaccgtatttatccggatagacatatacaattcccccttgatcctttgtatatataaactgataaccgcctcctgcttttacaggaatggaagccaaggctttttctttcagttccttttgtgcagccaccgtcatcttatcgcctttcacataagcatccagcttaacgatcttcattttatcagaccgataatctattttcacttttaaaccgacggattctcctttcgcatcggtaatagtcacttccgcatcaccaacgcccagtgtttcgtagttgaaagcatccgaaagcttatccatattcactttgaggatatcagaattgctacttacggtatagggttttactcctccataaatggtgatagacgtctgatttgtattcggataataagcagtccagacaccattttcaatattattaaatgaatcgtctccaattcttaacggttcggattcctccttatcacagccggccagtcccagcagaaaggctgtagccagtaaagtaaagcatagatagcttcgtaatgtccgagttttcatgtttttgtgtttttatggttacttatcagacaaagatatgcattttttgtttagagagtttctatttctctcttttttagaaaattatcattcagaatctttttatcacccaatctaaatctgacagcatatctcctctcccgccctaaaaatcactgaacctaaaatcccggtccactcttttccctccgataccatttacatcgtttccccgcatcaactatctgactcttccaccattcaatatataccccatccttatcagaaaaacttcatgaagccctcctccattctttatcagatgtattgccggctgtatatatgtatcccgattaaacgaataacgatatgtcacttctccggcaacttcattacacgatttgaactgagcggcagacaggaacaagcccgcctcatgccgcttctgaccacccggaacataaatccacgtcacacctgctcccatataatttctgcattcactgagcgcagaagaagtacgggtgtattgtactaacaggtttacctcctgacgaactctactccataactttcgttctgcatacccccaccaggcaaacgtcatcttcggggagactttcttttccctttcccgggtcttccactctccagccacatcaggcatatcaccgttagtatgtagagagaaaccgccaaaacactttccatattctgtttgataattaatttccgttatactgaatactccgtccttgcgaggattgaatgtgaacggatgtttacctttactccatccgttgtaccctttaccgttgtacagactactttcaataccgaaccggcccagcgtcatcttataatcgagacataatgcagccagaggataattggctatcggatagttagcggacaaagtagggaatatcccgcacgaactgtttgtaaacagtgacatacaaggagttgtgaaataatcttcattcagattgcgaatcccggcaaacaaagtgatatttccgataagccgggtatatcccagcacagcaatggcacaaggtaaattatcctcttcaatattcgagaaggtttgcaggtcattaatgatccgttccggacgcgtcttatatacgtgtatcgaagcaaactccaagattcccttcgtaccgatgggcacgtatgcgtccaatcttaacaggttgcaccagttcgtcctcttcttcagatcatattggaactcggtaatataggtggcgccacacgtctgggcgcaaaggcggaggacgctcccgaaaagcatccaacagactattgcaatatagttcataatttcccattcttgtaattcagtcagtaaatagagttcgattcagcctacttcttccccatctttataaccatttcgaaaatcttcgaatataccagctcttcataaattgtgtaagaacacagtaggataccaagataagcaccagccaggggaagtaactcaacggtaacggttcaagtcctatcgacaggccaaacgatgtgaaaggaatagctatgcccattgccatgatcaggaaggtcaaccccagcaccggccaggtggcacgactctgaaaaaacggtatcttacgagtcctgatcatatgtacgatcaatgtctgtgacaataatccctcgacaaaccaaccggactgaaagagagtctggtgctcaggtgaattacaggcaaacacgtaccacatcaaacaataggtggcaatatcgaaaacggaacttatcggcccgatgtaaatcataaaccgactcagatcggatgcgtcccacttctggggttgcttcagaaactcggcatccatccggtcaaacggaatggtagtttgcgagatatcatacaaaaggttctgaatgagcagatgtatcggcaacatgggcagaaacggcagaaatgcactggcgaacatcacactgaacatattgccgaaattggaactggcggtcatctttatgtatttggtgatattgccaaaggtcttacgcccttccaagacaccctctttgagcacactcaaatctttgtccaaaagaatgatatcggcactctccttcgcaatgtccacggcagaatctacggaaataccaatgtccgactgcctcaatgctccggcatcattcaccccgtcacccaaaaatcctaccgtgttgccattttgctgaagaatcatgattatctcgctcttctgcaaaggcgtcagcctggaaaagagagtggcttgtcccactatttcacgtaattcttccccgtccttgccttcaagctcaacccctgttaccgaatggcacgtatcaatgcctatctgccgggcaatggcgttcacgattacatcattatcaccggaaagtatcttaacctcgataccatattcgcgcaattggcggatagcctcggcagaagagggcttggggggatcaagaaacgccaggtaaccaataagtaccatctcgtcctcgtcggtgacggcaaagtcccgtgccttgctgataaagcttttttgtgcgatggcaagtacccgcatcccgttacgattcatatcatcactgattctctttgccttacttctgagtttatcggtcaattcatatacctgaccgttgaactcggcatgagagcaaatattcagcatctcctccacagctcccttcgtgatgatttgcctttttccctgctgatcttcaataactaccgacatccgacgtcgactgaaatcaaacggtatctcatctatcttcgtgtaaccttccgtcagatgttccagattttcttcgcgtacgtgggcaaggatagctttgtccatcaggttcttgagacctgtctgaaagtaactgttaaggaatgcgtgccgcaatatccttcgggaatgatcatcgctgccgtccgcattgatatacttctccaatacgattttatcgcaggtcagcgtaccggtcttgtcggtacaaagaatgttcatggccccgaagttctggatggcattgagattcttcacgaccgtttttttcttcgacattgatacagcacctttcgagaggtttgctgtgactatcatcggaagcatctcaggagtcaatcccacagccaccgataaggcaaatatgaatgcctcgaaccaatcgccttttgtgaaaccgttgacaaagaagacgaatggaaccatcaccagcataaagcgtatcagtaagaaactgaccttactgattcccttgtcgaaagcggtagtcgcacgttcacccactaaacttcgggctatcgttccgagataggtatcgttacccgtcccgaaaacgattcctttggcagatccgctgataacagtggaacccatgtagcagatattgtcaagctcgatgacgcttccgtgactgtgtctcctaccgtttatttcaggaaatttctctactggatcggactcaccggtaagtgatgcctggctgacaaacagatccttcgattcaatgatgcggatgtctgccggaatcatgtcaccggcagcaaggcaaacaacatcacccggtaccaattccgtaatatcaacctcctcacttcccgaaaaccgctttacgaaacaggtatttttgaccatcttcatcaatgagtcagtagcttcacttgctttccactcctgccagaagcggagaatggcactgcaaactaccatcgagataataatcagaacagccgtccactcacggtcttcaggacgggccattactacatcgatgaccagagagatgacagccagcgccgtcaacacaccgataaacggattgatgaacgtacggatgaaaagtacgagtggattcttcttttgctctcgtgagatttcatttttaccataggcggattgtcgttgcccgatctcttcttcactcagtcccacactcgaagtctggaaataagaatatgcagtcttagcaggttgggtggcaaccaggaatacccgttcggaattaaattgatactgcgctttctttttttctttctttctccaaatcataatctttgcgctttaataagtagacactcggttcgtttttaacgccacaaaggtacaaaccaccttatgagaaggtagttagaaacaaattagagcagtattagaaaagtattagagtttgccggatcggaagagatcgattcgacaatcttaccggaattataaatgatgaaaccttatcacaaaggtagtgccctctccttggtgtgaatacaccgagatctcactcttatggagggtgagtatcttctttgtaagcgtcattccgataccatgtccctgagcctggtttttattctctccgcggtagaagagcttgaacaagttctccttatccgtttcggacatcccggcaccgttgtcggataaacttacgatggtccactgatcacagaatgagatctggataaacgacgtccggttatcagaatacttgcagttattctctatcaggttcacaaaagcagtggtaagcagatacggattcccgatcacagtcaacacacggtcatcatctgcctcctgctcgaaaatcagttctatgtgataatccggatgggctttgagcacaagctcattggcatccaacagcaattcatccagccggatttcctctttcttgatttgctcgggataataatccgctttggcaaggttcaacaagccatctatcagttcaatgacgcgctgggaatcttgtaacgcattgtgtattgaattttgatattgtgtgacagtacgttccttttgcagcgccaagtcaagttctgccgacagtgccgccataggtgtacgaagttcgtgcgatacattgctcacaaacatccgctgatcattgaaagtcttttccaccctgtccagcagtgcattgaaggcaagggcgagttctcccagttcatcatgctcgttcttgacaggcaaccgttcgtcgatttgagtgacggtgataccctcggctttacgtacgatgctacggataggggcaagtgaacttttggcaagcatataacccacaatgacgagcacactcagcccgccgatagataaaaggagaagcagccgcgtcattatgacctgattaatatgtccgtaacggtcgtaagcggcagctgtcaccacataatttttacccccgaactcatataaaatccctatcccctgatagtcgcctgtacggaagtcgatctcctttttccggacaatctcatcgatcattccgggagtctccttaatgatatcgttgtgcaacgcatcgtggtagagtatccggaagtcgggagtgtatacagctacttccacctcatcaatgaactgacgattattgagatatatcgactgcatggtttctacatcaacctgattgttaagaaacagatgggctttagtgatagcttcgcttcgcaggctacgataaaaagaatcactgcgcagatgttcgttcacacaatagatagtggccataaacacgagaaagatagtggccgtgatacctgcatatttaatggtaaggatacttcttattttcataacttatcggtgagaataaatcccatgcctgtctttgtgtgtatgagtttagtatcgaagtcacggtctattttcttacggagatagttgatatagacatcaatgaagttcgtacccgtgtcgaagtgcgtgttccacactttgtcggctatatccatccggctgacaactttctctgcattctcgatcatatataccagcaggttgtattctttgggagagagcttaatgtcccgtcccgccctctttacgctcttgtccaacaggtttacggataagtctgcataatttaactcttcctccacatcagtcactactacaagttttcgtttcagaagaacccggatacgggcatacagctccctgaagtcgaagggtttcaccatgtaatcatccgctccggcatcaaacccatccagtttgtcgtccgtactgcccaatgcggtgagcatcaggataggaatggcagggttagcagcccgaatctctttgcacaattcaaatccgtccatcttggggagcacaatgtccgaaatgacaaggtcgaacgtatttgcccggaacattctcagccccatagctccatcgtaagctaccagacagttgtaaccgttctcttccaaaccggcgcgaagcaaatcggccacccgctgttcgtcttcaatgattagtatgctgtacataaagagtcttttttattgtatgttattcgtcccgatcaacctgaacggcacaaagttaagacttttttcctatcctgaatgtcatgcggatagaaagagggtcaatcctataataaagtacttccaatcccgcatatatcagcaaaacgaagctaacaaaatgacctatctgatggcatatctcttattccgctgagaacaaaagaagaagttaattttcttactatcctgctttgactgacgactatatttatacaattccttgtgatatatcagttgctaataaataatcttatagaaaaagtattcccatcataaagaaatggtataagaaccgggctgcaattaaatatttttcatcttacattgttataataataatcgacttctgttttatcaaattccttcagatcaacactatatacattgcgcgaaggatctcccatataaaatccgcccaaaatatataatttcccatcaaagtaatacaaagctggagatttcaatttcagatctatcatatacgaacgaacttgcctgctttttatattaaacgtctgtacaacaccttgttcaaaaatataaattatatcattatgataagctaaactgggccagccaagccgatataacaaatgtccggcattggtccatgcgcctgtcaataagttataacattcaatactccagccgccaccgttacgatttccgattaaataaatacaatgatcaaccagaattgtttcaggagcttgcctaatcggcatttttcccaactcataccagtagccggattttaaattccataaatgcatttcatccgaatagactccttcattattttgcaaaacctttttaacaccgcctaaaacaatcatattgtctttatacacaacggatcccaataaagtcgcttgatgcggattagtataatctgtccagacggtatcacgcttaatatcatatatttctattgcattatccagataatcaacaattctggtttcagataatctctttccccctaaaataaaaatttttccatcataataacccgccgtatgatatgccctttctctaaacttatgcctgatcgtctcccacttatcttgcttgatatcatatctatacatcatgttactatatttttcccaaaataaagtagaatgtatattactctgaaaggggccgcacgatgtactccctcctacaatataaatctgcccatctaccaagaccgaagcaaacgaatagactcctcttttcaatggagacaatatttcataatgcaaaaagcgatttaaatgcctattgctaaaaatagatacttcttccaaaacccgattattctctatcaaaaaaacggtacatctatttttaattaaatcaccataagacaatttcttgtgcaaataattaatatgagaaaaatataaagtatcattcaatgacaacgaatcatatttctctaatgagaacacccccttttcatcactgatagctatgactctcctatctttcaaacagatatatacatttgaaagaggaatgctatccttttcactcacgacacacgctctgtcctgggctttcccagttacatagcaaaaaaagaatattaaaaacagacttctcatataacaaatattaaataaaaatcaaccttgaaccataacatttataggttccaatgcaatgatccaaggttgactacctatatttagcaacatatatccgaactaaggggacgtacatatataaataatataaatgcctgtcagcaaggattcacaagaggaatatagcaattatcttttagacactttaataatatagatacccgattatgtcattgccatacaatgatcaaagtcatctcctaaacaaaaagaatccgaattgcacccttgatgttcatcaatgccacaaccaacaaaataaggatcacaactttccgttggacaaattgtcataccttccggtgacaatttctctaatattttttccatcttattataatttgggtatgttgcaaacatagtgcaatatcctttaattctttataacaaacacctaatatctatatactcaaaactatattttttaattatataaattattagaaaccatttctttcatcaattaaatatctatttatatctttgtcacacctcaaacaaaaaaatcatgaaaaaagaactactgcttaccatcttatcttctatagccttgatccttcttcaagttttttggataaacagtatgtatcagaaatatgagaatcaatatacggaaaaaataaataaagcattttttaacgctatcgaaaaggaagtaggccttcgatccatgcatatagaacaatcaaagcactctacaatctttataaaatctgttgaatatatgtccgaagaagaacgagctggatataaaggagacaccattgatttagtgcatttagagcaaaatggagtagcgcgaaacgtctctgaactccttacacaaattaaacaagatggattactagcgattcaaaaacctccgattctatcaatcattgatagtctttttcaagatgaactctacgacctaaacattaatcactatattactctacgtaataaagaaaaacaaataatagattctgttggaaatgctcatctacaatctcattttcaaatcattataaaccaaaaaccaattggaaccaaaggactcctctacatacaaatagaatcaggacttcccaatgacatgatcttatctcaaatgctctattctctaatagcatccacattgattgttgctatagtattaggatgtcttatttttcagctaaccgtcattcgcaaaaagaacgaaatattaaaaaatcgcgaagcaagtgtaaatggaatagtccacgatctaaaatcaccattaaatgcacttataactctaacttgttggctcaaaaaaaatgaatcagactacaaaaagaaacaactaatgaacgaagttatcaaacgagccaaacacttaacaacacaaattgagtccatattaatctgtgccagaggtacaacacagcacatcattttacaaaggacaaaaataaacatagaagaagtaattaaaacagccatcggaaatatctgtgtagacttaagttcaaaaccacatagtattgaaatagtgaacgagtcaccaaacatagagtgtttagccgatcaactctacatagagaatgccataaagaacctaatagaaaatgctctaaagtactctaatgatggagtgaaaatacaaataaaaatagttgaaattagtcaaggcatacaaatagaagtgaaagacaatggctggggaatcgctcataaataccaaaagaagatatttagtcagtactatcaggttccccgagaaacatcgcaaatccagaaaggatatggtataggattatcatacgttaaatatataattcaggcacacggtggaaaaatacgactaagaagtcgagaaaatgaaggaagtacgtttactttttatatttcaaaataagacaaaaagatggggaaaaaactcaaaattttttttattgatgacgatatcgcacttggacatatatgtaccaggattatgcaggaagaaggttatgaagttctttatcaaacttcattaaacggagcaaaggcttgtatcgtagaaacacatccagacatgatcgtactcgatgtagaaatcggaaataaaaatggcattgaggctgtcccggaattgaaggcaatagcccctaatactcctatattatttatatcttcacacacaaatagccaattggtagtccaagcactaagtgcaggtgcagtagcttatctgaaaaaacctcttgaaattgatgaattaattgcatatatcaaaagatacgcgatttcacatccatatcaaataaagataggttctcttttattagacacagacacccaattgctatgcactaaagaattgagagtgattaaacaactgagcgaggcagaatacaaactacttaaacttttggttgcttataaagaacaacttgttgaacgtcggcaaatagaagaagaactatgggggaaagtaaatggaaatgaacaaggaataaataatttaatatcaaaactacgcaaatacctgtctattgaccctaccatagaactcgtaactatacccagaaatggttataagctctcagtaaatctaagttaattcaatattcatctcagaaaaaccactacctttgcaccctcaaaaaccaaacaaaagcgactgatgaaatacaaactcctcgtactcgacttggacggaacactgaccaacgctaaaaaagagataactccacgcaaccgagaagcactgatacgtgtacagcaacagggtgtgaaactgatacttgcatcgggacgtcctaccttcggcattgcacccttggccgacgaactgcgcatgaaggagttcggcggatttatcctctcctataacggcggagaaattatcgactggagtaccggagagatcgtttatgccaatgtattgccggacgaagtgatacctcggctatacgaatgcgccacacgcaaccaactccctatcctgacttacgaccggcaatatatcatcactgaatatcccgatgacgtgtatgtccggaaagaggctttcctcaataaaatgcagatatatccttccaaggattttctgaaagatatccgtctgccgcttcctaagtgcttgattgtgggtgagccacatcgtctgattcccattgaagccgaactttcggtagaactgcaaggtcaactgagtgtttaccgctcggagcccttcttcctcgaactggtaccacagggaatagacaaggcacaatctttatctgtcttacttaacaagctgaacatgaaccgggaagagatagtggctgtaggcgacggctacaacgatctttcaatgattcaatttgccggattgggtgtagccatgggcaatgcacaggaaccggtaaagaaagccgccgactacattacccttagcaacgaggaggacggtgtagctgcggtcgtaaacaagttctttacaaaagcacccgagaagggggagacaacagcttaaacacagaaattaataagaaagcaagttgatttctccatgatattaacgcgttatatataagtatattatcattcatcatactaaacttatctcagcccgtatacccgggccggtgggcccgggtatacgggctcatgggcacaggtatgcgggcttatgggcccgggcatgcgggacgagataaagtccggaccattttcactaaagatactaaggaaaaggaaatgctttaaacggcataaacagatagataatacgctatatacaattacagatcaataccttatccatcaaaaacagtgggtggaagatggaagataaaggtggaagataaacggcttgaaaacgctatcttccacccattcatttcgttgataattagataagtaaacagaaaaaggtggaagatggaagatcggaatgcatttttcgtatgagtggcccgatcttacatcagacacatatacttacaaagaataatccggcagaacacgtcccaattcaaattatttattctaactttgtggtttaaaacagaataaatctcaaacgttatggaacatcaactgacgatttacaacactttagatagaaaaaaagagctgtttgtgcctttgcacgctccgcatgtgggtatgtatgtctgcggaccgacggtatatggcgatgcccatttgggacatgcccgtccgtccatcacgttcgacgtacttttccgttacctcacccggctgggttataaagtgcgatacgtgcgtaacattaccgacgtaggccacctggaacatgacgcagatgaaggcgaagataagattgccaagaaagcccgtctggaacaattggaacccatggaagtagtgcaatactacctgaaccggtatcataaagccatggaggcactgaacgtacttccccccagcattgagccacatgcctcgggacatatcatcgaacagatagaattggtaaaaaagattctggatgccggctatgcatacgaaagccagggttcggtatatttcgatgtagccaaatacaataaagactaccattatggcaaactctcgggacgtaacctggacgatgtactgaatacaacccgcgagctggacggccaggaagaaaaacataatcctgccgactttgctctttggaaacgggcacaaccggaacatatcatgcgctggccttcaccatggggtgacggtttccccggctggcatgccgagtgtacggctatgggacgtaagtatctgggcgaacacttcgacattcacggaggaggcatggatctgatcttcccgcaccacgaatgcgaaatcgcacagtcggtagcttcacagggtgacgatatggttcactactggatgcacaacaacatgatcaccatcaacggcaccaagatgggcaagagtctcggaaacttcatcacgctggatgaattcttcagcggctcgcacaaattgctgactcaggcttacagcccgatgaccatacgcttctttatcttacaggcacactaccgcagtccggtggatttcagcaacgaagccttgcaagcagcagaaaagggactgagccgactgatggaagcagtagacagtctggaaaaaatcactcccgcagctacttcggacgtcgatgtaaaaagcttgcgcacgaagtgttttgaagcaatgaacgatgacctgaatactccgattgtgatttcacatctctttgacggagccaagatgatcaataatatcattgccggcaacaacaccatttctgccgatgacctgaaagacctgaaagaagtattccatacattctgcttcgatatcctgggtctgaaagaagaaatcggttcgtcggacggacgtgaagccgcttatggaaaagtggtcgatatgttgctggaacaacgtgtgaaggcaaaagccaacaaagactgggcaaccagtgacttgatccgtaacgaactgactgcattgggattcgaaattaaagatactaaggacggatttgagtggaaactgaataaataaaaagcttcagaaagttgtatttagaaaacatcacagaggatgcggagggaacaaagtaatagctttgtatgctccgcgtcctctgtggctaattcagaacagatataaaaatgacagcacaagaatttttcaaaaacgacctgtttgccaccaatgcgggtgtagagctgatcgagatacgagaaggatacagcaaagcaaaactggaaataaaacccgaacatctgaatgcgggacaacggacacagggaggcgccatctttactttagccgatctggcacttgcagcagcagctaactcacatggcacattggccttttcgctctcttccaatatcactttcttgcgcgccagcggccccggagacacactctatgccgaagcacgcgaacgctataccggacgcagcacaggttattatcagatagatgtaaccgatcaggaaggcagactgatagctaccttcgagtcgagcgtattccgcaaaaaagacgaagttccgttcactttgtgacaatagaagtctgaggatgtcggtaaccactgacactcttcaggaatgccttggccgaaccaaagttaaggtgcatatccagacgtaccggaaggtgattccggtcgtccgtcacataaaacgttatgacctctttctcctttccctttttattatattccacgagtgagaatatcaggcagcgataggtagtatcgttctcggcagtaatcttcttaattccccggtaaatcagggtctgttcttctactctacgccccgtcgccatcgggaactggatacgttgaccgatggtatattcctttggatcgaacgaacgggcctgcgccagaatagtaagcatatcatagatacaacgattgtcactttgctccgtctcggtgatactcccgtctttacgcacccgtttttgattgacataacacatgccctcccgaaacgagaaacgggcttcatcgacggtataacgttttccttcttcggctcccttccgaaaatagcggggttccagcttttcagtcatgacgcttgtcagcgtatcccgcatcttaaagaagaagtcggcctctttactgctaatggccaataaattgacccgataggccggctcggagtgataagtcgtcgagttagtagtaaggctggcaagtcccactttcttccaaatgaatttccagttgaaataaagttcgtacatgacgtgctcaccggacttaaacgcatcgttctttgcttcacactgggcattgcccgatgatgggaaagcaaaaagcagggcgataataagacatatccactctttccgcctaattgcggcggctacggtttgcgttttgactatctcgggtctttttcttcttgtcttcatctggtttctgttttttaagttcgtccggcttttgcttatccagaggcacagctgtcacattccagtcctgagtagcatcccagtttgctttaaattcaataatatgcggataatagtataccatctcaggctgtatacccttctcatagtcaccggcatcccacactccgttgccattggtatcgtttaccaaccgggctccgtatttgccgggattcagatagtaaaactccgctctcccgtcaatcaccggacgcctgcgaagaactttatcctgattatccaacagttcgacaaaagcgatagaatctgctccggttatgttgaggaacacattaccgtattcttcgatttgacgaaccttgaaggcttgctttatcttatcggtaaacagcccgtaaatgccatgaaaagctgtggaatcgacggcaaattcatactcgcctccgggttcccaatcataatagaggttatagcggcgcacatcgagcgaatcatgttcgagctcaaaaggaacgtcggtccatatcgtatctactttctggcgaagatgaatagccgcactgtcaaagcgggctaccggttcttcaaaagtcatggtgatataatcgaacacgtccatagacgaaggagcgtgtgtgtttaccgacaagaacttagtcggttccggctcatcgtctttcttctttttctttttaggctcttctttcttcactttctttgcggccaaccttagcgtatccgtacgaggaactaattgatttaacgtatcagtgtacaaatagttcaggctcaacgtaagtgtatcttgctgataaagcaaagagtcgcgtatccaataatgaatagtgtcgttgcggaatgtcttttctatcacaaaagcatccttctcgtcgaaattcaagcctttcaacacaggcaaagaatctgccggagccgaaaaatacaaagaaaatttattcggagtaaggcgttcgctcttaaccaggtattgtgaaacagaaggctttttaaatgagcgaagcacaatattatcgggcaggaagtaggtatatttctgctcaacaatcgtatcgatggtcagtgaatcgacccaggcagtatcctggcgtatccgctcttcgaagcggggaataatcagcgagtcattgaaagccaccgcttcacctttttggttatagaagaaattctgatcggcatccattaaaccgaaaatacgatatttgcccggtgcaatcccacgaatcgtgaagtgtccacgactatcggtacgagctacacgatcaaaaggaagtttggtaaaagccgagtcattcaggttggaatgtagtcccaccaacatacctttaatgggttccagatcagaagcttcaagcaaggtgcccgatacctccattgtatcgatagaggcccctgtagagaatgtaaacgcaaaattaccgagcggattgccctcgttgttatcgacgatcgcatccgagaaatcgattgtataggtggtattgggcttcaaagagtcgagcaggtttacagtaatccgcttccctccgggtttaatctccggttgttgcaactggggaggcgaaaccactaccttttcactggccttttcaagtttaataaactcatcgaaatcaaggacaatctttgactttttagtatttacggctcctgctgccggcgtactgccgatgaagcggggtggagtttcatcaaaaggtcccccatccggacgtcccatactggcacaagaataaagggtagctaccagagcagcaactcccaacagactacggatgagtcgtttttttctatatatattgtcttttaacatgctgcaaaaataagccttatccattaattaatgctatactttacactaatttatccaaaaagactctgtccgacaagacaaaaaacgtatctttgaccaacaatttacaaacctaataagattaaccccatgaaaagacaactgctgacttgctgcctggcgatgtgtagcctggcgaccatggctcaacatgacgaatggaaaaaccccgaaattaatgcggtaaaccgtgcaccgatgcacaccaattactttgcttactcttcaagtgaagaagccgcaaaagccgataaggaaaactcaagcaactttatgaccctgaatggcatctggaaattcaactgggtgaaaaatgcagatgctcgaccgaccgacttctaccggacagactataatgataaaggttggggacagatgaaagtccccggtgtttgggaaatgaacggatacggtgatccgatttatgtcaacgtaggttacgcctggagaagccaatacaaaaacaatcctccttatgtgcccatagaaaacaaccatgtaggatcgtatcggaaagaaatcattattcctgccgaatggtcagaaaaagaaatattcgcccactttggttcggtcacttcaaacatgtatctatgggtcaacggtaaatatgtgggatatagcgaagacagtaaactggaagctgaatttaacctgaccaaatatctgaaaccgggcaagaacctgattgcgtttcaggtattccgctggtgtgacggtacgtacctggaagatcaggactttttccgctactcgggagtgggacgtaactgctatttgtacagccgcaataaaaaatatattcaagatatccgtgtaactcccgacttggacagcaattatacaaacggtacattgaacgtggcactcaatctgaacggaagcggaacagtagagttgaacctgacagatccggcaggaaaaagtgttgctacggcacaggttaacggaaatggacaaaagtctgttgtcatggacgtgagcaatcctgaaaaatggacagcagaaacacccaacttatatacactgactgcaaccctgaaaaacggcagcaacacgctggaagtgatcccggtaaaagtaggtttccgcaaaattgaattgaagggcggacagatactggtgaacgggcaaccggtgctctttaaaggtgccgaccgccacgaaatggatccggacggaggatacgtggtttcccgtgaacgcatgctgcaagatattctgcgtatgaagcagctgaacattaacgcggtacgtacctgtcactatccggacgacaatctgtggtatgacctttgcgaccaatacggtatctatgtagtggcagaggccaatatcgagtcgcacggaatgggatatggcaaagaaacacttgccaaaaatccatcttacaaaaaagcacacatggaacgcaaccaacgcaatgtacagagagggtataaccatccttccatcattttctggtcattaggaaacgaagccggatacggcccgaacttcgaacagtgctatacatggatcaaaaacgaagacaaaacacgcgccgtacaatatgagcaggcgggtaccaatgaatttacagacattttctgcccgatgtattacgattatgatgcctgcaagaagtacagcgaaggcaatatagacaaacctttgatccaatgtgaatatgctcatgctatgggtaactcgcaagggggcttcaaagagtattgggatctgatacgcaaatatcccaaatatcagggcggttttatctgggactttgtagaccagtcgaaccattggaaaaataaggatggaatagacatctacggatatggcggtgacttcaataaatacgatgcttcggacaataatttcaacgacaacggactgatcagccccgaccgtcgccccaacccgcatgcccatgaagtgggatacttctaccagtcaatctggactactcccggcgatctgtcaaagggagaaataaaggtatataacgaaaacttcttccgcgatttgtccgcttattatatggagtggcaattactggcaaacggtgaagtaatgcaaaccggagtcgttcaggacctgaacgtggctccccaacaaacagcgactctcaaactgaatctgaatacggaaaagatctgtccatgtaaagagttgttgctcaacgtaacttataagttgaaagctgccgaaacactgatgccggcaggaagtacagtggcatatgaccagctgaccatccgtccgtatacagccaaagcattggaattaaagaaccagaaagcatctaatcttgacattgtcgtaccggtcattaaggacaacgaccataattatctgattgtagaaggcgaaaacttcataatcgaattcaataagcacaatggatatctctctcgttacgaagcagatggtatgcaattattaaatccgggagctcaactgactcctaacttctggcgtgctcctaccgataatgattatggagcaggattacagcaccggtatgctgtctggaaaaatccgggactgaagttgacttcattgaaacaaagtatcgaaaacgaacaggcaatcgttcaggctgaatatgaaatgaaagctgtaaaaggaaaactattcctgacttatgttatcaacaatgagggagcggtcaaagtaactcaaaagatggaagccggcaaagaagaaaaggtttctgatatgttccgtttcggcatgcaaatgcaaatgcccgaaaacttcaatgaagtggaatattatggccgtggtccggttgaaaattatgccgaccgcaatcactctactttaattggcaaatatcgccagacagttgccgaacagttctacccgtacatccgtccgcaagaaaccggtaccaaaaccgatttgcgctggtggagagtattgaatatcagcggaaacggtctgcagtttgtaggtgacgctcctttctccgcctctgccttgaactatagcatcgagtctttggatgacggagtacaaaaagaccaacgccactctcctgaagtagcgaaagctcctttcactaacctttgcatcgataaagtacagatgggtctgggatgtgtcaacagttggggaacacttccactggagaaataccgtgtaccttatcaggattatgaattcagtttcatcctgacccccgtacgccacaaagtgaatatgtgaaacaagattccatgacaacagggacagtggtccggaattttccggatcactgtttttttatcatcttttttctgccccgcctgtttcgcacccatctgaagtaattttgagctttacacctatattaattagagaaaaacatcgttaaaaacagatattaaaaaacaacagtatagaaaataaagagtacttttgtcgcggaaaactaattaagggtaatcagttttcacctatacctgataaggttatcacgataaaccactttgccacaaaatgaacatcattaaaaattgaatataaagaaggtatgaaaagtaaaattgttttgtttgcattttgtttagccttgttgtcgggttgcggcaaaaagggcttcaacatgggaggaactcccgaatgtgcagtagagacattgcagcccaccactgtcaatctgaaaagctcctatccggccacaatcaagggtaaacaggatatcgaaatccgcccgcaggtttccgggtttatcactaaactgaatattgatgaaggatctatggtcaaaaaaggacaggtactgttcgtcatcgatccggtgcagtatgaatctgccgcccgtgcagcaaaagccgctgtagccacagctaaagcgaatgtttctactcaggaaatcactgtaaaaaacaaacgtgaattaaacaagaaaaacatcatcagcgactatgatctggaaatggctgaaaatacacttgcatctgcaaaagctcaattggcatctgccgaagcccagctgatcagcgctaaccaaaatctggcatacacacgcgtaacaagcccttcggacggtgtagccggaacaatcccttaccgtgtaggtagcttggtaagcgcttcaagcccgtcacctctcactgtgatctcggacatcactcagatgtacgtttacttttcactgacagaaaaggaattactgaacctgatccgtcaggacggttctcagactgaatttctgaatagcttcccagctgttcaactgacattggctgacggaacgttgtatgccgatagcggtaaaatagagacggtaagcggagtcatcgaccaaaacacaggtgctgtaagcatgcgtgccactttcccgaatcacggacatctgttgagaacaggcggtaccggtaacatccagattccttatagcaaggagaatgtaatcgttatacctcaaaaagcaacttacgaaatacaggataagaaattcgtatatctgctccagccggataacactgtgaaaaataccgaaatagaaatattaaatctcaacgacggacaaaactatgtagtcactgcaggactgaaagccggcgacaaaatcgttgtcgaaaacgtcagcaccctgaaagacggtgctactatcaagccgctcacccagcaggaatcggccgaacgctttaaagcagctttggaagaacgcaaaaatcagtaaacgagttaactcaaaaagcagaatatgaaattagatagatttattaatcgtccggtactatcaacggttatctccatcgtgatagtgattctgggtgtgttaggcctgctgtcgctgcctatctcccagtatccggatattgcccctcctactgtacgtgtcaacacgacgtatcagggagccaatgcacaaactgtattgaacagtgtgattgctccgttagaggagcagatcaacggtgtagaaaacatgatgtacatgacttctactgccaccaataccggagaggcctctatcgaggtttactttaaacagggtacggacccggatatggctgccgtaaacgtacagaaccgtgtagccaaagcacagggtctgttgccggccgaagtaaccaaggtaggtgtgattacctcaaaacgacaaaccagtatgttgctggtattctccctgtatagttcggatgacaaatatgataacgaattccttgagaactatgctaaaatcaatctcgtaccggaagttcaacgtgtaccgggtgtaggtgacgccatggtgctcggtgcagactattctatgcgtatctggttgaaaccggacgtaatggcccaatatcacctgatgcctaccgatgtttcggcagcattggccgaacagaatatcgaggctgctccgggttcatttggtgaacagggcaaacagactttccaatatacgctgcgttataaaggacgtctgcagagccaggaagagtttgagaacatcgtgatccgtgccaattctgacgggcaggtgctccgattgaaagatattgccacaatcgagttaggtcgtctgacatacggattctctaacaacgtaaatggtcaccctgccgtaacggttatcgtattccagacagccggttcgaatgcgactgccatcatcaatgacatcctcgacttgcttgaaaaatcagaatcgactttcccgccgggagtcaaagtaaatatctcacaaaatgccaacgacttcttgtttgcttctatccacgaagttgtaaagactttgattgaagcctttatcctggtatttatcgtggtttacattttcttgcaggatctacgctcgacactgattccggccatcgcgatcccggtagcattgatcggtacattctttgtgctttacatcatcggattcagtatcaacttgcttaccctctgtgccatggtactcgccattgccatagtggtggacgatgccatcgtcgtcgtcgagggtgtccatgccaagctcgaccaaggctataaatcagctcggttagcttccatcgacgccatgaacgaattgggtggcgctatcgtctccattacattggttatgatgtccgtgtttattccggtaagctttatgaccggtacttccggtacattctaccgtcagtttggtctgactatggctattgctattgccttgtcggcagtaaatgccttgacactgagccctgcattgtgcgccatcttactgaaaccccacgatcctgatgctaaaaagaaatcgactttagcaagccgtttccatgcttcgttcaatgctgcttatgacacagtattgaagaaatataaaaaacgtgttctcttcttcatccagaaaccggtgctgaccatcggctccgtagtagtgggtttcgcactgctcatcttcctgatgaaagtgactccgaccggtttggtaccgaatgaagatacaggaacgattatggcagtagtcgatatgcctcccggaagctcactggaacgcactcaggaagtgatgtggcaggtagatagcctactggcctccgacccggctatcgaaagccgtaccatgatcgccggttatagctttatcgccggtcagggtcccagctacggttcatttatctgtaaaatgaagaactgggatgagcgttccatcgctcaacgttctgacttcgtttcaggtatgctgtatctgaaagcccgtgaagtgattaaagacgcccgcgtactgttattcgctccccctatgattccgggttacagtgtatccaacggtttcgaaatgaacttacaggataagacaggcggtagtctggataaattctatgaagtagctcaggactttatcaccaagctacaggcacgtcccgaaattcagtcggcacagacttcgttcaacccgaacttcccgcagtacatgatcgatatcgatgccgctgcttgtaagaaggccggattgtctccgagcgacatccttactaccctgcaaggatattacggtggtctatattcgtccaacttcaaccggttcggtaagatgtaccgtgtaatgattcaggccgatccgaacagccgtaccaatctggagtcactgaactcggttaaagtacgcaacggcaacgagatggctcctatcactcagtttatgagcgttaaacgtatttacggaccggacaatatcaagcgtttcaacatgtttacggcaatgactatcaatggttcgccggctgacggatacagttctggtcaggccatccaagccatgcaggaagtggcagaacagacgttgcctaccggatacggatatgaattctcgggtatgacgcgtgaagaacaaagttcgagcggcagtactactgcgatgatcttcgtcctctgcttcgtatttgtttatctgttgctgagtgcacaatacgaaagttatattcttccgtttgccgtactgctttctataccgttcggtctggcaggtagcttcattttcgcccacctgatgggattggcaaacaatgtccttccgatactgggagcagctaccaacaacatttatatgcagatcgcattgatcatgttgatgggtctgttggcaaagaacgccatcctaattgtagagtttgctctcgaccgtcgtaagatgggtatgagtatcacttgggctgccgtattgggtgcaggtgcccgtctccgcccgatcctgatgacttcattggccatggttgtcggcctgttgcctttgatgtttgccatgggcgtaggtgccaatggtaaccgtgctttgggtacggctgcggtaggcggtatgtttatcggtatgatatgccagatattcgtggttcctgctttgttcgttatcttccagtatctacaagagaaggtgaaacctattgaatgggaagacatcgataatacggatgcagaaacagaaattgaacaatacgctaaataggaataaagaaaagaatatgaagaaacaaattataggtatgttgtgtgcaactgctctcttgagcagctgccacatctacaaatcatatgacagacctaaagatattgaagcctccggtctttaccgggacacagtatctgttgccgatacactggtatccgatactgtcaacttcggaaatctgccttggagagaggtcttcaccgatcctcaactgcaagcgttaatcgaacagggattaacccacaatacagatctgctgactgctgcgctgaaagtgaaagaggcacaggcatcactgatgtcagcccgtctggcttacgctccttcactcggattgtcaccacaaggaaccatcagcagctttgataagcatgccgcaaccaaaacctattcgttgccggcaacagccagctgggagatcgatctattcggcaagttgctgaatgccaaacgcggtgcacaagtaacattgttgcaaaccaaagcatatcgtcaggctgtacagactcagatcatttcgggcattgccaatacctattacaccttattgatgctcgaccgtcagctcgatattaccgaacagactgccgacatcatgaagcgtaatgttgaaaccatgcaggcaatgaaagatgcggctatgttcaacactacctctgcaggggtggaacaaagcaaggctgcctatgcacaagtactggcgtctattccggctatccagaagagtatccgtgaagctgagaacgctatgtccatgctattggcacaagcaccacagaccatcaaacggggagttctggaagagcagcaattacctgaagatttctcagtgggcgttcctttgcaactactctctaaccgtccggatgtgaaagcagccgaaatggcattggccggtacttactacaatgcaaattcggcccgtgccgccttctatccgcaaatcactatcagcggctcggccggttggaccaatagcgccggtagtgccattatcaatcctggtaaactgcttgcctctgtacttggttcgcttacccagcctctcttctaccgtggtgcaaacattgcccgcctgaagatagccaaggcacaacaggaagaggctaaactggccttccagcagagtttgttgaatgccggaagtgaagtaagcaatgcattgtatcaatatcagagtgcttctgaaaaaactgcttcccgcaaattgcaggtagaatcttcagaaaaagcatccgaatatacaaaagaattgtttaaattagggacgtctacttatctggaggtattgtcagccgaacagtctttgctcagtgcccgtttatctcaggtaaacgacaccttcgaccggatgcaggctgtagtgagcctctatcaggcattgggcggcggaagagaagattaactttaaatacaatacaattatgattagtccattagcatcgatagcccccggggcaaaaatcggaaagaatgtgatcattcaaccgtttgcttacattgaagataatgtcgaaataggggacgactgtatcattatgccctatgccagtgtgctgaatggtacacggctgggaaaaggtaacaaagtatatcaacatgccgtattaggagcagaaccacaggatttccactacaaaggagaagaaagttcactgattatcggggataacaaccatatccgcgaaaacgtagttatcagtcgggctactttcggtgggaatgctaccaaaataggcaatggcaatttcctgatggataaagtccacatttgtcacgatgtacaaatcggagataattgtgtagccggtatcggcaccaccatcgccggagaatgtaccttggatgattgtgtcatcctgagtggcaatgttaccctccatcaatattgtcatgtgggacaatggacattggtacagagcggttgccgtatttcaaaagatgtgcccccatacagcattatggccggtaacccggtagaatatcacggagtaaatgccgtagtattgcaacaacataaaaatacgagcgaaagagttctacgccacatagccaatgcttatcgcctgatctatcagggaaacttcagcttgcaggatgcagtgcaaaaaattatagaccaggttcccatgagcgaagagatagagaatatagtggcttttgtcaaagagtctaagcgtggaatcgtaaaatagaaaccattctctgcttataaaagaaggtgtagccatctcagaaagaaggctacaccttttttagtagtatcgaggccctttagaggcaggttcatcacagactattcaaattccaacgtaccgaagaagtcgggacggtgaaaatccggcttttctattttgatcggattccatgagaggaaatgcggagtttgcagttcgtcgccacatttatagaagttggctgtgattgttttcccgtccaaagaggtaatgtgatgtttgaagaaagctgtatatggaatcaccaatgccacctcccagttgcactcaccgatacgttcatcgaaaggctggcgtcccagactggcccaacgtttcacctgatctgtcacttcccgagaagcgcgttcacggttgttgcgttctgctcctgcaccaataagaatggttccgatacagttgcattcgatgttataatagataccgtcgccggtaggtacagagaaaaactccacacaggaatcagtccatacggagccatcgtcttctccatacttggcccgtacactggcctcttttacattgaagtgtaacaaaacagcatcatcgctatgtgctatacggaactccactttcggacgataagggtaggcttcccaattcacattatcaatgggttggaaaccgatcttttctttatccagtaattcgggaagtgcatcgacctccacattagcaatactgatcttctttactttcatggtctattctatttttatcttgcaaaaatatatactttatttcagtattccgttctccatccgatgctattttacaacctttcccgaaaacgtttactttcggatctccttttttatggtcagtcagatgatttccttacctttgcagcgtgaaacaaccactttgcattgatttaagataataacttcaacgggtaaatccctaatgtatctaacaaataacacaaaaaatgaaaaagcatctgattttatctgcttgcctgataatggcaataagcagttttgctcaaaaaaaggactttagttataagttttacggacagattcgcacagacctttattacaacagtcgtgccaacgaagagacagtagacggattgttttacatgtaccccaaagacgaagtattcgatagcaatggcagagatttaaatgcaactgccaacggtagcttttacaccctatatacccgcctgggattggatgtaaagggacctaaactgggacgcgccatgacttccgccaaagtagaagcagacttccgcggttcaggtacttcttactctactatacgcttgcgtcacgcttacctgaacctggattggggacgttcggctcttttgctcggacaaacctggcatccgctcttcggtgacgtatcacctcagatcctgaatctttcggtcggagcacctttccaaccgttcagccgtgctccgcaaattcgttaccgctatacacacaaagggttccaactgacgggagcagctatctggcaatcacagtatctgtcacaaggtattgtcggtaaaagtcagacttatataaaaaacagttgtgttcctgagttctatctgggactcgactataaagccaatggatggatagccggagcaggaatcgaactactctctctgaagcctcgtacagagtctaaagtagaggaccaagtctataaagtgaacgagcgcatcaccaccctgtcttacgaaggtcatgtgaagtatagcaataaagattggtttgtaggtgctaaaaccgtattaggctccaacctgacacaaacctccatgctgggaggattcggaatcaaatccatcgataatcggaccggagaacaaaagtatacaccgatccgggtatccagttcatggctgaacgtagtatacggacagaaatggaaaccgggtatcttcctgggatatgtcaagaatatgggaacaagcgatgccctggcatccaatcaagtatacggaacaggaaccaatgtggaccaagtggtgacagccggtgctgaactgacctataatgtcaaccactggaagtttggagtggaatatacctatacttccgccgcttatggctcactgtatcttaaaaacggtaaaatcatcgatacacactccgttggtaacaaccgcatcgtaggtgtagccatgtttatgttctaaaaacagatgaatacattacctatccacctcgctccgctgcaaggttataccgaagcagcctatcgcaatgcccatgccgccgttttcggcggtgtggatgtctatcatactcctttcgtacgaatagatcggggagaattccgccataaggatgtacgggatattcttcccgaaaacaaccgggttcctcacctcattccacaacttatagcctccgagatggacaaaacagagcgaataatcgcccttttcatcgaacaaggctatcgggagatggacattaacctcggttgccctttcccgatgttggcaaaacggcaatgtggatcgggcatgctgccccaccctgataaagtggaaacattactcaaacagatcgaacagtatcccgatgtgagcttctcagtaaaaatgcgcctgggatgggaaaagccggatgaatgtttgaccctgttgcctctattgaatgcggctccgctgaccgagattatcgttcacccccgcttaggtatccagcaatacaaaggagaagtaaatatggagggctttacagctttctacgaagcatgcagacatcctgttatctacaacggagacatcctgaccatagaagacatccggtgcatcaccgaaaagtttccgaaacttaccggagtgatgatcggccgcggattattggcaaaccctgcattgggttgggaatataaagaaggcaggaaacttatgcctgaagaatggagagaaaagttgagagcactgcacacagccgttttccaacactatgagacacagatacaaggtggcgaagcacaactggtgactaagatgaaaacgttctgggagtatctggccccacaaatagaccgaaagagctggaaagctatccataaaagcactacgcttgccaaatacaacattgccgtccgttcggcattttgataaaaaatgtaattcaccacagagtaacacagagtttcactgagtgagcctcatccattaataactaatgatagttatccgtgttactctgtggcaaatacgaattttgatacatccctcttaaattgattcaccggcgtccgaaacaaagggagagccctcttagcccttctctcccaccgttttttacgttcctacggatgcaattctttgaaagtgtcgttttcttctttcacttgtttcacagtttcgttcagatcgtcaatcggaaggtcgtatccataccatccggtatagcaatcggtcacgtaccacttaccgtcaatcaagtcgaatatcacacgaagatctacttccgactcttcatatccggcttcaaactctttatgtgtcggttcgtttaccgtaaacttagaaacataaattcctccttcttcctgagtgatgcgttcctctttcagagtctcggcatccagcaacggccatttttcctgagtaaaggggaaggtcttttcactattcccatcgtccgtcatcaaagtgatgggagttttcaacggaaacttgacacgggtatactggaaagaagcacttgaggtgaatttcttcagaaacgactggaaggtctcctcagccgtctccgcagcaacatcactctctgccttcgctttcgaagtatttccacaggaaataaagcaaataccccctatcagggtaagcataaacagacaaagcacaaatcttttcactttcataacgaatggatttagaacggggaatctcaccccgcattttcagcgggcaaagataatatatcttcctaatatccaactcggagggacagaattatttatgtctcagatactcatagccaaaacggcaataaagacacttcttcttatcgcaatattctttctgcaattgtaacaacgcctggctatccgccgctgtctgaaccggaatgccggctccgctccacatacgggtaacataattattttcagctttcagttcttcaagtaatgaggccgcacgctcacacaaccgttcgtcggctttatgcagaccatatgcatacagaaaaggaatgaccgtattgataatgatcagctcctttgcaccggcaccaatacttttctctctccgtggggaggatttgccaaacatgaaatgttcttcccaataagcagaagtgtgaccggcaaaaatctgtttcagatctttcagagtctccgcttccatgacccgtgaaaacaaagagcgttctctgtaataaagtgaagctaattgtgccagtctcacatggggaaagttacccggacgaagacggaggaaacgccacaaagagggattcatcaccggaggaagttcaaacttgtgttgcaaataacggaattctttctgcatccaactgaaataatcgtcggcggattctccctccaacaaaccggcttgtccgaagaagaaagcttccacctgtgtcagatcgtcacgatgcttatcaatggcacgaaacgagagcagatttgcccaagtctcaaaagcatctccattcagcccgaatccgaaattacgtgccaacgtgatgaaaaaagcatcttcccaatgctgattgcaacgttggagtcgccgagttatggttcggttcttctgatcaaagcgctctgtctgtaaagcggtcagccaagagtgaatcgttaatttaggaagggtttccagaatggaatagcaaggcgggtgtatatctgcccggcaaagctcatcataatgctctttcacctgttcggggcaaggtaaccggagttgcggaaccggttccccattggaacgatatatctcgcaatcgatctctgtggcaatgtgcagaatcactgagtcatacgctatgtcacggtcatgtccgtgacgaaaccaatcagaagaagcagtatgtatttcgacattacctacccaaagcgtaccaccgatttttagtttggcattaaaaaaatcggggccggaatcagaattcggcaatccggtatcaatcacttcaacaggcagcccggtggttgtttgcagttcatggagagggaagattttgtgtttccacacatagtgcaggagttgttccattgttaacaagacgttaatgtgctcgacaaatgtaataaaaatcttatctttgcgactaatattttggatataaagtctataaagtcagtaaaacaatgaaaatagcattaataggttacggaaaaatgggcaaagaaatcgaaaaggttgccctcagtcgcggacacgaaattgtcagcattatcgacatcaacaaccaggatgatttcgaatccgaagcgttcaaatcggcagatgtggccattgaattcactaatcccatggtagcctacagcaattatatgaaagctttcaaagcaggtgtaaagttggtttcgggcagtaccggatggatggcagagcacggtgacgaagtaaaagaactgtgtaacaaaggtggaaagaccttattctggtcatctaatttcagtttgggagtaactatcttctcggctgtcaacaagtatctggctaagataatgaaccaattccccgcctatgacgtaaccatgagcgaaacccaccacgtacacaagctcgatgcaccaagcggaacagcgatcacactggcagaaggaatccttgaaaatatggaacgcaaaagcgtctgggtaaaagaggaagcacatgcaaccaatgaattgccgatccactctattcgcgaaggagaagtattcggtatccataccatccgctatgactccgaagcagacagtatctccatcacccacgatgccaaaaaccggggaggtttcgcattgggagccgtattggcggctgagtatacagcagcccatgaaggctatctgggtatgagtgatttattcccattcttaaaagattaacatcatgagaaaagcaacacgtactcaatggataaagtgttccattgccattcttttgtatctgatattcctgatttgggtgaaaagctggtggggactgatcgtagttcctttcatcttcgacatctacatcaccaaaaagattccctggtcgttctggaagaaatctaaaaacccgacggtccgtagtgtgatgagttgggtagatgccatcgttttcgctttggtagcagtatatttcgtaaacatctatgtttttcagaattatcagatcccatcatcgtcactggaaaaatcgctgctggttggagacttcctctacgtgagcaaaatgagttacggcccccgtgtgccgaacacaccgctatcaatgcccttggcacaacatacattgccgattctgaatactaaatcctatattgaatggccgcaatggaaatacaaacgtgtacccggattcggtaaagtgaaactgaatgacatcgtagtgtttaacttccctgcgggagataccgtcgcactgaatttccaggatgcagacttttatacattggcgtacaacatcggaaagcagatttacccgaacccgatcgacatggacagcctgactcgggagcagcagaagacagtgtatgatttatactataatgccggtcggaaagagatactgtcaaaccctcaacgatatggtaaagttgttacccgtccggtagaccgccgggagaactatgtaaaacgttgtgtaggacttccgggagatacactccagattatcaacggtcaggttatgatcgatggcaaggccattgaaaacccggaaaacttgcaattcaactattttgtgcaaactaccggcccgtacatcacggaagaaatgttccgcgaactgggtatcagcaaagccgaccaaagactaactcccgaaggagcaggctatgaagaggggctgattgagctgggattggacggacgaaatgcccaaggtggactgaatcctgtttatcatcttccgttaacgaagaagatgtatgacactctatccggtaacaaaaaattagtcagtaagattgtaatagaaccggaagaatactccggagaagtgtatcccctgaatttaaatacccattggaatcgtagtgactacggccctatctggattccggcaaagggtgccaccatcacactgaccccggacaatctgcccatttatgaacggtgtatcactgcttatgaaggcaataaactggaacagaaagaagacggaatctacatcaacggtgtgaagacaaaccaatacactttccagatggattattattggatgatgggcgataaccgtcataattccgccgactcccgctattggggattcgtaccggaagatcacgtagtaggtaaaccgatcgtcgtatggttatcattagataaagaccgtaactggttcgatggtaaaatccgctggaaccgcatctttaagtgggtagactgagtaatcaatgggaaagggactcaaatggattatagcttttgccggagcaatggtcatcgtactgttgctccgcggctttgcttttacctcatgcctgataccttcggcgggtatggagaattccctttttcagggtgaacgtattctggtaaataaatggagctacggacttcgtgtaccctatatgtcattattctcctaccaccgctggggagaaagtcccatacataaagacgacatcgtcgtattcaataaccctgcgggtatcaaagaacccgttatagaccgaagagagatttatataagccgatgcatcggtgtaccgggggatacgttacttatcgattcactcttcaacgtggtcgaccgtagcacacaactcggaccggaccggaaacaactatatacgtatccgcaaaccaaggaacagcaactggattcattgctttctattctttctattggccctaatgaactgatgggacaacacgaaggaaaaaatgtacggagcttcagccgctatgagtattatttgctcgatcaggctatgaacgggaaaagctggatacagcctttacaacaaagcttacaggaagaagctaaaccacttattgttccgggtaaaggaaaagcagtccgggtatatccgtggaaccggacattgttacgaaacacgctggtactgcatgagggtaaacaggcggagatccgaaacgatacgctctacatcgaaggccgtccttcacaacattgttatttcaccaaagattattactggatggcttccaataattcggtaaatctttccgattcccgcctgttcggtttcgtaccgcaggatcatgtcattggaaaagcttcacgaatctggttctcaaaaacagaccatacgggaatctttagcggataccgctgggaacgattcttccaaccggtaaaatagttcgtatccccggataacaaattatataataacaatcaagtaatcactaatcatcaattaccaatgaaagttgcctatctttcttctgcctatctggctcctgtagaatactacagcaaattgttgaactacgataaaatattcatcgaacaacacgaccattacatgaagcagacctaccggaaccgttgtaccattgccggaccggaaggcgaactggcactttctatccccaccgtaaaaccggaagggcctaaatgcccgatgaaagatatccggatttcggatcatgggaattggaggcatctacactggaatgcaatagagtcggcctataacagtactccattttttgaatattacaaagatgattttcgcccgttctatgagaaaaaatatgaatttctgacggacttcaacgaagaattatgccgactggtttgcgaactgatagatatacagcctgccattgaacggacgaaagaatataaaacagactttgccccgaacgaaatcgattttcgcgaagcgatccatcccaagaaagattttcaccggacagatccggaatttatccctcagccttactatcaggtattcgaagcccgccacggttttctacccaacctgagcatcatcgaccttctgtttaatatgggaccggaaagcctgctgatactgcagaaaacatgtgccgattctcaataaaagggagcgatccccttgaatttccctctttttttaaaccatcccatcaactttatagctatatttgcgctctgcgtgtgcgataacgaagccacaagacaagaagtctaacctttaaaagcaatagtatggcaaacttatttagtgtaaaggacaaagtagtagtcattaccggtggaacgggagtattaggaaaagcaattgcagcccacctggcagaagaaggtgccaaagtcattctcctgggacgtaaaaccgaagtgggtaataagattgtagaatcaattcgtacccaaggaggtgaagcgctgtttctgacaaccgatgtactcgaccggaagatacttgaacagaacctggcggatatactgaaagcttatgggcggatagatgcattactcaatgcggcaggaggcaatatgccgggagctacgatctcacctacaggcgatatctttgacctgaaaatagatgaattccagaaagtattggatctgaacctgaccggtacgatactgccgacacaagtattcctgaaacccatggtggagcaaagagcgggcgctatcgtcaatttctcatccatggctgctttccgccctttgacgcgtgtggccggctatgccgctgccaaggccgggatctccaatttcaccgcatttatggccacggagattgccaaaaagtttggtgaaggaatccgtataaatgccatcgccccgggattcttcctgacagaacagaatcgtgcactactagccaatccggacggcacctatacacaacggggacaagacgtaatccgtcaaacgccattcgggcgtatgggacgtgccgaagagttatgcggaacaattcaatacctcatcagcgacgcagcaagctttgtaacgggtacagtggcggtagtggatggaggattcaatgcctttgcgatgtaaagaaagtctaacttctgatcccacacatatctgaaaagggaagagacagaacagacacactgactgattaaaccaacctcaaatgaaaacagacttatgaatcaaccaaatatcatgactttaccaaaagacaaactctttttatccgaacaaacctggcgttggtacggaccggacgatcctgtcagcctttgggatattaaacaagccggagctacgggtattgttaacgctttacaccacattcccaacggtgaagtgtggaccgtcgaagaaattatgaaacgaaaggaactgatcgaatctgtcgggctgaaatggtcggtagtagagagtgtcccggtacacgaacatatcaaaacccagactggcaactttcggaaatacatcgagaattataaagaaagtttgcgtaacttgggacaatgcggcatccatatcgttacttacaattttatgcctgtgctcgactggactcgtacggatcttgcctataccctccccgatggctccaaagccctgcgttttgaacgcgccgccttcatagcttttgatcttttcttactgaaacggccgggtgccgaaaccgaatacacagatgaagaaaaaacgaaagcgagaatccggtttgaacagatggacgaaaaggagaaacagctccttgtccgtaatatgattgccgggcttcccggttcggaagaaagcttcacattggagcaatttcagcatgaattggaccgatacagaggcatcgatgcagaaaagttacgcacccacttaatctatttcctcaaagaaataacttcgacggcagatgaagccggtgtgaagctggttatccacccggacgatcctccttgctccattctcggtttgccacgcatcatgagctgtgcagaagattttcaggcactgatcgatgccgtccctaacgaatcgaacggactctgcctttgtaccggatcactcggtgtaagctgtgccaatgacttggaaggtatgatgagacggttcggagaccggatcaactttgtccatttccgaagtacccaacgggatgctgaaggtaatttctacgaagccaatcacctggaaggagacgtggacatgtatcacgtcatgaaagccttcctggagttacaacagagaagaaaagtatcgatccccatgcgcccggaccacggacaccagatggtggatgaccttaaaaagaaaacaaacccgggatactcctgcataggacgcctgcgaggacttgccgagttaaggggattggaaatgggaattgcaaagtcaatcttttaaaatccgaaagctacaacagccaacttctttatccggtacaaatacagattccacagattaacacagattccccaataggacaatcaatctctgctaatctgtgggatcaatagtatatcgacagatatacaaggtttgtacaagggtcagccgacttgctgcctgtacacctcctccttgattctttctacctgctcagccaaccggggagaatcttcacttcccataatccaaagcggacaagcatcttccaacgcatgataagaaggctgcacataagttttatccagcacttcatatccattacgccggtagtaattcacacgacgggtagtcatttcatcttccgtaggttctacttcgagcaggcgtacccctttcaggtgttcagccacataatcaagcacttgctgccctatctttttattccgcatctcagggaatacagccaaatgttccagatagtagaagtcacccatatcccaatatacaaacattccactcaattctccatcacattcaatagcattgaaatacattggggcatggttctcaatcattcgctttaactgcccgatttttcttctctcactttcgggaaaagactcctcgtacaaaggaatcaaacggttcagacgtgaatcgtcagcactcgtaatacggattaatgtcatcataaattctatgttttcgagcaaagataagctgaataagccggaagacagcagtctttaaacatttttacgcaatctttgtaagcagaagatatgcaggcattattcaccgacggacatcccccgacaggttcaatccaatactattaaaaataattaataagcgagaaaaagcagagtcacccggaccaaagagccatattaatccatacatttgccgccaattatgacagcatacatcaaactactaatgttatgcctgttgtttttggtattcggtacccagaaaagcagtgctctacagcccgtaaataacggggtggcggtcactactgccgtaaaaagccacactcacaatgttccctcttttgataactccggtcacgatctgtttgacttcaatcaggggatactgcttaagaaatcggtttcggattcagccaatccgtataaacagagcaataacttccatcccgctatcaagacggatgctcagagaccgataacattcaaagaagatacttctacctataccctccgtaacagagttaagcctgcacaaaaatacgatgtatttgcgctcaggcatatccttatttagcactttctgcatcacggctttataggttcatatacagcccgcaccaggatgtttttttagtttatatattccaaggtcagagagtgcatcgtaaagatttatataagtattaattgtgtgtctaatagtaatgtcaatcctcagatgcaccctcttcctttttttcttatctgtaaatcagtgtagagagatattcctctgcaaacatttcattggctacctccaacagtccttctgccgtcaaggcttcgatacgccggaaaacagattcggatgattcatacttattgtagtgcagaaaagtcttcgccattcccagcgcattgttttcgttattatcggaagcgaccccgatctggccgatcagttgctttttggcagccatcaattgcgaagaggtcatcttcacatcacgcatccgtttcagctccttgtaagtcagtttcagacaagtatccacatcctccggatcggtaccgaaataaatgcagaaagctcccgtatcggtatatgacgttaagttggactccaccgtatagaccagtcccctgcgttcgcgcagagagacattcagacgactgttcatccccggaccacccagaatattattcagcagatacaatgcggtacgcttgtcatcataagcattatatccccgactgccaatcatcacatgtgcctgatgggtctccttgtgaacaaccaactgctcgggtacataaagcggaggtatcgtacgctgattctcaaccgtaaccaacggaagatccactaacagcttctctacctgacggactattttctgaaaattgaaatcacccaggacaaagaataccatattggagggttgataaaaccgggaagtaaaagccatggcatcctcgctccggaatttcttcagcagatcgggtctgcccaggatattacgtcctaacggatgattgcggaagatcatatcttcaaagtcatcaaagatcaattccgaaggagtgtcttcgtacgactgtatttcatcgataatcacctctgtctctttttcgatttcgttctgcggaaaggtggaatggaaaacgatatccgccagcagttccagtgcccttccgaagtgctcagtcagaaatgccgaatagatcacagtttcctctttattggtatacgcattcagatcgccacccacattctccatgcggttcaggatatgccaagccttccgtttccgggtacctttaaaaataagatgctctacaaagtgagccattccttgttcattttcggcctcatcacgggttccggcatctacggcaaatccgcaataagccaccttcgaagaagagggttcatgaataatgcgaagtccattggacagggtatgtatattatattgcatttctgcacgggtacttaactgcttcattcttactattaagttaggttgaggacacaaaaatacaataaaacttattgtcgtttatagaaaattgcagatatttgtaagctataacatcaataacccttatggagaagataggaattttctgttccgcatccggcagcatcgacccgatatacttcgatgccgcccatcagattggcgaatggatggggaaaaacggcaagacacttatctatggtggtgccaacctcggactcatggaatgcgtggccaaagcagtcaaagaaaacgggggacatgtcatcggtgtagtaccttccaaactggaagaaaacggcaaagtgagtacataccccgatgagataatcgccacacacgacctgagcgaccgcaaggatatcatcctgcaacaatcggatgtattggtggcccttcccggcggcataggcacgctggatgaggtatttcatgtcatggcagccgcttccatcggctatcatcagaagaaagtgatcttctacaatgcagatggtttctacaacccactgctcgccgtgctcagcgaattacagacaagaggattcacccgtcaccctctgtcctcctattatgaagtagcaaacacatttaatgaattaacaattaagatataatgattgaatctattcaagaactcctgcaaaaggaagcacaagctgtgctgaatattcctgtgactgatgcctacgaaaaggccgttgaattaatagtggaacaaatacacagaaaaaaaggcaaacttgtaacttccggcatgggtaaagccggacaaatagcgatgaacatcgccactacgttttgttcgaccggaattccctctgtcttcctgcaccccagcgaggcacaacacggcgatctgggcatcctgcaagagaacgacctgttattattgatttcaaattcaggtaaaacccgtgaaatcgtagagttaacccagctggcccacaacctgaatccgggtctgaaattcattgtcatcaccggcaatccggacagtccgcttgccagcgaatcggatgtatgcctgagcacaggacatcctgccgaagtttgtaccctggggatgactccgaccacttcgactacggtaatgaccgtcatcggcgatattctcgtagtgcaaaccatgaaaaggaccgaatttactattgaagaatactccaaacgccatcacggtggttacttgggcgaaaaatcaagaaaactatgcgtaaagtaatcggcatcggagagactatactcgatatcatcttccggaacgaccagccttcggcagccgttcccggaggctctgtattcaacggcatcgtttctttgggacgcatgggagtcaatgtatgcttcatcagtgaaacagggaatgaccatgtaggaaacatcattctgcaattcatgcgtgacaatcacatcccgacggatcacgtcaacgtgtttccggacggcaaatcgcccgtatccctggctttcctcaacgaacacagcgatgcagaatatatcttctataaagactacccaaaacagcggctggacgttttattcccgtccatcaatgaagacgacatcattgtcatcggttcatattatgctctcaatccggtattgcgtgataagatattggagctgctggacatagcaaaagaaaaaagagcgattgtatactacgatcccaatttccgatcctcacacaagaatgaagcgatgaaactggctccgaccattatcgagaacctggaatatgccgacattgtaagaggttctttggaagacttctattatatgtacggaatcaaagacgtagaaaaaatctacaaggacaagataaagttctattgtccgctcttcctttgcacagccggagccgaaagaatctcactgcgtacgaacgcaatatccaaagagtatcctgtcgcgccattagaggcagtcagcactatcggtgcaggagacaattttaatgccgggctgatctacggcatgctaaagtacgacgtccggtaccgtgacttgcaacacctgagtgaagagacctgggataaagtgatacaatgcggacaagactttgcagccgaagtctgcaaaagtttcaacaactccatatccggggagtttgcggccaactaccgttgaaagcaataagctacgggctacaaaactgcgaatgaatgtacagtcatccggcacggttacctgtagcttgtagcctgcaattcgtagctaattactattaacgttgcctaattatcgcaaagtaattataccatgtaacgagaattcctatctttgcaatcagtgctttcagacaaatacaaactatgtacaagaacctgttcaatttactaactattttacttattctgccttcgtgcacagacatgtctcctaacatttcggtggtttgcgaagagaataatataggaaactgtattcttaaatgggaaacgactcctctcatcaaggggcaggtgaaagtatatacatccgacaatccggaattcatacccgaagataatccggttgccatggccaatatctccgatgcgcgaatgacgattgtgaccaacgatccttccaggcgctcttattacatgctggtgttcaacgataaataccgtgtgaaagtggctccccgcaacgtgaatatgcccggcattcaaaacttccgtgacttgggaggttacaaatccgccaccggaaagcatgtacgttggggcaagctctaccgttcggcacagatagacagcctgaattgctttgccctcaggaaactgcaaaacctgggtatcaagaccattctggatctgcgctccgagagcgaactccataatacacctcccttgcaaaagggattcaatgtagtacatatccccatcaacacgggcgacatggaacatatcctgcacggcatacagcaagagaagatcaaaacagataccatttaccacatggtagaagcgatgaatcgtgaactggtggcaaaataccaaaaggaatataaagagattttcgacatcctgctcgataaaaacagttatccggtcgtgattcactgctcgtcgggaaaaggacggacaggcattgtatccgcactgatactggcctctttagatgtcaatgcagatatcattatggaagattaccgtttgagcaacgattacttcaacatccccaaagcctccaaatacgcctataacctgccggtcaattcacaggaagccatcaccaccctcttttcggcaaaagaagactttctcaatgcagccaaagacgagatagagcggaaatacggtgatgtgcccacctatctgcgaaaggcaatcggccttcagtccgaagacatacacaggctacgcaccatcttactggaataacgcactttttgttcatcattatttattgttatcattcattattcacaattaatgcgtatctttgcacccgaaaataaagatatacagagatttaatgaagacatttgaagagcttggcgtttctccggagatacgtaaagctattgaagagatgggatacgagaatcccatgccggtacaggaggaagtgattccatacctattaggagagaataatgatgtagtagctcttgcacagacagggacgggtaagaccgcagcgtttggcttgcccctcatccagaaaattaacgtaaaaaacagaatacctcaatcactcgttctttgccccacacgcgagctttgcctccagatagcaggcgacctgaacgactattccaaatacatcgacgggctgaaagtattgcccgtatacggcggttcatccatcgacagccagatacgcagcctgaaacggggtgtgcatatcattgttgccacaccggggcgactcctcgacttgatggaacgcaaaacggtatctcttgccactgtcacaaacgtagtgatggacgaagcggacgaaatgctcaatatgggctttacggacagtatcaatgccatcctggcagatgttccacaagaacgtaacacactgcttttctcggccactatgagcccggaaatagcccgtatttcgaagaactaccttcacaatgcaaaagagatcaccatcggacgcaagaacgaaagtacgagcaacgtgaagcatgtggtctataccgtacatgcaaaagataaatacgccgccctgaaacgcatcgtagactattatccgcagatttacggtatcatcttctgccgtacccgcaaagagacacaggaaattgccgataaactgatgcaggaaggttataacgctgactcgttgcacggagaactctcacaggcacagcgtgacacggtgatgcagaagttccgcatccgcaacatccagattctggtagccaccgatgtagccgcacgcggactggacgtagacgacctgacacacgtcatcaactacggattgccggacgatacggaaagttatacgcaccgtagcggacgtacaggacgtgccggaaagacaggtacatccatcgccatcatcaatttgcgtgaaaaaggaaagatgcgcgaaatagaacgcatcatcggtaagaaattcattgccggtgaaatgcctaccggtaagcagatctgcgagaaacagcttctcaaagtgatagacgatcttgaaaaagtaaaggtaaacgaggaggatatcaatgatttcatgcctgagatttaccgtaaactggagtggctgagtaaagaagacctcatcaagcgcatggtatcgcatgagttcaaccggtttgtcgactattatcgcaaccgcgaagaaatagaggtgccgactgatagccgcagcgaacgcgccggaaaaagccgtgaaggaaaaagcagccgccaggcagaaccgggttacacccgccttttcatcaatctgggtaagatggataacttcttccctcacgaactgatcaccttgctcaacaataacacacgaggaagagtagaattgggacgcatcgacctgatgaagaatttctcgttcttcgaagtggaagagaaacaagcacaaaacgtcgtaaaggcgctgaaccggacaaactggaacggacgtaaagtcacagtagaggtagccggagaagaggcatctacagagcacaaaggacgtggaaagcggaatgaaggtaacgatcagggtggcagaggaagaagcagcgctccatctgccgaccgcaaagagagaggcaaaggcagcaaagacagcaaacaagccgacagccggaaaggcaaaaagccaagccgtgaggaacggggatattccgcagcccgcggccccaaaggcaaagatgaatggaaacagttctttaaagatgccgaacccgacttcagcgaagaaggatgggcaagaagaaagcctaaaaagagctaaatacaaaaggacaggaaaaacggctgacggacttacaaaaggattcaaatagccgtttctgaccaaccttccctctttataagatcactctttcagagagatcccgaacgaaagcccggcgcttcatcccactcagctaccgtctgagtgagacggagagccgggctttcccgttccgacaagcaagctcccggatgaaatgcttactacatttaccccaaaaggttactgcatcgggagcaaatgcctgctgcatcggaagaagagacccactctatcggtacattcttcataaaagctcccgtttccgagccggttggtatccgaagaggagcacgaacgaactatcaaaaaggcactatatttttatccgaaaggtctatttgctcacagatcaccgcttatagcaaaaatcagaaaggaaacagaagaattttcaagcatcaccccctttccctgatgcaaaatccagccatttttattacctccacaggagagagggccgaaataaacgattctgaatgggtcggaaaagcaaaaagtcaaaatgacaacatccaccgcagagcaacaaagagtaaacctgacctatgggtaacgaatgatatttatctgcggaaagctgtggaatccgcagtgaacacgagttgcgatcccccatagtaaaaatccttcccctctttattattgtctttaaaagtgctacctttgcgtgaattaaaaaaaacaggtaatagttttcgggtatgaacaaattgaatggtttcctttacggtttgctgtcgtcggcctctttcggccttattcctcttttcacgatccctgccatgcgtgaaggaatgaacttcgaatccattctgttctaccggttcctgtttgcctgcctggcattgggatgcatcctattgctagacaagcagtctttccatatcaagcggaaagagatcccgtcattaatgttacttgcttttctgtatctgatgtccgcagtctttctgttctggggatataaatttatggcaagcggcgtagccaccaccattcatttcatgtatccggtattgaccactctgatcatgatgatcttcttccgcgaaaggaaatcgacgtggcgtttctttgctatcgccctcgcagtggtcggtgtctcctgcctctcttatggcgacagttcgggaggaattaccgccctcggattgtttatcgtcctcctgtcggctttgggatatgcactttatctggttacggtcagccagctcaaaatcggacagatgaagggattacggcttactttctatgttttcctgttcggcacgctcttattgttggcaggcataggtgctactacaggcatacaaaccatccctgactggcacacgggaggaaacctggtactcctggcactgatcccgacagtggtctccaacctggcattggtacgggcggtaaaaagcatcggctccacgctcacttccgtacttggagccatggagccggtgacagctgtttgtgtaggtatctttatattcggcgaaccctttacccaaagcatcgggatcggtattctgctgattatttcggcagtaatcgttattatactgaaacgttaggaggtatgtcgaaaccgtaccctgcgttactctgcggtaagtgatgccctcacccctctattttcagttcttgtatcagatggcttgctttaccaaacttctcgataataaagagcatataacgcacatcgaccccaatgcagcgttgcacatcgggctcgaaaacaatatcactgctcatggcttcccagtttccatcgaacgccaatcccagcaattcgcctttgccattgaacatggcgctgccggagtttccacctgtgatgtcgttgtttgagataaagcagacattcatgtctcccttcgtatcggcataacgcccgaaatcacccgatgacagcagggacagcacctcgggttgcacggcaaagtcgggatcgccgctgtgctcttttaccttctcgaaaatacccttcaccgtagtgtaatagccataatcagccccatcgtaaggtgaataactgccaatggtaccgaaactcaaccgcatggtagaattggcatcgggatagaaattacggtcggcatacatccgtctcatggcagcattgaactcacgttcgtccttctctatattgtcggaagcctcagccatctgactacgcatatcgaagagctttacaatgagatcgatgcccagcgagactgcaggatcatcgatcatgtggaaagttgtgtcacgctccagaaaacgcttcaagccgcggggggaggtaagttccgaatgagcatacaacgtgtcgacatacatctgttcattgcctccgtaaagtgtatctatggtctgataaagatcgggcagataagccttatccactttgctccgatactccttcagcatggccacaaacacctccttatcgatggaaacgtcataatttgcatacttatcgagtaatttctggagctgggccacgacctgtttctgttccgcctcaaaatcaaaattgaggatagtcaacgcaaattgcaccagctcgggaccattgataaatgactccccgaaataagacatcgcccggttcacctccttgcggtccttataattcagttcgagcgacgacatcagatgcaacagtttctcacgttctgccggagtcttctgaatccactgccggagtgcttcttccgcctgccgtttcttgtcaagcaccttcagcttgcgtatcgctttattggttccgatgctgtttttccagtaattggaactttcatcatattttgacgcatacttgatacggatggaatccctgcgatccatctcacgtttccaaatggcctgtttcactccgcggacatcgatcatagcctggttcatgccgttcatcatctcttcgatgccaaacgaagaaagataacgttccgtgctaccgggataacccagagtcatgcagaatgaaccttctttgtatccatccaatgtgatgggagccacgtattcggggcgatagggcacgttgtcgggtgaatagtcggcaggacggttatctttaccggcatagatacgaaagacgcagaaatcgccagtatgacggggccacatccaattgtccgtatcccaaccgaacttaccgatggaagacggtggagcaaacaccaggcgtacatcgttgaaatcgcggtaaacagaaagccaaaactcattgccaccgtaatacgcatccacaatgccgaccagtgtagagtcctttttagtgacttcatctcccagcaacaccatcatcgaatcgatggccaggctgcgttcggattcagtcataccgggtgtcgtagctttcagtacccgccgggttacgttttccgtacgaagcagaaaccggacatacagctcgggattgggcaattcttcctcccggctatgtgccgtaaacccgtctttcaaataatcatgatccaccgaactgtgttgctgtatgctgctgaatccgcaatggtgattggtaaacaccaagccatcttcggagacgactactcccgaacagaatcctccgaaactgaccacagcgtctttcagagacgggtgcctggtgctataaagttggtcggcaggcatctgcaaacccaactctttcatcgtcttacgggtttctttattcaaattgccaagcatccacataccttcatcggcatgcatcgaaaccggatagagtaaaagcaatgccagaaacagagcctccccccacctctttccgttgcggaaagaggtaatcactttcattttattcatttatataaatcatgtttattcatcttcttttctctggcgacacgcttaccgtcactcttcaacaatcagccgaagtttcttcgcccctacccgcgcctgaagccatgcactgattttcgctttttcctcgttcttcggatgacgggtgaatttcaatacggcaagcgctatggtatccgttttcatcgaatcgaccgttgtctcgatggtatgcgaaatagacaaagccgtcaccgacggatagagtactttcagttccgggataattttccggctcatttcatcgtaagacttataccgttcgaggctttgctggagcgtggctatcttgacttgctgttcctgcaggcgttgttcactgtttttatagaagtcttccataaccatggcacggatagacgacatatccatcgcttcattattgttcatcccctgcagaacgatcagtttcgtattctccagtttataatctttcatcttgctgcgggcaatggcaatggaagcttccggcacctccggaccaatcagcacaactcggatttcgcatgaatctccttcataatgaatcttcttattcaagacctgagtattgtcgaagttgagctgttcggaaacgaaacgattcgctgccgcttcgaagaaggtgcttcggataattcccatagtcaggtaaatagccggacacatggtcaggattacgatcaatacgatgtatttccgcactttcttttcccggttcttatccacaaactctttccgctgaaaatgcatcagcctcacaccgataaacgtagccagactgataaatacggaattgatgaaatagaggtagaacgcgcccagaaaatagatcagattgcccgaagccaatccgtaaccggccgtacagagaggaggcatcagcgcagtggcaatggcaactcccggaatcacatttcctttctccttggtagagagggcaaccactccggcaagtccgccgaaaagtgcgatgaaaacgtcataaatggtcggtgacgtacgcgccagcagttccgactgcgcctcagcgatgggagtgaaaagaaagaaaacagtcgccgtcgtgacactgaatgcagttgtaatcaggaaactcttcagggaacgcttcatcaactcgaaatcgttcataccgacagacagccccacccccataatcgggcccatcaacggagaaatcaacatggcaccgataatcacggccgtcgagttgacattcagtccgagtgaagccatgaaaatggcaaaaatcagaatccagagattagctcctttaaactcaactcccttacggatagagtcgacggttgccagttcattgtccttatcctttctcagatcgagatactctctcagaaacgccttaatggcaaaaatgtttcggttgtctgccttcataactatttcttctttataattcggttaatcacaggaatctggctcagcggtaagtctttccgaacaacataagccataaatatcagcaacaatacagtacggaaagccagacggagcacgatattctcaatgggaacccactctccgatcacataaagcactgctgtaaacagcacatacgtaccaaggtgtttcaggtcatagtgaatgggatatttcttctgcccgatccaataagaaaggatcgtaatcacagcgtatccggccaccgaagcccatgccgaagccacaaatccgtaagtggggacaagcatcacattcattcctacaatgatgacacatccgacaatggaaaagtatgctccccaacgggtttcgtctatcagcttataccagaacgaaagattgaaatagatacctttgaatatttccgctccgatcacgatggcgacaacgctcagtcccgcccaataatcaggtgccaccatataacgcaaaagatccaggtaaaacattaccaccagaaaagcgaacatcgcaaaaataaggaaatacttcatcgcctgtgcatacatccggcggttatccccttccttttgtttgccgaacacaaaaggctcgtaggcatagcggaaagcttgggtgaacatggccattaccatggcaatcttagtggcggccccataaatgccgagctgcaccagtccctcctgccggtcggcaaagagaaaaggatagataatcttgtctaccgtctgattcagaatgcctaccaacccgaaaatcaatatcgggaaagaatagataagcatccgcttcaacaactgtttatcaaccctgtaagcgaaaccgcgaagttcgggaatcaggcaaaagagctgcagacaggttgttatcagattggaaacgaagatataccccaccaaataggtcgggttatagaaccaatcgacccaagcgggaaagtgttcatgcaaccacggacacagcaacaggaagaacaagttcagaacaatgttggcaatgatggagacaaacttaatggcaacaaacttaatgggccgcttcttgaaacgcagataagcaaacggaatgcacagaaaagcatcgagtgccatcactataatcatcattccgatgaaatcgggatgatcgccatattccaatagatgagagaccggttggagaaacgtcaggcagagaatggcaaatatcagtgaaatgccccctaccgaaatcagtgaattggcatatactttcaccggatcttcttccgacttattggcaaaacggaagaaaccggtctccataccgaacgtcaaaagtaccataatcaacccggcccaggcatacacattggtaaccactccgtatccgccggatgcagccggcagaactgcggtatataaaggcaccaacagatagttcaggaacctgccaaccatactactcaacccatacaaggctgtatcttttaccagggattttaatccggccatgttatttttgtgattaatagtgtttccactaatcattaaacagtgttttctgactattgtagagactgcgccccaaatgcttataggcgagttccgtcacctcacgtccgcggggagtacgcttcaggaatccctctttgatcaggaacggttcgtagacctcctcaatcgttccggcatcttcgcccagtgcagtggcaatagtcgtaagccccacgggaccacccttaaatttatcaataatagtacagagaatcttgttgtctatctcgtccagtccgtatttatcgatatttagcgcctcaagcgcatagttggctatctccgtatcgatagaaccggaccctttcacttgtgcaaaatcacgcaccctgcgcagcagcgcattggctatacgaggtgtcccgcggctgcgcgaagcaatctcacccgcagcctgagacgaacagggcacatcgagtatgccggccgaacggctgataatgttgctcagaatatcgtcatcgtaatattccagatgcaagttaataccgaaccgggcacgcagaggtgccgtcagtaatccgctccgggtagtggctcccaccaatgtaaacgggttcagatcgatctggatactacgcgccgaggggcccttgtcgatcataatatcgatccggtaatcctccatggccgaatacagatattcctccactaccggtgaaaggcggtgaatctcatcgataaacagcacgtcgttaggttcgagactggttaagacgccggccaaatcacccggtttgtcgagtaccggtccggaagttaccttaaatcctactcccagttcgttggctataatgttcgataaagtggttttacccaatccgggggggccgtgaagcaatacatggtccagtgcttctgctctcaaacgagctgccttgacaaaaatacggagattatctaccactttatcctgtccattgaagtcttcgaaactcaatggccggagggcattttcaaaatcccgctctctgctggtcagctgatgatcacgtatattaaaatcttcttccattccttttttataaataggtagcaaagatatagatttcgctacatagtaaggcagagtttcacagagtttttcctttacgaagtacgtttaagctttgtttaggctaagacaagcccaaaggttcctccgacaaatctgccgttctttattgtctgactccggacagctgatctctttcgctgcaccggaacttatatcccgtacaaagttttccaacggttctctcccggaagcagttcaagccaatggttcttctgtcggacattttcattacacaccgacctcacttccggttctgaaagcccatttctcctccgttcaatgcggatcatcgctccatatacaacttccgctcctcgtccgtgagcttctctatggaataacgcagcatagtgcggggcatcactttgctatatttatccagaaactgcaacagcagggtcttgtcccgctttcccatttcacgcagcatccagcctatagccttccgcatcaagtcatgtttgtgttgcagcaacaattccgaaagacggagaatatcgatgaaatcgttattccggatgaaggtaaccgtagatacgacagcaatacgctgatcccacagcagagtactttccgccagccgataaagatcatcacgcgacttatcctttaggtattcacccacaatatatggtgccgacaggtccacaaggtcccaattatttatgcgctccgtctgcgacagataaaaacggtagatcgcttcccgctcctctccaccacttttcttaaaccgctccaccatcatcagtaatgcacataagcgacattcatgccattcggattgtaaaagctccgccatcacctcaaaaggcgcgttcttatacttcttcgctacaagccgggttgcaggaaccactattccaagaaaccggtcgccttcaccatattgccccttgccggttttaaagaatccgggaagatattccctttttaccggatcaatataagtctccagttctttttgaatttctatcgctttcatcgggatatttgagtctacaaagttatatacggacaaaaatagtcaaaaaagccgcaatgagtggaaacatattcttaattttgtaggaaaattaacgggcatatttatggttttaaattacatctggatcgcattcttcgtgattgctttcgtagttgccgtctgcaaacttttgttcttcggcgatacccaaatattcacagagatcatcaactccaccttcgattcatctaaaacggcattcgaaatctctctcggcctgacaggtgtgttgtcgctttggctcggtgtaatgaagattggcgagaacagcggcctgattaatgccctttcacgctggctgagtccggtcttctgccgcttgtttccggacattccgaaaggacatccggtcatgggatctattttcatgaatatgtccgccaatatgctggggcttgacaatgctgccactcccatgggactgaaagctatgaaagagctgcaagaattgaatccgaaaaaagacacagccagcaacccgatgattatgttcctggtgattaacacttcgggactgatcattatcccgatcagcatcatggtctaccgggctcaaatgggagcggcccaacctacagacatcttcatccctatcctgctaagcaccttcatctctacactcgtaggagtcattgccgtcagcatctcccaacgcatcaacctgataaacaaagctatattgacactaatgggttgcctgagccttttcttcggcggaattatctatctgacaactacactttcccgtgaagagatgggagtttattccactctgattgctaatgtaatcttattctcggtcattttactgttcattatagcaggtatccggaaaaaaatcaatgtgtacgactcctttgtcgaaggagccaaagagggattcaccactgcggtccggatcatcccctatctagtggcttttctcgttggaatcgctgttttccgcacttcgggtgccatggatatactggtcggcggcattggggcaatcgtagaattttgcggactggacaccggctttgtgggagcactgccaacggccttaatgaagtcactgagcggcagcggtgccaatggcctgatgatcgacaccatgaaacagtttggacccgattcatttgtcggacgtgtcagttgtgtcgttcgcggtgcatcggacaccaccttctatattttagcagtatattttggaagcgtaggcatcacaaaaacacgtaatgcggtcacgtgcggactgattgccgactttgccggaattattgcagccattttaatcagttacttatttttcttttaaaaagaacatcaacaagaattaggtatccaagggctatcaccggcagaaatccgtaacgacagttcggcagtattgggatggttgaaagtaccggagtgtctaaagtagtcattcacttagagatattccatcaaagagctattatgacagttgacttcacaaactttaccatgttctgcatacaccaaaaattctaatgttaacttctccaaagactctgacaactagagtctagaaaaagtatacctaaaaaatccactaaaggaagacagattattctgataataaacatcttacattataaaatcttgtttcaaaagacgtacgtctgatgcaacaaagataagacgctttttttgtctgtgcaaacatttctgcatcgttgtaacagtcagtcatttatctcttttacgtatattctgtgcgagaactaaagattgcgtttcaaaagacgtacgttttttgaaacacaattgtgtattcaagaccgtcatatctgattgtaatacacaaacttacgcataataaaagtggtatcaaacagcctttccggacttatacaaagatgtataggtccacaatgcgtctttgatacgattattcactttaatatcatagtatatgaatagaacttttattatgcgagagtatctcggtaaagccttatggctgtgtttttgcctttcgatagcaggatgtgccgaagatgacagaatgactcccctgtctgctgacagcggggatactgccgacgagttaattcctatccatatcagtctgacgggtgacaacgactatcattcttcttcttttaacgacgcttcgacccgtagccactctcctctgatcgctgaatgggtgggagtaaaagctttctcccctacacgcacaggagagcaaccggactatgacggtccccggatagcctcgatggaactgacggaagataccctaccccgtgtaagtacccgtgcaacagtgcctgcgggagtctatttccggctgattgttttccggaagtccggaagtgactatgtcttccagtcggctgccgattacgcctccaatggtacgggcactcctgtactcaaacaggggaaactgctgacacgctccggaacgatacgtgtggtgggctactcctttaataccactacagctgccgacttgggagatatgccttccacgtatgcctacaacagcagtacagtgtctatccctaacatgagcaaggacttcatgaccttcgattccggagatataacgaatgtaaacagcctcagccacaaccttccggtgagtttcaatcagaagttgtgcaaactgacaattaccatcagtcctaccggatttccaagcaatacaatcaccaattgcacgggtgtatatgtaaagcaagggggaaactccacatcatggaagatcggcccttcgaccaatgtggtagccgccaacacgaataatacggcggcattcagtccgaagacgactctgagtacaaccatacgcatggttccgtttgcaggggccaggaccattacagtgcatttcaatacgctgacaataagcggacggactgtgcccaacaatacggaaatcacctccacccaaagcgtgcaactgaaagagggaaaaagctatacgatgaaaatacagttcaaaaaagccatcggaattaatgtacccgcaagtaacattaatcttacgcaaaatgggtgtacagaaaacgacaaaaccatcttatcaaaactccgatgggctgaaggtaatctcaattcccaaagcaactataatctgacatgggcttcttctactaccgattacggttattattatatatggaagaatgtatatgtatcatctgggtatacaggctatggtgctgttgatccttgtacacgtcttgacgaaagtaaatacggtagtggttggcgtactccaacaagaagtgaattcataagtctctcccgctgtagcaacaagcaattggtaaagtataacggtatccaaggtatgtggtttatgaatagctcgaccggtctatttttgcctgctgcaggctggcgagatggcaacaatggcagtggtactactgctaccgcttataccgatggtacagacagctactactggagtagtgacctcaacggtaattcagcctatggtctttatatccttaaaaatgacgtcttcgtagacgctaacggtaacaggaagtccggtgtttctgtccgatgtgttcacaatctctagcgagtttgccagatgaagtcagaagccagtaagcctgacaccttaaagaacgggctttctaggcctgccacaaacacccatactacgggatattcagtaaatgtctttaaaaagtaagatggcatatgaagatgacttgctaatatcatctcatatgccatttttattatagtttctctctctgacctaaaatcttatccgtttgggcatgatgttccggaagaagcctgacaacttcttctaatagattctttataatcatactatgcggtttccctctgtctgtttttgattttgtcaatcattaatatggcgtttaccgtatgtattccaaagaaaatccacaggatttctatttccctgttccgtgccttgatttttgatagcgagtaatgctgtttttgcgtaccgaaattgccttcgaacccggtagctcttcccttgcgtacaaaggatgttgatatcccatatactttccagtatttatctgattgataaacagtaattgagaaataacaagttgtcgatagcgatttgacaaaagtcagacagcattaatattccgtactttgcatacctcgtaagttttcaccatcagaccaatgatttggaaatggtgtgattcaaattatatgtgcgcttaaaactaaacataagatcctcgtaccactaatcagtttgagtgatgtcgtcttccaatttcccatcttccgagagtatttctttgccatttttctctacaacaagagtgatgtccgcgatccccgacgcggctattttattatggaacaccttgtattcatagatattatttttaaatgtaatcacgtgatttcctccacttccactaaattctatttttccattttccaagactaaatccggcttggtcgattctgggttctcttttttccaacaggcataccggtacatgccgtttttcagttcatctatccttataaaataattttttgtcttaaatttatatacttcccctttgaagttatgtcgcaaatccgaggataggtcaccttttactttggaggtaagcttcttggcaagctttttctcgtatttgctttgataattcacggctgtaatttttccgtcgtaatccatccaaagtatgccatcgtccagcattattcctctccatcccatttccgaccattgatcaatatccgaactcgtaataatacggattaagtcttcatcgaagattgaatcgaatctttctttcaattcctctgcattctcaacactcggtataggggatgttctcttcaacggataaactatattttcggatatttcgtcgacagctttttgccgaaacatttttttgagatattcgatgttttgtatattaggattccgctcatcgttacgttgtacattcttttgcatcgtatcaattttggatatcgaccaaacgaccgctttgctaccgccttgtccctctgccttgtaaccgtacgctgaaagtccgatgaaactgaacagggaaatcaaaatatacggtattactttttcctttattactattttcattgattcggttattctttttaaacgatttatattttatcttcgggtgctacaaaaacgacttgatcagtactgttaagtaacaatcttccaaaagttgctcttagcttccgtattttgcttatctaaaaggctttctatctcatttatcctcggggtactactctttatgcaatttttctccttaggaattcctgatcgtttttgataagggcattcagacattcaataacatcctctttcgtttgaccagtgatctcactgacataatcctccacgaccgtttgcggtttacgaaaaaactgcttcttcaccacgcttatgggacgtttgtaaaaaatataaaactcaggatcttccggatcgccgacagcagagatcgtaagcccgtttttattcgctttattctccacttccagcgagggagaaaaataaatgtccattttcctcgtttcagcgacttctatctgctttaaataatagtcccactgaaaatcattgaacaacccgataacggagtcaggggctatcattcctttttctatcactttcggattaagtggttcgcaaatactgtatctgaactctgtcatagtattgtatgtaatagtaatatccgacctggataattgtcatttgcaaatatataaaaaacaaaatagttacggtctcaaaagatagtattcttcttgtgcaataatactctgaccggacaagctgtccaatttgacatttcacgattttcctctatatcacttctgcttttcggagcttcggttatattggcaaacaaatagtgtctgaaaatcatagaaatcagttctttgaaaacgatcctaaccactaccaacccaaggaagtaacggaacagtgtagtttaaaccgctattcatcagccttattactgcaatttgcgcttatcctcaattaaaattcttatctttgtctttgaaaaaaagaaatacttttttttaaagtacatcggaagcatggtaactctcccgaaaactgcgtattccgatcattattaaaaatcaaataatatggctataacttatcagacagagggtatcaaaatgcccgatatcaaaaaacgtgagactaccgaatggatcaaagccgtagccgccacttatgaaaaaagaatcggtgaaatcgcctatattttctgttcggacgaaaaaatattggaagtgaaccgccaatatcttcaacacgattactatacagatatcatcacttttgactattgcgagggcaatcgtctttcaggtgatttattcattagcctggaaacagtgaagactaactcggaacagttcaacactccttatgaagaagaactccaccggacaattattcacggtatactccacctttgcggaatcaacgataagggtcctggagaacgtgaaattatggaagctgcagagaataaggcactagctatgagaaagcagtaattctccctcaaataaaagatgggataggaatcatgcatggcaatcattccatcccatctttatagttaaatatagagcctgtcagaaattaattcttctcctttgggactgattgagcacggactgcataaaaccgtgttacgaactggcttcgcagaccaaagaaacggataagaagaagacaagacagcccattgtttaggttattttccaaacgcagatttcgacaaaggaatataaacagagaactgccagtttgagaaacggctatcctaaaaggcgaaatcttattattctaattgtgtcagagaaaaaacatcaaatgaattaccggtcccttggaaatgcaaaacaactttccgcttatttcccgttaaatttctgtcacagttgagagtcatttcttttccattaacctctaattgataccatcctccctgatattcaacgccattaatctcgcctatactgaaaatagtatcctgatttagaatctcttctgtctgtacaagtataaacttctctcttccttctacagtaatatctcctccttccgcattcagagtcacttccctactcttcagaaaattagaagaatatttatcagaatcatcattgcatccataaatacataataaagaaatgcaatacaaaaagaatacctttttcataattataagtttatattttaccacaaaatttcagttcccatcgcttcatgaaaatagatgtaatcattttcagtataaaaattaccattcggtgaatttttatcattagttggattattgccatcttgagaagcgctattagcgggtctattataagccccatccttaatagcataccagccattattagctctattccatccaaaattacaatgaattgcctttacctgtatattcgtgcagccaatcatcatatttccagaatattcaaaaactccaccatcaactagccaaacatgtcctgtactctttttcttctttcccccaaagataacaacattcttagttataagacacttatacaataaattcttatcaacgtcattcgttttatgcctttcaacgttatatccccatcctttcaagaagtcattggttgaacctaaattttttgctcctgttccatcacatttataaccgaccttaataccatccgccaccttttttacaaattgagatacaggagctattagattagtatcgtatattccagtatttacagtaaatgcatcccaatcataagcaaccgggcattttctataataagtaatcgcctgagcaactgcaataggaatacaacccgcataataataacttatagagcactttccgtttgtcggcatttgtgcattataaggataatgttgattccattcagtctttaccaatggtatagaaacatgtgtcgttctttgttcaccgcttcttgttaaattcggattcaactgatcctgttttataatatccggaatctgactaacgagataagccataccttcattttctatagtatctgacaagattccattttccacataagcataaactcttcctacttcagcttttccggtggctattgcaaatccaaatcgtccatccttttccgtatcaaatatgaacatattcacactatccgtacttatctcaccagttcttgtagctattttcggtataacaacagatttcttaccggctaaagataatataatttgtgaagtactacttctcgtaccacctttctccttatctattctctcactgaattgacatatcaagtcttcggctcttttatactcagatacatcctctaaatcgctattattcaaaatgatttcttcgtcattctcaatacatccactaagtataactaataacaatattaatttaaatatttctttcatctcgtattattttgagtttctaattaaaatcaattttaccttccaatataaatgtcaaaactatcagaatccctttccaaaaagatagagaaagaagtacctgttatagtatcatcaaaaacagtctgccctgtttcggaatcaacaacctgtatctttctattttctaaggaggaattaaaatttaaaaatagttggctctcttcaatataaccacaagcaacaagtagagtacttctctgcagatttgcctccttatgagtaatcaaatgtaccttatgtctatctttcataatagccattacatcctctccataaacattattagacgtgaatactatttgtgtaaacagcatccccactaatacaatcatctttgttttcattgttatgtgtttttttatttcaaaagcaaagttaccacatttcttcttctaaaaagaagaaaagagataacatcttaaacattgtaaatagcagattaacagatataaagcaatggggtatgataacatttatgtccaccaatactctaaaaaactaaagagggcttgttcaattggcttcagccatttttttctttaatcgtaaacgccgctgcgctacaatttgcttgcttacattaccaaaacaataagctatggtttgatcatcaaattcacaaagtttcaagcaacaataaatacagtcattatctgttattttaggataagtacccttaaggtatcgaatataatcatcataaataccaaacaatatgtttttcaattgttcctgttctttcataagaagaactttcggactcccctttgttccattttgtcccaacctgggttgagtgcttagttctcgaatatgcttaaaaatagaagtttccataaacaaacagttacgcaatcgtgctttttcatcaataacacagcataattctgcttgtttcaaatctatttcctgttcacgctccatgccagactgctttaaagcagaaatttgaacttccaaacgttctatttgtaattgagataaggctgttttctcatttaaataagttatacgctgttcgtacagtaatcgagctatttgacgacgccgataaatacgttgaaaaattatagcaataaccagcagaaacaaaactcctccataacaaagttgctgaatgaaaaacctctgcttttccttttcctttactacttttgcttctgaatcatatttatacgctaagcgctcaatatcggaggctttatttaacaaaaaaatagaatctatattatcaccataataagactgatattcaaaggcccgttgataattacccctaatcttctcgacttcagccaaagaatacgacgctagaatcttccttttaaaatcagcagtatcaagtatacgctttaaataatattcagcagagtctagttcttgcttgtctaaatacaaatcaccaaatgttaaccataaactaatagagtcgccatcctttgtcaaatattgatgtgacaaatgggcatataggaaagcagaatcgacattctcacaattcaaactcattcgttcatatatatcactaacaaaagctgaatcattcaatctcaaagctaattgtatagattggttcaaataataaaaagcttctaccgtttttccttgaatcacacgcacccaccccatatttgacaaaggatacattaccaatctatggtcattcagtaaagaatcacattgataagagcgataaaacgcatcaaacgctttctgataaagagattgatgtaaataaatcgatcccatatcttcatatagcattcctttcagttttaattcctccccggtatttccttcaactccctgcagagcagtaaagcaactcttcaaagcctgttcagtcatattcatttttttttgaatccggcctttataaagccaagctttagccaaattgacaccatcttttttaatataataatctaatgcagtatcaatcaaagagtcacatggaagaagagaaagcatatttttatcagtagcctgcgtgaacagtaagctaaagtatgccctgtcacccgctgaataagtagaaacatcaagtttacgaagataagccaacgtacgttcaggagatatctccatcaaagaatcggcatatctcaaagaatacggatacggtgacgaggaacgttgacaagaaactactccgcccactaaaaacaataaaaagataaaaccgacaaatgtcttattcataattaaaatactttatgatgacaaacttacgattcttttcagccacttccaaatttttcaaaggaagacaactgtctatctgtcattctgtattttcaaaccgttctaaaacgctctatttccgaccaaccggaagactcattaaaaaaaatgcctgtatttcgattttcgtaatatcaataaaacaataatttgccatttacacgaacaatatattcgatataaacgtagaataatgacattgttaaaaacaaaaagtacaaattcaacacattaagacacacaaaagcaaaagcacttttgatatattctggaaatgaaaaaggtattttataggatagcaaacaactctttaaggataaaagctaattccccccaacccaaaacgcacttcgtgccaacaggatgttaacttcatatttggaaagaattaatatcctctcgacagaaggttaacttcacagaagtatgaagttaacttcatttggtcatctatgacaaaagatgcataaaatacctcggaacccggtctattaagaacattctatttacaattcaagttttcaaaatactcaagttacaaacattatgtaagtaagtgcccccgatcagccgcttattgacaaaacaatcctgcaattggcgatccctataaacccttaaaacttattgcataaaacccgcaactggcaactttttcgtaactttgcgcggttaagaaataaacattgattcaatggattttaagtacgacgttattgtaattggtgccggacatgcaggctgcgaagcagcagcagcggcagcaaacttaggctcaaaaacctgcttgatcactatggatatgaacaaggtagcgcaaatgagctgtaaccccgccgtaggagggattgctaaaggacaaattgtacgtgagatagacgctttaggcggatatatgggattggtaacagatcagacagctatccagttccgcatactaaaccgctcgaaaggaccggccatgtggagtccccgcgcccaatgtgaccgaaacaagtttatctgggcctggcgcgaaatattagaaaatatcccgaaccttcatatctggcaagatactgtaaaggaaatcatcgttgaaaacggtgaagttgtgggattaaaaacattttgggatgtgacgtttcacgccagatgtattgtattaacagcaggaaccttcttgaacggattgatgcatgtaggaaaaactcaactcccaggtggacgcatggcagaaccggcatcgtataaattaaccgaatccatcgcagaacatggcattgagtacggtcggatgaaaaccggaacccccgtacggattgacggaagaagtgtacactatgagctgatggatacccaagatggagaatgtgactttcacaagttttcattcatgaataccagcgtgcgtcaccttaagcaattgcaatgctggacatgctttactaatgaagaagcacataatgttcttcgtaacggattagcggattctccccttttcaacggacaaatacaaagtatcggcccgcgctattgccctagcatcgaaacgaagatcgtcaccttccccgacaaagagcaacaccagctattccttgaaccggaaggagaaaccacacaagaattatacctgaatggattctcttcttcattgccaatggagatccaaatagaagcactaaaaaagatccctgcttttaaagacctggtgatttatcgtccgggatatgccatcgaatacgattatttcgatccaacgcaactaaaacatacgctggaatcgaagaaaatcaaaaacctcttcttcgccggacaagtaaatggtactaccggatatgaagaagcaggaggacaaggtatcattgcaggtatcaatgctcacatcaactgccacggtggagaacctttcactttagcaagagacgaggcatatatcggcgtattaatagacgacttggtgaccaaaggggtagatgagccttatcgtatgtttacttcacgagcagaatatcgtattctacttcgtatggatgatgcggacatgcgacttacagaaagagcctataaactgggattagtaaaagaagaccgctatgctctattaaagagtaaaagagaagcagtcgaaaatatcgtaaactttacccgcaattattcgatcaaggcagcattaataaacgatgcacttgagaatttaggaacgactcccctgcgtcaaggatgcaaactgatcgacttgattaaccgtccacagattacaatagaaaatatctccgaatatgtaccggcatttaaacgggaactggataaaatcacagatgaacgaaaagaagagattctggaggccgctgagattttaatcaaatatgaaggctatattggacgggaaagaattatagcagacaaactggcacgattggaaagtattaaaataaaaggtaagttcgactatgacagccttcaatcactttcgaccgaagcccggcaaaaactgaagaagatcgaccccgaaacaatagctcaggcaagccgcatccccggcgtgtcaccaagcgacatcaatgtattattggtgctttcgggacgatagactgctgcgtttcacgtgaaacaaaacatttaaagaaacaacataaaagaatgattatgagcaaagaaaagcttatcagaagcatccgtgagatacccgattttccaatccccggaatcctgttctacgatgtaaccacactattcaaagattcggaacgtcttcaggaactttcggatattatgtacgaaatgtacaaggataaaggaatcaccaaggtagtaggcatcgaatcgagaggcttcattatgggaccgattcttgccacccgcttaggcgcaggatttatccccatccgtaaacccggcaaactccctgccgaaacaatggaagaaagctacgataaagaatatggcaaagacaccgtgcagatacacaaagatgcattgaacgagaacgacgtcgtattactgcacgatgacttactggctaccggaggtactatgaaagccgcctgcaacctcgtgaaaaagctccatccgaaaaaggtatacgtaaacttcatcattgagttaaaggaactgaacggaaaacaagtatttgaaaatgaccaagacgtagatatacaatcagtattgtcgttataaataaaatgaatatatttgcagggcatagcgataatcgctatgcccttttttcatggatacaaatcaagaacttaaaaccagcgaatatctaaaaggaattgtttcaaatcttcctgagaggcccggcatttatcaatatctgaatgcagagggaactatcatctatgtagggaaagccaaaaacctgaagcggagagtctactcctatttcagcaaagagcatcaacccggaaaaacccgggtattggtaagcaagattgcagacatacgttatatcgtggtaaactcagaagaagatgcactactgcttgagaacaacctaatcaaaaaatataagccgcgttacaatgtcttgctaaaagacgacaaaacctatccgtccatctgcgtacaaaacgaatattttccaagagtattcaagaccaggcgtattatccgaaacggctcttcgtactatggaccgtacagccatagcccatccatgcacgcagtgctcgatttaataaaacacttataccctctgcgtacatgcaacctcaacctctcaccggagaatatccgtgcgggaaagttcaatgtatgccttgaatatcacataaagaactgcgccggcccgtgtatcggcctgcaatcacaggaagaatatctaaaaaatattgccgagataaaagagatcctgaaagggaatacccaggagataagcagattgttataccagcgcatgcaggaccttgccgcagaaatgaaattcgaagaagcgcaaaaggtgaaagaaaagtatgcattaatcgaaaattatcgttcaaagtccgaggttgtcagctccgtattacacaatatagatgtattttccatcgaagaagacggcgaaaagtcagccttcatcaactatctgcatatcacaaacggagccattaaccaagctttcactttcgaatacaagaagaaactgaatgaaacaaaagaggaattgctgacactgggaattatagaaatgcgggaacgctacaagagcgcttcacgcgaaatcatcgtcccgtttgacatcgagatagaactgaatgatgtcactttcaccattcctcaacgaggagacaaaaagaagctgttggaattatctctactcaacgtgaaacagtacaaagcagacaggatgaagcaagccgaaaagttgaatccggaacagcgtagcatgcgcctgatgaaagagattcaacaggaattacacttggacagactgcctatgcagatagaatgttttgataactcaaacatccagggaacagatgcagtagcagcttgtgttgtttttaaaaaggcgaaaccatcgaaaagcgattatcggaaatacaacatcaaaacggttgtgggcgctgatgattacgcctcaatgaaagaggtcgtcaggaggcgttatcagcgcgctatagaagaagaatcccccctgcccgacctgattatcaccgatggcggaaaagggcaaatggaggtggtcagacaagtaatggaagagttacagttagatattccgattgcaggactcgccaaggatcgcaaacaccgtacatctgaagttcttttcgggtttccacctcaaaccatcggcatcaaacaacatagccccctattccgcctattggaacagatacaagatgaagtacatcgctttgccattaccttccacagggataaacgaagcaaacgacaagtagcatctgccctggacaatatcaaaggaattggcgagaaaaccaaaaccgccctgctgaaagagttcaagagcgtaaaacgtatcaaagaagccaccatagaagaagtgtccgccataataggtgaatcaaaggcaaaaatcataaaagagggtctcgataatcattaaaaatagctatctttgcaataacaaagattaagcaatataattcgaatgagagtagttatacaacgcgtcagccacgcatcagtcacgattgacgggcactgcaaatcggctattcagaaaggaatgatgatcctggtaggcatcgaagagacggacagccgggaggatatcgattggttatgcaagaaaatcgtaaatctccgtatttttgacgacgaaaacggagttatgaataaatcaatccttgaagacgaaggtaacatattggttattagtcaattcacactacatgcgtctactaaaaaaggaaatcgtccatcctacataaaggctgctaaaccggaaatttcaatcccactttacgaacaattctgcaaagatttgagttgtgcattagggaaagaagtgaaaacaggagaattcggagccgacatgaaagtagagttattgaacgacggacctgtaactatttgcatcgataccaaaaacaaggaataatgacattagaagaagcacagaaagccgttgatgaatggatacacaaatacggtgtacgttatttcagcgaattgaccaacatggcagttctcaccgaagaagtaggcgaactggcacgtatcatggcccgtaaatatggagaccaatctttcaaggaaggtgaaaaagacgatatcagcgacgagataacggacgtactctgggtactcctttgcatcgcaaaccagaccggggtaaacctcacagaagcatttgcacgaaatctggaaaagaaaacccaaagagacaacaaaagacatatcaataatccaaaactgagtgaacatggaaatgaatgatacccctcaagacaagtacctgaccgcattggccaagtatgacacgcaactgaatgatgctgatgtacaggttcaggttgctgcattaatcgagaaaaaggttcccgaaaacaatacggaagaagtgaagaaattccttttcaactgtattgacctgaccactctcaatacaacagacagtgatgaaagtgtcatgagattcacagaaaaagtaaatcggtttgatgatgaattccctgacctgaagaacgttgcagctatctgtgtatatccgaattttgcacaagtagtaaaagacacacttgaggtagaaggtataaacattgcctgtgtatcaggaggctttccctcttctcagacatttaccgaagtaaagatagcagaaacagctatggcattggctgacggagccgatgaaatagatatcgtaattcccgtaggggcatttctgagtggcgactacgaaacgatgtgtgaagaaatcatggaattaaaagagacttgcaaagaacaccatctgaaagtaatcctcgaaacaggcgctttaaagactgcctctaacattaaaaaagcctctatcctatccatgtattccggagccgatttcatcaaaacatccaccggaaaacagcaaccggcagcaaccccggaagcagcttatgtaatgtgccaagctatcaaagagtactacgaacagacaggaaacaaagtcggtttcaaacctgcaggcggcatcaataccgtaaacgatgcattgatttattataccatcgtaaaagaagtattgggtaaagaatggctcagcaacgagctgtttcgcttaggaaccagccgtttggctaatcttcttttatctgaaattaaaggtgaagagctgaaatttttctaaaggctacattagcaatcaaatatgtcatgccgtgtcgtcctctttattcatgtggggtgacacggtatttttatttaagaaaaactaaagttagctacagagaagtcagaagatttttctatctttgcgcagatattagcccacagagaataggctaattcattgtattagagaacgtttcaattattatctttttcctggaattcggcaaaattcatgttatgaaaggtaataagcaaacgggtctcacgcaccttcacgtatatactcttgttatatatcgaatggagcgtgagactgttgcttgtatcatcataacggcttgccgaagccccaggaaagatacagagcaacagttctcacgcttttcggttaacaaagaattaaaataaacaagagtatggcagaacaagcattatttcaaccattcaaccggaaccaacaaagggagaatttagagagcacaaaagaaacgggtctactaatcagcctgattcccagtttacaggaagacttctacgtagacagcctgacaaccggagcaagcaaagaaaccctatccaaacttcttttaagaaaccccggaatcaaaaatgaaacggctgttattgaaatgattcatttcctgcatgatgaaggtgaccgcatttcattcagcattctcctaccctttttagtggccgaatatgatccgaaagaactggaagaaaagatacgcgaacgttttttcggcatagaacttttcatccgcaaatgcaataatctgcaccatttcatcacttgtataaaagccgatcaaaccatcaaaataggagaagaggagctaaaaagaggggtacttgcatgggatatgggaagaatggtgtgcctgacacgcatagcttatgatgcgggatttatagatgaaagccttgcatggaactatatttgctcggccggacaacaatgcatacaagcttttaatgattggactgaggtaggaaaaagtttcttattaggacaggcaatggaagctactgaaaaaaggaagcaggaactatacatccgtctttaccgtcaggccacagagaacccaaacagtccatggaaaaagagaacactgaaataaataagaaacttatttatcacgatcgaccacataatccaagtaggtaatcaaggaggtctttactgccgaatccggcaaagtgcgcaataggtcaagagcacgctctttgtattcatacatcactttcacagcatattctattcccccgttttgcttgataaactcgattaaacgggtgatttcgtctactgtagcggtaccggcttttaccctaagggccatttcctgagcccacgcatcagtcgtggtattcagtacatataaagcaggtagagtaagcttaccttccagcatatcatttccggtcggttttccaatctccttactctcaaaataatcgaatatatcgtctttaatctgaaagcaaattccgatgttctcaccaaaaagacgtgcaaattcagccttttcatcggtaacttctactgaaagagcagcagctttagtgcatgcggcaaaaagggcagccgtcttcttacggatcacatcaaagtaaatagtttcagagtattcccggttactgacattagagagttgaagtatctccccttctgccaaatcttgtcccaaacacgctaccacaccgattatatcatgattacgagtacgttcggcatgcaccagacttgttgccaaaagaaaatcgcctaccagcactgctactttattattaaaaatagcattcactgataactgtccgcgacgttctgtactttcgtctaccacatcgtcgtgcaccagacttgccgtatgaagaagttcaagggatactgccgcatgtaatgtctcaggctttatttctccgtaaagctttgctacaagcaacacaaggatagggcgcatcatcttaccattcctctgccggatgtgagcaatcacattattaagcaaaagatttgaactggacagagaactatcaaatagatttttgaaatcttccagctccgtagtaatcggggactttattaaagataagctatccatgcacacactatttgagcacaaaagtaataataaaacggttaatacggtatttttttgtacttttaccatgaaaaaactgaaaaatatgaatcaaaacagcaaactattcctcttggatgcttatgctcttatctatcgggcgtactatgcgttcattaaaaatccccgcattaattccaagggttttaatacttcagccatactgggattcgtcaacaccctggaagaggtgctgaagaaagagaaccccacccacattggagttgcattcgatccaccgggacccacattccgccacgaagcttttgaacagtacaaagctcaacgagaagaaactccggaagcaatccgtctttcggtacctattataaaagatattatcaaggcttacagaatccccatcctggaggtagcgggatatgaagcggacgatgtaatcggaactctcgcaacagaagccggcaatcagggtatcactacttatatgatgactcctgacaaggactatggtcagttggtaacggatcatgtatttatgtatcgccccaaatatggagacaaagaatttgaagttatgggggtagaacaagtaaaagctaaattcgatattcaatcaccggcacaagtgatagatatgctcggactgatgggcgactcttccgataatattccggggtgtccgggtgtgggagaaaaaactgcccaaaaattaattgccgagtttgggagtatagaaaatctgcttgaacataccgatcagttgaaaggagcactgaagacaaaagtcgagacgaatcgggaaatgattattttctccaaattcctggcaacaatcaaagtggatgtacctatccggcttgatatgaactcactcgtccgggaacaagcagatgaggacacgttgcgtaaaatatttgaagagctggaattccgcacattgatggaacggatattcaaaaaagaatcatcacctgcctcccctatcgccggtacattatttaatcaggaaaacggcccagttcaaggcaatctctttgaagaatttacgcccgatcatacgaatgaagaaaaaaaatcaaatctggaaagcttaaattcattaagctacgactaccaattaattgatacagaggagaaaagaaacgaaattattaaaaaactacttacatccgaaattcttgcgttagatacggaaaccaccggaacggatccaatggatgcagaattggttggaatgagttttagtattaccgaaaatcaggcattttacgttccggtacctgccgaacgggaagaggcaatcaaaatcgttcgggagttcgaacctgtcttcaaaaacgagaagtcactcaaggtcggtcagaatataaagtacgacatgctcgttctgcaaaactatgggattgaagtccgaggtaaactcttcgataccatggtagcacattatgtcctccaacccgaactccgtcataacatggattatctggctgaaatctatctgcattatcaaaccatacatattgaagagttaatagggccaaaaggcaaagggcagaaaaatatgcgcgacctctcccctcaagaagtttatctgtacgcctgcgaagatgcagacgttacactaaaacttaaaaatatactggaacaggaattaaagaaaaatgatgccgagaagttattctatgaaatcgaaatgcctctggtccctgttcttgtcaatatcgagagcaacggagtgcgtttagatacggaggctctgaaacaatcgtcagaacacttcactacgagactgcaaagtatcgaaaaagaaatttatactctcgccgaaggagaattcaacattgcatctcccaaacaggtaggagagatactttttgataaattgaaaatagtagagaaagctaaaaaaacaaaaaccggacagtacgtcacctcagaagaggtattggagagcttgcgaaataagcacgatattatcggtaagattttggaataccggggacttaagaaactattaagtacttatatcgacgctctgccgcaattgatcaatcccaaaaccggacgtatacacacctcctttaaccagaccgttaccgcaacaggaagattgagttcaagtaaccctaacctgcagaatatcccgattcgggacgaagacggtaaagagatacgcaaagcttttattccggatgatggttgcagtttcttctccgccgactattcacagattgagctacgcataatggcacacctgagtgaagataaaaacatgatcgatgctttcctcagtggctatgatattcatgcggctacagctgccaagatttataaggtagatataaaagaggttaccgccgatatgcgccgtaaggccaagactgccaatttcggcattatctacggtatctccgtatttggcctggcggaacgcatgaatgtcgaccgcaaagaagccaaagagctgatagacggttattttgaaacctatccgcaagtaaaatcctatatggacaagagtatccaggtggcacgcgagcacggttatgtggaaacgattttccatcgcaaacgctttttaccggatattaactcccgtaatgccgtagtacgcggatacgcagagcgaaatgccatcaatgctccgatacagggaagcgcagctgacataatcaaagttgctatggcacgtatttatgaacgtttcaaagcagaaggcctgaaagcaaaaatgattttgcaagtacacgatgagctgaatttcagtgtaccggcaaaagagaaagaaatagtagagcaagtggttattgaggaaatggagaaagcctaccgtatgcatgttcccttaaaagcagattgcggatggggtacaaactggctggaggcacattgataacaatcattaaccattcgtacagaaagctatgaaagatccatctaaaaatgcttactgtttatataaatatccggcaaacaatctgccggatatctttttgtcagcatacttatcaaaaagaaagtaactcaaaggtcctaacactgacaatatgataaaattctttcaattttatgcatttatatccgtttaatatgtaactttgccaccgttaaagccaacaaatggtagaaatatgacaatttaaagacttaaaaacagatatcatgaaaacaacaggatttttaaaaacagtagcattgtcagcagttcttttggtaagcagcgttgcagtttccgcccggaactatgataacaatcttatttataactccgaagaagaaaacggcatgttaataggacaaaccgtttataagaaagaaggttcttccctagccaattatatgaaatataactataaatacgatgacaataaacgcatgattgaaagtcagactatgaaatggaacagcaataaaaataattgggagaacgatttgctggttcgctatacgtacgaaggcaaaaccattaccacaaactattataaatggaataaccggaaaagtgaatttatactggctccggagatgaccgttacaatggataaccctaatctataatctccaaacactttactctttcttaaagatctaacacattaaatactctaaaaaagaccgttgctaacagcttcggtctttttttgtgtcacgtgaaacataaagaagaaataaaaaagattatttgagataacaacatcataaaatagccggagttttttcacaaaaagctccggctttacccaaccagttaactatcaagagagttgtttaattgtttaacactgttcatctcagttgtttttaagagtaatcgtacctcacaaagatacaatcaaagtaaaagcataacaacccttttttatctgaaagccgattatatggttacagtcagagtataagcggtaaaataagagtctatccgacagaaaaacttcaaattatacaaaagcgttcttgtagttctttcaagaatccgcgtgaaataatcaagtcttctttatcactaaaaggaggatagagtaagcactgtttgctctttatcattgccagataattgatgttgataatagccgactgactgatttgtacaaatacgtcggaatagccgattatatcaccggcagtcgtatttttcttcagacaaagtttcgtttgattaaaaagttccacttgccacagcctcttatctttcagatattcaaaataacctatttcttcaagacgaagaaatctaaatcccgttactgtactaatcataaacaaatctctaccgggcatcaaagtacccacagcagaagcaaaagaaggcagaggctgagcagaaaccatcgtcttgcggtaacgttcaataatcaaattcagttcttctatatcataaggcttcagtaaataatcaaaagccgattcgcgcaaggcctgcaacagatatttatcataggcagtatagaaaacgactttcatatcccacaacacctgttcacgaatctcactaagcaaacggattccctgaatatcgggcaactctatgtccaggaacaaaagatcgggatgtatatccataataagtttcttcccttttgccccattgccggcagtcccttttatttccagatcagcctgcacctccagatcccggcgtaaggtctcaatagccgccttctcatcatctataatgatcaccttatacataatttcctatctttataaattgtaagaataatccaatggtatatagattagaacttgtgttccggtctgtccattattcaccagattcttgatttcaaaacgtattttctcgcgattcttatcattcaatagctgaatagtctgataaagcactttcaaccctgttcctgttccacgtgtagatgataaagtttgtggagaatatccacgtccattatcgcaaatatcaataaggattccacttccctttcggcaaacagatataccaagtaacttcaaaccgtcaattccggccaatccatgtttcaatgcattctccaccggtatctgtactaccattgaaggaatgacaacctgctgaatatccaagtcttcctcgatcttcacatccattgaaaaatcacttccgagacgtccttgctcaagatggatgtaagtcttcacaaattccagttcatcataaagagaaatactgagtttctctgtcaattccaagctcttacgaagtagtttcaccaattctgtcagatcaccacacaacgtttccccatccctaaaccgactgatctcacgattcaatacattaaacgtgaaatgcggtgaaagacgattccggatattctccatacggaaacggctgatctggttgatatgccgttcctgaagaaacatgcgtttcttcttcatataccaataaacaagtcccgctacaataacagatataataccgatcagagcccatatataggttgtcagtttcagcacctccatctctcctttttgtttctcgatcaccaattctttccgcatcacaatcgtatcctgccggtaacgcatatccagttcggctacacgcgtcctgacacgttcattacggatggaatcattaagttgaagatcgtgtttctgatattcataagcctttttatagtttcccacctgctcgtaataatgctgtagatagtgattacggatattgatcatattggcatctatatgcccgtaatcagctgatcttctgattatatctccggcaagagcgacatttccctttttaagtgcaagctcgatcatttgagtctctatgtaataaagcgccgattgattcccgattccggaaaagaagcgatagctctcgtccagatataattgcgctgaatccagtttattggtaatcacataaagttctccaagatttgccttacacaaattctgttcaaaaaccatttgaggataagacttcacgacctctaatgcacgcccaatataatgaacagcctgcggatagtcttttttataataaaaatggtttccccggttattcagataagtccatttctcagacacgctcatctgaggaaaaaagtttcctgcaagttcataataatgattggaaagctcaaaatcacgtaattccatataagtctgtccgagaccatagtaaaccggaaatttattacgatcgggcaatccgagagaatcacaaatgaacagtgcgcgacgataataataagcggcatacgcataatctcccttatgcacattggcatcagccaaatttatgcacaagtccggtagatagtccgtttgttgcccttgaagcctttcttcgtaggcttttttataggagataatagccgaatcgggctgagtgcgctgcatcaagacgttgccttccatattataaacagtcgaaagcagatcatgcacttccgcaaaaatctccacttcattacaaaagcgcttcacaagccgattgtaatacaagactgaatcaaagtctgccgtaacaaaataagatttggaataaaatgacaaaaggtaataataagacaggctatccggagcatccgccatggcgtgtcgcaacaaagaacgtgaatatcgggtattactaaacaatgaatcttgagcacaacgttccacagagtctatgctcatacccccaaaagcggaatcagaacggtttattttttgcttacagcctgttaacggtaataacaaacaaaaaaatacaattgccaggtttgctctatgcctcattgttttgatttatcgtgtaatacccaacaaaaatacatcctttttttaaattcgataacaaacgtactactttttatgcgcaattattcatatctttgtagccaatataattagaatagtctcataatgagtccactgaacttcactcacatcctgacacagacagtcgatgagctatcggaaagcgaatcatacaaaggactgtttcaccaacataaagacggtgagccattaccctcgccacgggtattgtgcgatgttatcgaattagcgcgttccattctctttcccggatattacggaaactcaacagtcaacagccggactatcaattaccacattggtgtcaatgtagaaaagctgttcaatctgctaacagagcagattctcgccggtttatgtttcggtaatggtgaccggtgcgatgaatgtaccgaggccaaacgtgaagaagcagcgcgcctggctgccaagtttatcagcaaactaccgcacttgcgccgtgtcctggctacagatgtggaagctgcttacaacggtgacccggctgcacaaagttttggtgaagtgatcttctgctatccggccatcaaagccatcagcaactatcgcatcgcccacgaacttctggaattgggtgtaccgcttatcccccgtatcatcaccgaaatggcacatagcgaaaccggtatcgacatacatccgggagcaagaatcggcacacatttcacgatcgaccatggaaccggtgtagtgattggtgcgacaagtatcatcggtaataatgtgaaactctatcagggggtgacattgggtgctagaagcttccccctggatgctgacggcaaacctattaaaggcattccacgtcatccgattctggaagataacgtgattgtatactccaatgccaccattctgggccggattaccatcgggcgtgatgcgaccgtaggcggtaacatctgggtgacagagaacataccggcaggggcaagaatcgtacagacaaaagcgaaaaaataatataattaacaacattaaagcgccggtcgcccggttcattaccggaacattagcatactggcatgttatccatttttatgagcgaacaatttgaaatgattgccaaaacctttcagggactggaagagatactggctgaggaattgacaacacttggggcaaacgacgtacaaataggccgccgcatggtctcgtttaccggtgacaaggagatgatgtacaaagcaaatttctgcctgcgtaccgcaatccgtattttaaaaccaattaagcacttcaccgcaaaagacgctgatgctgtatatgaacaaatcaaagccatccgttgggaagaaatcctggatgtagacaaaacctttgctgtcgacgcagtagtattcagcgatgaattccgccactccaagtttgtctcatacaaagtaaaagatgccattgtcgattatttccgcgaattgaatggaaaacgcccttctgtgcgtatcagcagaccggatgtactactgaatatacacattgcacagactacctgtacgctttcactcgattcatcgggcgaatcgctccaccgcagaggttaccgtcaggaagccgtagaagctccattaaatgaagttctggccgccggtatgattttgatgaccggatggaaaggcgaatgcgacctgattgacccgatgtgcggttcaggtactattcccattgaagcagccctgattgcccgtaatatcgcgccgggagtgtttcgcaaagagtttgcttttgaaaaatggggagatttcgatcaaaacctgttcgaccggatctacaacgacgacagtcaggaacgtgaatttacccacaagatatacggttatgacaacaatcccaaagccaacgaaatcgcaacgcacaacgtgaaggcagcaggggtatcaaaagacattatcctgaagttgcaaccgttccagcaattcgaacagccggctgaaaaatcgatcattataaccaatcccccttacggagaacgtatttcgaccaacgacttgctgggactgtacaatatgatcggcgaacgcctgaaacacgcttttgtgggtaacgatgcatggatactttcttatcgtgaagagtgtttcgatcagattggcctgaaaccgagcgtaaaaactcccttattcaacggtcctttggaatgtgaattccgtaaatatcagattttcgacggtaaatataaggaattcaaaagccaggaaggcggtgatgaaaacggtgaacgtgctccgaaggaaagaagagagttcaagccgcgccgggaggaaggcggtttcagaggagaaagaagaccacgcgaagaacgtaattcggaatacggagacagaagaccgagagaattcaaaggcaaccgtgagcccaaaatcaaaaagccccaggaggactaaaccgttccgaacacaaatatgcagacggatgaacaggcagtcatagaagataaacgatacggtaccaaagtatgacgctgtcatccgcccggaaacgacgaaatcagacagagtataaatcaaaggatttaaataatgataaagcaaatcatgaaaaccaacagtaaacaaaagagtgctttgttagtaatgctcttatctttactaataccaaacattatggcacaagaaccgaaaatgccgaccttggaggatctgattccgggtggagctacctaccgttctgccgagaatatatccggcctgcaatggtggggtgaccaatgtatcaaaccgggaatagaagcagtgttcatgataaaccctaaaaacggaaaagaaacaccgctcaccacccgcaacatagtaaacaaggcgttggaagccggaaatcacggtaagttgcaacacttctacaatgtcagtttcccatggccgaagaaaagccttatgctgatcaccctgccggataaatacatcgtatacgatttcgactaccgtgaggttatcagcacacgtccattgccaaaggaaggtgccaatagagattatcaccctgaaacgggacatgtagcctataccataggcaacaatctgtatgtggacgatcgggccgtaaccaacgaaccggaaggtatcgtatgcggccagtctgttcatcgcaacgaattcggaattaagaaaggaactttctggagtccctcgggcaatctgctcgcattctatcggatggatcaaagtatggtagcccaatatcccctggtcgatgtcacagttcccattgccgaagtcaacaacatccgctacccgatggcagggatgaccagccaccaggtaaaagtaggcatctacaaccccactaccggcaaaagtatctatctcaatgccggagacccgaccgatcgctatttcactaacatcagttgggcgccggatgaaaagagcctttatctgatcgagttgaaccgcgatcaaaatcatgccaagttgtgccggtatgatgttgaaacaggcgaattgacggccactctttttgaagagaagagcgacaagtatgtagagccgcaagaccctatcattttcctgccttgggatagcagcaagttcatctaccagagccaaaaagatggcttcagccacctttacctgtacgatacgaacggccggcaaatccgtcagttgaccgagggagactggctggtaaaagaggttctgggcttcgacaccaagaaaaaagagattattattgccagcacagagttctcgccattgcagaacaacctgttccgcctggatacaaaaaccggaatacgtactcccctgggcagtgcagaaggcgtacacagcggccagttgagcccttcgggacgctacctgattgaccaatacaactcaccgactgttccgagaagtatcaatatcatcgatgtgcaaagtggtaaaagcgtcaatctgctcacagcagccgatcctttcaccggctacaagatgccgggtatcgagacaggtaccatcaaagcagcagatggcaagacggacttatattaccgattaataaaaccggccgatttcgatccgaacaagaaatacccggctatcgtatacgtatacggcggtcctcacgcacaactggtcaccaacggctggcagaacggtgcacgaggctgggatatctatatggccaacaaaggttacatcatgtttaccgtagacggacgtggaagcagcaatcggggactcgattttgagaatgtaactttccgccagttgggaatcgaagaaggaagagaccaggtgaaaggaaccgaattcctgaaaagcctcccctacgtcgatgggaaccgtatcggagtacacggctggagctttggcggtcacatgaccactgcccttctccttcgctatcccgagatatttaaagtgggcgtggccggcggtcccgtcattgactgggggtattacgaagtgatgtacggagaacgctatatggataccccgcaaagcaatccgaaaggatataaagagtgtaacctgaaaaacctggcaggcaacctgaaaggacatctgatgatcatccacgatgaccacgacgacacctgcgtgccgcagcacaccctctcgtttatgaaagcgtgcatcgatgcccgcacgtatccggacctcttcatctacccgtgccacaagcacaatgtgtcgggccgcgaccgtgtacatctgcatgaaaagataacccgttatttcgaagactatttataaagatataaatcctcaaaagacatgaagatattactattaggttcgggcggccgtgaacacgccctggcatggaaaatcgcccaaagtccgaaagtagagaagctgttcattgcacccggcaatgccggaaccggtgaagtaggtgaaaacgtgaatatcaaagcaaccgacttcgccgctttaggggcattcgctcttgaagaaagtatcgatatgattgtggtaggccccgaagacccgttggtagaaggtatctatgaccacttccaaagtaacccctgcctgaaaaacatcgccattatcggcccgtcgaaagaaggagccaaactggaaggcagtaaggagttcgcgaaagaattcatgcaccgccaccacataccgacagcccgctaccaaagcgtgacagccgataccctgaacgaaggactggcatttctcgaaacacttgaagctccttatgtgctgaaagcagacggactttgtgccggaaaaggagtattgattctgccgactctcgaagaagccaagaaagaactgaaagagatgctcggaggtatgttcggcaatgcctcggcaaccgttgttattgaagagttcctgagcggtatcgaatgttcggtattcgtactgacagatggcgaccactataaggtgctgcccgtagccaaagactacaaacgcatcggcgaaggtgacaaagggctcaataccggcggtatgggcagtgtgactcccgttccgtttgccgacgaagtgtttatggaaaaggtacgtacccgcatcatcgaaccgactgtcaacggactaaaggcagaaggtatcacctataaaggattcatcttcctggggctgatcaacgtgaaaggcgaaccgatggtaatcgaatacaatgtccgtatgggtgatcccgaaaccgaaagtgtcatgctgcgcatacagagcgacctggtagaactgctggaaggggtggccgaaggtaacctcgacgcccgatcgcttgtcatcgatccgcgtacagccacttgtgtgatgatggtcagcggaggataccccgaagcctatcagaaaggatatgccatcaacggactggaagcagcccgggcaacggacagcattctgtttcatgccggaacagccatgaaggacggacaggcagtgacctccggcggacgtgtgcttgccatctgctcgtatggcaacgacaaggccgacgcactggcacaatgctacaaagtggccgacatgattgacttcaaagacaagaattatcgccgcgacatcggcttcgatttataatgaggaatcaaagattacaaggacggataacggcgggcagatttacgctgcccatcgttatctttacgtgtattgcctgttgggtgctgacctccgttctcctgcccggactggaagttaaggagtcgtcctacccgctgtggaatatcgtgaacatacccgcatgggccaaccgcattgtcagctttttgctctttgccggtatcggctatttcctgatagagctgaacaatacgtttgccatcatccgcatgagagcatccgtacaaacctcactttactttctgctcatcacggcctgccccggcatgcacctgctctatgcgggcgacgtcgctgctgtaacctttctcatttcgctctatttcctgttcaaaagctatcagcagcctcgtcctgccggttatctgttccattcgtttgctttgctgagcgccggcagtgtggcgtttcctcagctgacgtacttcatccccatctggctgatgggtgcatccggttttcagtcgctcacgttccgcagtttctgcggtgccataataggttggagcatcccctactggttcttattgggacatgccttttttcacaacgaaatagagcttttctaccaaccgttcatccatctggccgacttccgggacattgacttcggccgtgacttccaactatgggaagtcgtcacgctgggctatctattcatcctctacatagtcagttcgatacattgcatcgtggcaggatatgaggacaagatacggacacgcgcttatctgcactttcttattttcctcaacttctgcatcttcctgttcattgtgttgcaacccgccctgagcatgaatctgctttcgctgttgctgataggcatcagtatattagtgggacacttgtttgtactgaccaacagcaaatcgtccaacctcttctttatcggttcgatgattacccttatcgctttattctgctttaatatatggacgcttttatagaaaccgtttcacagatacttatcgactggggatatcccggcctgttcatttcggcactgctggccggaagtattgtcccgttcagttcggagatcgtgctgctgggactggtaaagttgggactcgatcctaccctttgcctcatttccgcctcgctggggaacaccgccggagggatgacctgctactatatggggcgcttgggcaggatagactggatcgagaaatacttcaaggtcaagaaggaaaagatagacaagatgcaacgcttccttcaggggaaaggcgctttgatggcgttcttcgcctttctgcccgccatcggtgaagtgatatccatagccctcggatatatgaggagcaatgtatggctgaccacggcttcgatgttcgccggaaaactgatacgctacatcatcctgctgaaagccatgcaggaagccctgaacctggttatgtaaagaagaatatggaaagaatcattgaatatacggccgacggaagtgccaccctcttcgttccggagctgaacgagcactaccattccgtgaaaggggctctgacggagtcctctcatatctttatcgacatgggcctgaaagcctctgcttctcctgcaccccatatccttgaaatcggtttcggaacggggctgaacgcattgctcacactgattgaagcggaaagatcgggcagacagatccattatacgggcatcgagctttacccgctgccatgggaaacggtagagaaactgagatataacgaccgaccgggaggggatggtgaacaacgattaacgaccggcgatgaacaggccgcgcaatggatgaaagccctccatacatcgccctggggagaagacgtgcggatcactctgcatttcaccctgaggaagatacagggagacttcacaatcatggaccgttcatcattgatcactgaccgtacatcgttattctccctcctttatttcgatgccttcgcaccggagaaacaacctgagatgtggacgcaagaactattcgatgagctgtacgttatgatggaagaagaaggaatactgaccacttattgcgctaaaggagtggtaagaaggatgttgcaagcggcaggattcatcgttgaacgtctgcccggacctccgggaggcaaaagggagatactgagggcaaagaagagatctcaggattctccggccgtaacgcaatgtaacgcgcaacccacattaaaacagaaaggataaacattatgagaatgaatcgaatacatcagtcaatagtaacccatatccccgggagaggaatgagaggacagactgttctcttccttttcctcctgctcctttccgcctgttccggccgcgggaaaggcgatgcgggagagcggatcatcaccgtcacgatggaaccgcaacggtacttcaccgaagccattgccggagataagttcaccgtacgcagcatggtgcccaaaggcagcagccccgagacttacgaccccaccccgcagcaactggtatcgctgggtgaaagtgaggcatatctgcgcatcggctatatcggattcgaacgctcgtggatggaccggttgatgaacaatactcctcatatccaggtgttcgacacctcaacaggggtggacctgatctttgagtccgccttcgatcacggcgaccaccgccatgaaggaggtgtggagccgcacatctggaactccaccgccaacgcgttgatcatagccggaaatacattcaaggcgctcaccgtactcgacaaagggaacgaagcatactacaaggctcgctatgactcgctctgccaacgcatcgagcagacagacagcctgatccggcaaacgttgtcggtgcccggcgccgaccgtgccttcatcatctaccatccggcactctcctacttcgcccgcgactacggactgcatcagatcagtatcgaagagggaggcaaagagccgtcgcccgcccacctgaaagggctgatggatctctgtaaaaaggaaggggtacgcgtcattttcgtccaaccggaatttgaccgccgaaacgccgaaatcatcgcgaagcagaccggcacccgggtgatctccatcaatcccctttcgtacgactgggaagaagagatgctgaatgtggcgagaagcctccgtggtgaacccggatactaataaccaacctcaagcaattcatggataaagaaagaaaaccccacaagcatacggaagcagcgacttcctcccccctcctctccatcagaagactctccgccgcctatgacggacgcacggtgctccacgatgtcgatctggaggtctacgagcacgatttcctcggcatcatcgggcccaacggcggaggcaagacaactcttatcaaatgcattctgggactgcttcgccccacaggaggagaaatcatcaaatatcacgaaccactcacgacgggctatctcccgcagtacaactcgatcgaccgctccttccccatctcggttctcgaggtagtcctctcgggactcagctccaagaagtcgctgaccggccgtttcaatgaccgtcaccgcgagaaagcccgacaagtgatccaccgcatgggactcgagggacttgaacaccgggccatcggacagctgagcggcggacaactgcaacgcgccctgctgggacgggccatcatcagcgacccgcaactgcttattctcgacgagccgagcacctacatcgacaagcgcttcgaagcccgcctctaccagctgctggcggagatcaaccgcgactgcgccatcatcctcgtcagccatgacatcgggacggtgctgcaacaggtaaagaacatcgcctgcgtgaacgaaacactggactatcacccggccgcaagcgtcaacaccgaatggctggaacggaacttcaactgcccgatcgagctgctgggacacggcacactgcctcaccgggtgctgggcgagcattgtcattgccacgaggatggcaaagcctgacaaaggacgccttattccatagaaaaactccgccctgcattgtttcatcttttatgtgaagtggtgcagggcggagtttttgcacaatcctctttcctaaaccaaggaacgatagtttccctccaccgggaagcaaggtttccccgagtaaggaaaacctctttcccaagaatcaggctgtaggatcatctacaatatcgccatcccctcccgaaggaagaccaataaccaggctacgtatcactgtacgaggtactttcagcaacttattaccggttgaaaactgggtagtcagtcgtaattcatagactccgtcttttaagtccgcaggaagtagcaccaacacttccgaagggttgtttacggcgatcatatccatcggcaactttgtttccgtacctttctcatcaatcaatacgatacccactgcagcgtctgtaccagttactttaatattctttccttgcagacgatagttacgtcccgcagttgcactaccgtccgtagctcgggtagcagcgtcttcaccgccgatgaagtaggccgggtcacctttggctcccagaattttcacgccggtccgtgcgatggcttcacgtaaatccttatcctgattgaaggaaacatagatagaatttctctcaggattccatactccaccgtctattaccccgcgaaactgtggtacggcacggaatagccccgtattgacagagtatccgttcagtaccaattccgataccgtacgctgaaagagatcgacggcatgctttaaagtctctgcccgcaagccggtatcttctttcttcatttcatccagtacatcggatagtgtcaggtttccggcgctttccaataccaggattttgtcttctttgttgtcggtggtcacggtattgtccgcaagccagcctttaagttcggttttcatgatttgttaagtttaaaagtgaatattattatttgtttttcacgcaacggacagattgtccattagtctttggatagtggcccgttcgggattcaccaccagtagtaaaatatagtagataaccatatgttgaaccattagcatcaaggcaccagtaagctccttctgaaccggcattgcctggaggagttgtcttacttcctgtagcgccaccgtgagatccaccaaatggtaagaaaagtcctattgttgagttcataaaccaaaatcccttattacctccgctggttacaacagctttattcgtacatctggataacttgtccatttcatcttttgaaggggtacgccaccccgttccgtaatcacttttaagttttgggcaaggatcggtattattgagtgatgtatttcccgtatatgtacttttccatgtgtaataatatccatattctgaataagtcccccacacataattagcagatcctgtgcttttcagattcccgtctgcccagatcagcttggctaacgctgttttatcggctgaggaacaaccatttgtagttaaattgatacttccggagggtacattaattccgatggctttcttaaactgtattttcatcgtatagctttttccctctttcaactgtatgctttgggtggaggtgatttccgtattattgggaatggtccgtccgcttattgtcagcgtattgaaatgcactgtaatggtcctggcccctgcaaacggaaccatgcgtatggttgtactcagagtcgtcttcggactgaatcccgccgtattattcgtgttggcggctaccacattggtcgaaggaccgatcttccatgatgtggagtttcccccttgctttacatatacacccgtgcaattggtgatcgtattgcttggaaatccggtaggactgatggtaatcgtcaatttacatagcttctggctgaagctcaccggaagaagattgtggctgaggctatttacatttgttatatctccggaatcgaaggtcatgaagtccttggtcatgtcagggatagacactgtactgctgttgtaagtatatgatgcgggtatagttcccaagtcggcagtgatattaaaggagtagcccaccacacgtatcgttccggagcgtgtcagcaatttcccttgtttgagtacaggagtgcccgtaccattggaggcgtaatcggcaaccgactggaagacatagttatttccggacttccggaaaacaatcagccggaaatagactcccgcaggcactgttgcacgggtacttacacggggcagggtatcttccgtcagttccatcgaggctatccggggaccttcatagtccggttgctctcctgtgcgtgtaggtgagaaagcttttactcccacccattcggcgatcaggggagagtggctacgggtcgaagcgtcgttaaaagaggaagaatgatagtcgttgtcacccgtcagactgatatggatggggattaactcgtcggcagtatccccgctgtcagcagacaggggagtcattctgtcatcttccgcacatcctgctatcgaaaggcaaaaacacagccataaggctttaccgagacactctcgcataataaaagttctattcatatactaagatattaaagtgaataatcgtatcaaagacgcattgcggacctatacatcttcgtataagtccggaaagactgtttgatacaacttttattatgcgtaagtttgtgtattacaatcagatataacggtcttgaatacacaattgtgtttcaaaaaacgttcgtcttttgaaacacagtttcggctctgctcactgaaggccaaagggagagataaatgactgataatcaaaacaatgtagaaatatttgcacagatgaaaaaagcggcttatctttgttgcatcagacgaacgtcttctgaaacatgatctttgctctcccatacaataattcttcttcaactattcttattattaattcaagaccaaccgttaccgtttcttaattctcccctccaaactcctaaaactctacactttctacggctatcttcacgtaaatcattatctttgcgcccgtgtatcatgataatatgtaactaactatagtctgaatgaaacagtacaaaaccgtaaacaacctcgtgggttggatcactttcctgatcgccgcaaccgtctattgcatgacgatagagcccacagccagtttctgggactgcccggaattcatcaccaccgcctataaactggaagtaggccatccccccggagcacccttctttatgctcaccgccaaccttttcacacaattcgtcagcgatccggcactggtagccaaaatggtgaactacatgagtgcgctgatgagcggtgcctgcatcctgttccttttctggagcatcacgcacctggttcgtaaactcgtcatcacagacgaaacgaacatcacccgcggacaactgatcaccgtcatgggatcgggactggtaggcgcattggcctatacattcagcgatacattctggttttcggccgtagaaggcgaagtatacgcctactcttccatgtttacggccatcgttttctggctgatattgaaatgggaagacgtagccgaccagccgcatagcgaccgctggatcatcctgatcgcctatctgaccgggctcagcatcggtgtgcacctgctcaacctgctctgtctgccggccatcgtactggtatactactacaagaaagtgccgggcgccaacgccaaaggatctctgctggcactggccggctccatggtattggtggcagccgtactttatggtattgttcccggtgtcgtaaaagtaggcggctggttcgaactgctgttcgtcaactcactgggcatgccgttcaacaccggtgtcatcgtttatgtagccctgctggcagccgccatcatctggggtatatacgaaagctacaacgagaagagccgcacccgcatgaacctctcttttctgctgaccatcgccatgctcggtatccccttctacgggcacggagcaagtgctgtcatcatcggtatcctggtgctgggagtactggcggcctacctcttcgcgtcaaagctgaacgaaaagatacgcatgtcggcccgtaccatgaacaccgccctgctctgtacaatgatgatcatggtgggatactcctcgtatgccctgatcgtgatccgctcggtagccaatacaccgatggatcagaactccccggaagacatcttcacgctgggtgagtatctgggacgcgaacagtacggaacccgtccgctgttctacggaccggcctactcctcgaaagtggccctcgatgtggaagacggctattgcgtaccccgccagaaaagtacagacaccaaatacgtccgtaaagagaaaacctcacccgacgaaaaagactcttacgttgaactgccgggacgtgtggaatatgaatacgcgcaaaacatgctcttcccccgcatgtacagctcggcacacaccgcctactataagtcctggcaagatatcaccggctacgacgtgccctacgatcaatgcggagagatgctgatggtgaacatgccaacccagtgggacaacatcaagttcttcttctcctaccagctcaacttcatgtactggcgctacttcatgtggaactttgccggacggcagaacgacatccaaagcagcggcgaaatagaacacggcaactggatcaccggcataccgttcatcgacaaccttctgtatggcgaccagaacatgctcccgcaagaactgaaagacaacaagggacacaacgttttttattgtctccccctcatactgggaatcatcggactcttctggcaggcatggcgcggtcagaaaggtatccagcagttctgggtggtattcttcctgttcttcatgaccggtatcgccattgtgctttacctcaaccagacacccggacagccgcgcgaacgtgactatgcctacgccggttccttctatgcctttgccatctggatcggcatgggtgtggcgggcatcgtacacctgctgcgcaactacatgaaggaagtccccgcagcagccctcacgtcggcagtctgcctgctcgtacccatacagatggcgagccagacctgggacgaccacgaccgcagcggacgctacgtggcacgcgacttcggacagaactacctgatgtcacttcaggaaagcggcaacccgatcatctataccaacggtgataacgataccttcccgttgtggtacaaccaagaaaccgaaggcttccgcaccgacgcacgtacctgtaacctgagctacctccagaccgactggtacatcgaccagatgaaacgtccggcctacgactctccggcactgcccatcacttgggacagaacggaatacatggaaggtcaaaacgaatacgtccccatccgtccggacttcaagaagcagatcgacaaagcctacaaagccgccgaagaagaggtgctgaacggcaagaatccggaagcactgaacaatatccgtgcccagttcggcgataatccttacgaactgaagaacatcctgaaatattgggtacgcaccaaagacggacaagcagtgataccgaccgacagcatcgttatcaaaatcgacaaagaagccgttcgccgttcgggtatgatgattccggaggcattgggtgactccatccccgactacatgcacatatcgctcaaagacgaaaagggtaacccgaaacgggctctctacaagagcgagttgatgatgctcgaaatgctggccaatgccaactgggaacgccccatttacatggccatcaccgtcggtacggacaatcagctgaacatgcgcgagcatttcattcaggagggtctgacataccgcttcacaccgttcgatacggaagctctcggagccaccatcgacagtgaaaagatgtatgacaacctgatgaacaagttcaagttcggaggcatcgacaaacccggcatctacatcgacgagaatacgatgcgcatgtgctacacccatcgccgcatctttgcccaactgatcacccagctgatgaaagaaggcaaaaaggacaaagcgctggcagcactggaatacgccgaaaagatgattccggctttcaacgtgccctacgatgtacagaacggagcactcgaaatggcagaagcttactaccagttgggaaacaatacgaaagccgaccagattatcgatgaactggcaaacaagtctgtagaatacctcacctggtacctcagtctggacgacaatcatctgctcatgtcgcagcgtgaatttatcatgcacctcagcgcactggatatggaagtcaaaatgatggagaaatataagtctaaactcgccggtaactataccccgaaggtgaacgaactatataacatatacgtgggacgcatgaaagcccaccagtaatctgtaaccgaaggagatgtttatagagcaaccgccttggtttttccgcgcaatctatcccgacgccatcttccggatggaccctgacgaaaaggctgtttacctgacctttgacgacggtcccatcccggaagtgacgccttgggtactggaactgctggacaaacacaacatcaaggcaacctttttcatggtaggcgacaacatccgtaagcacccggatgtgttccgtatggtagtagagcgcggacaccgcatcggcaaccatacgttcaaccatatccgcggattcgagtatctgtcgtcaaactatctggccaacacggacaaggccaacgagatgatgaaaacggatctgttccgcccaccccacggacatatgcgctggatgcaatatatgacgttgaagcgtcactataaaatcatcatgtgggatcttgtcacacgagactacagtaagaagctgcgtccgccgcaagtgctggccaatgtgatgagatatgcccgcaacgggtctatcataaccttccatgattcgctgaagtcctggaacaacggaaacctgcaatatgcgcttccccgtgccatcgacttcctgaaagaagaaggatacgagtttaggttactataatggaaacgaagataaacagtaaagccctgaaagccgaagccttgcgcctcggcttttctgcttgcggcatagccccggccgagccaatcgatcaagcccatcagaatgctttgaaaatgtggctggatgcggaccggcaagccggaatgacttatatggcgaatcatttcgacaaacgctgcgacccggctttgctggtcgaaggcactcgttgcgtggtttccgtagcactgaactattaccccgccacccgtatacctgacgaggaatatcaattcgcgtggtacgcttacgggaaggactatcacgatctcatgcgtgaaaaactggctgccctgttccgctttatacaagaatcagacgtaccggagctgaacggacgcatgttctgtgacaccgcgcccgtaccggaacgttattgggcctggcgtgccggcctcgggtggatcggaaagaacacccagctgatcattccccatgccggttccactttcttcttaggcgagctttttctgaatgcggaagccgatacatatgaccggcctcaacccaatcgctgcggccgatgtaaccgttgcctgcaagcatgccctacaaaagctttagagacgccatacagcctgaatgcacaccgttgcctttcatacctcaccatcgagaataaaagcgaaattccggactctatcgccccctttatgggaaaccgtgtgtatgggtgtgacgaatgtcagaaagcttgtccctggaaccggtttgccactccctgccggacaccggaactgcaaccctcaccggagttcatgaacatgaagaaagaagactggaagcaactgagcgaagagaaatacagagccctcttcaaaggcagtgccgtgaagagggccaaatatagcgggctgataaggaatataagacaaatggaagactaagaaacgggctataagcagcttccggcagcactcttatttcactgtaaccgtcagcggattgcgaaccttctgtgcaaaatcggccatatacgcattccaggcagcgctatcttttatgtcggctttgctccaggcggccccccagtagtaagtaaagtccgctcccggttcgtactcactgattgccagcacatgcccgtcggcacctccacgcagttccttcttttctttctccgggaagagaactgcttttgcctccttcaccaaagtaggaaacgcagcaccgacaaagatcttaccattgtcaccaccggcattatccgtcggatccacataagtcatgtatccgtttgccgcatctgcaacaatggctccatcgggttcgtgcaatacaataccgacggctaaaggcatcgtctctttcaggttcgtataagagacaactgttttattgcaatatgaacccgcatccaatgtaatgatccgtgtctcgataatagtagaatctccttttacgaccaatggattgtataccagtttcacagtaaaacgcaacggaccgttatccagtatctcctgggtagcgtaacaatacggataaatgattgtatcccctgccatcaatgcagtcgtacctccccccaacgtaggaccgaccttataacaatccagcccgttgccatggtccacatgataagagacagagcggtaaagttcctgcgcggctttggggtccgtctttccgagttcggctattttagctttcatatccggattcagttcgccttcataacgggcttccaccaccggctcagtagtattatacttcgtccagatatcatatccgaaagcacgctctccggtttcctgcaaagcaggcccataagcacgaaaagccgtcagatcgttctcccaggccacgtcatccacccgttcgggataatatcttccacaagccttcaccgggcactcttgaggaatacccgcttttatcgtataaacggctgagccattcgcttgcacagtgaccggaaatatcactttctcgtcagaagttatttgatagggcacttgctgtccttcggcatctaccactactatctgtgccgtatcgggtaaatgcaatttagaggaaacctcacccatggaaacttctaccatctcgccgcttcgttccagtgaggtggcattggacacggtgacagatactgttctgcccgcttcgttacaagccaggcacaacaaaacggctgcgacaaaaagaaaaactttcttcattgattcaattgtattgatcagattcattaaggttgtttaccgatataagccaaaataccgccatctacataaagtacatgaccgttcacaaaattcgaagcatccgaagccaaaaagacagccggccccatcagatcctccggtgttccccaccgggcagcgggagtcttggatattatgaatgaatcaaacggatggcgcgaaccgtccggctgcacttcacgcaaaggtgctgtctgaggtgtagcgatataccccgggcctatgccattacactgaatgttgaattctccatattcggatgcaatgttgcgtgtgagcatcttcaacccacccttggcagcagcgtaggcagatacagtctcacgtcccagttcactcatcatcgaacagatattgatgatttttccatgccctttcttaatcatcgaagggataacagccttcgacacgataaacggagcattcagatctacgtcgatcacctgacggaattgctctgccgtcatctcacacatcggtatacgcttgatgatacccgcattattcaccaaaatgtcaaccactcccacttctttctcgatctgtgcaaccaaagcattcacctgctcttcgctggtgacgtcacacacatatcccctggcctcgattcccaattctttgtatgcggccaagcctttatcaaccagctcccggctgatgtcattaaatacgatcttcgctcctgcctctgagaaagcagtagccaaggcaaagccaatgccgtaagatgcacctgtgacccatgccactttgccctctaatgaaaagtttaccatacttataatgtttttaaaaacttatctcactttcatttcctaaaagtaacttccacaccggacagtttatttcaagtccgtaattaatgaaaagtcctggtcgccataatcaagattctcacctcccataccccagataaaagtataattgtgagttgccgcagccgaatggatagaccactccggtgacaagactgcctgatcgcccttcatccacacatgacgggtttcgtcaacctcacccataaaatggcacacagcatgctcttccggtacttcaaaatagaaataagcctccatacgacggctatggacatgtgcaggcatcgtattccacacacttcccggagccagttcggtcatccccatctgcaactgacaggtgggcaacacctgatttaccagcatcttgttgatattacgatgattcgaaccttccaacgttcccatttcagcaactacagcatcggctttagtcacctttttatcgggataattgcgatgagcggccagtgaattaaaataaaatttagcgggatgtgcagcatccgtactctcaaaggtaacgtcccggtcacctgcccccagataaagtgcctctttataatctaactgaaatatcgcatcacccgccctcacgataccggaccccccgacattgaaaatacccatttcacgacgggtcagaaaataaggagctttcaaaggatcgatagcttccaatttcaacacttcctttaccggcatggccccacctaccaccatacggtcgtacatggaatataccatgtttacttcatcggctgaaaaaaccttttctatcagaaaatctcttctaattctcttggtgtcgtagcttcttgcatcttccggatgggcagcatagcgaatctcatagtttgttttcatatttcttatttataagtttacattaggtgtcgctcagataaactccgtttacgcacacgacgcaaaaataagaaaagaaaacgggattttggaataaatcatactccaattatcatgaataaatcaataacatcaatctttcggataattgggactataaagtaaggtttgatctcttaccgccagctttccatcttttacaaactctgttcctctctcttgcaagtggtcaaccatcgctttacgcatttcaaccagcctatctgcataacgactatttcccgaaaggttcttctgttcaccgggatctgaacttaaatcgaacagttgctcttcacccgtatgaataaaccagatatacttcattttaccatcagtcaacgcacaccaatagttatcggcactgtagcaggtggcatgttccagatcgatatattttcgccagccgtttttatttcctgaggccagggctaccaaagattttccatccatatcatccggtaccgtccctcccgcaagttcaatgaaggtaggtaaaaagtcgcgtagctctactggctgttcaatccgctttcctctgatagcctgtgtagtcatggcagaaggccattttatgatataaggaatcttggccgacccttcgtatgcataggttttccgccaatgataatgatctcccaacatatcaccgtgatcggccgtatagcaaatgattgcattttcgtacattcctttctcttttagaatctgaatgatctgtccaatctggtcatcaataaatgtcacatttgcataataatggcgtcgtgaattgacagcatactcttcgcctagatttgcaaaagccgcatcctttgaaacccgttccggatctttgcgttcagcatatttcccacaccaatctccaacgaacggtacaggaatatctaccttctcatacatatccaaatatcgtttcggaggatcgtacggactatgaggacgagcaaaagagaccttgaggaacaaaggttgatcgctatcataattgcgtatcaattcacaagctgtctgacctgtccaggctgtaggatgcagcctctcttcaagtttataagtcccggcattatgattattccagccgattcctgttaaatccggattcttcccgggagcttgcaactgaaaccattcccgatagtcactgataaaatcacgggtttcactgcgtccgctctcgtcgaccaacgtagcatgaaaaccatgcaaagctttctgtggaaaccagtgcatctttcctatcccgaaagtgtagtaacccaagtcacgcaacatctgaggcatttcatatttatatttggaagccaccttcccatatcccagcatcccatggtgccatggagacatccccgtgagcaaaccggcacgtgcaggcgtactactgggtgcagagctgtaaccacacacaaacaaactgccttcctgagccagtttatctatattaggagaaataaccgccttattgcccatgcaatgtaaagcatctccacgatgttggtcactcataataaaaatgatatgcggcttccctccctttgtggcaggagcctttgacagtttggaagaatcattaccggtctctttgctttcgccattaaacgcataggttgacggagaggctgccaaacctgctcccacggcaagtgaacatttcagaaaatcgcgacgtttcattgattatcagactttagtattaacgaataggcaaaaataggtaaaaagaaagagaaagaagagaaatttaagataataaaaatccaccgggagttctttcctttgttcttcgaaaaacataaaggcaacagagaaggcaacaagaagataaagaacagattatagaatagaatttcatccggtacaaaatactaaaatatcgaaagaggacctactgaggacagtaattcaaattagcgttttattcggtgacataaagggatacaaaaaaagccctaaaactgtctgttttagggcttttttataaaatatatccgattgtatgttgtcctaccaagattcgaacttagacaaacagaaccaaaaactgttgtgctaccattacaccataggacaagctattgcgctttctgttaaaaagcgatgcaaagataatgccatgcaagctattttccaaatctttttagacttttttgtataataagtctcgttagccgaagcgaattgctacctttgtacttacagaaatcaataaagtaaacaaataaattcagtaagtatgagaaaactttttgtatgtattgcactgggtctcaccacgcttaccggcaatgccgcatcaccgctatggatgcgcgatgtacagatttcgccggacggaacagaaatagcgttttgctacaaaggagacatttataaggtatctgcgggaggaggaacagccatccagctcacaacacagccttcgtatgaatgtacccccatttggtcacccgacagtaaacaaatagcttttgccagtgatcgtaatggcaactttgatatttttgtaatgcctgcgacaggaggtacagcacaaagactgactacccattcttcatccgaactgccttcggcttttacaccggatggaaaatacattctcttttcagcatccatccaggatccgtcacaaagtgctttgttcccgacaacagccatgacagaactatacaaggttcccgtgaacggaggacgtacggagcaggtactgggtactccggccgaagccgtttgttatgcgccatcaggagagttctttctctatcaggatcgtaaaggttttgaagatgaatggcggaaacaccacacttcgtccatcacccgcgacatttggctgtacgacactaaaacaggaaaacataccaacctgaccaatcatgccggagaagaccgcaatcccgtactttcaccggacggaaaaagcgtatatcttttaagcgaacggaaagggtcatttaatgtttatagttttccattggacaacgcacaagaccttaaagcagtaacatcgttcaaaacacacccggtacgtttcctgtcaatgagtcacggcggaacgctatgctatgcatacgacggagaaatatatacccaaaaggataatgccactccacagaaaataaacatagatattgtccgtgatgatcaggacaaaatagcagacctgacttttacaaacggggcaacatcagggactgtatcaccggatgggaagcaaattgcatttatcgtacggggagaagtatttgtaacctcaactgattatgcaactacaaagcaaatcacccatacacccgcacgcgaagccgggttaacatttgctccggacaatcgtacactggcttacgcaagtgagcgtaacggcaactggcaactttttcttgctaaaatagcccgtaaggaagaagctaatttccccaatgccaccatcatcgaagaagaggtgctgttaccatccgcaaccgtggaacgggcctatccgcagttctcaccggacggtaaagagctggcatttatagaggagcgtaaccgtttgatggtaatcaatttggatacgaaaaaagttcgtcagatcaccgatggttccacctggttcagcacagatggaaacttcgactatcaatggtcacctgacggcaaatggttcaccctcgaatttatcggcaaccgacacgatccttactcggatataggattggtaagtgcaaagggggacagtccgattaccaacctgaccaacagcggttacatgagcggatctccccgttgggtactggacggcaatgccattttgttcacaaccgaacgatatggtatgcgtgcacatgcttcctggggttcacagaatgatgccatgctggtatttctcaatcaagatgctttcgacaagttccgcctgagcaaagaagattatgaattgcaaaaagaactggaaaaggaacaacagaaagataaagaaaaagcctcaattgacccgaaaaaagataagaagaaggatccccaaacagatactgagaagaaagataagatcaaaaacatcctagtagaactgaatggtcttgaggatcgcatcatacgcctcactcccaactcttcgaacctgggcagtactattatctcaaaagacggcgaaactctctactatctgtcagcattcgagggcggatttgatctatggaaaatggatctccgtaaaaaagagaccaaactgcttcataaaatgaatgccggatgggcttctatggatatggacaaagatggaaaatccctgtttgtcctgggaggtaataccatgcaaaagatggacctcagcggagaaaccctgaagccgatcaactataaggcagagatgaaaatggatctggctgctgaacgagaatatatgttcgaccatgtatataagcaacaacagaaacgtttctacaacgccaacatgcacggagtaaactgggataccatgtctgctgcttatcgtaaatttttgccacacatcaataataactatgactttgccgaattactcagcgaatggctgggagaactgaatgtatcacataccggcgggcgtttctctccatctataccgggagatgccacagccagtctgggggtacttacagattggaattataaagggaaaggcgtatcgatcatggaagtgattgagaagggccctttcgatcacgcccgctctaaagtaaaagccggaactatcattgaaaaaattaacggacaggaaataacccctgaaacagactatcatacgttattgaacgacaaagcaaacaaaaagacactcgtttcattatacaatccgcaaagcggtgaacggtgggaagaagtagttatcccgatcggcaacggaatactcaataatctgctctacaaacgttgggtgaaacaacgcgcggccgatgtagataaatggtctgacggacgtctgggatatgtacatatacaatcgatgggtgatgacagtttccgttctgtctactcagatattttaggaaaatacaataatcgcgaaggaatcgttatcgacacccgtttcaatggcggcggccgccttcacgaagatattgaagtattgttcagtggtaaaaagtatttcacccaagtcgtccgcggacgcgaagcttgcgatatgcccagccgccgatggaacaagccgtctatcatgctaacgtgtgaagccaattactcgaatgcacatggcacaccatgggtatacagccatcagaaactaggtaaattggtaggtatgcccgtaccgggaaccatgaccagcgtttcttgggaacgtctgcaagacccgtctctggtattcggtattcctgtcataggctatcgacttccggatgggagctatctggaaaacacacagttggaaccggatattaaagtagccaactcaccggaaacaatcgtcaaaggggaagatacacaattgaaaacagcggtagaagaattgctgaaagaactcccggcaggcaaagggaaaaagcattaacctatccactctataaataaaaaggatggattcttagaatccatcctttttatttatatcgaaacttcacttcttccatcgtctgacacaagacggtggagaaagaagttctttactttgcaataatcaaataatagtttttcttaccacgctgaaccaacagatacttttcatcaagcaagtcggcagtagtaatcacctgatcaaaagcagccagtttctctttattcaaagagacaccgccaccttgaaccaatttacgcatttcaccttttgaagcaaatacagcggcattgtcgacaaacaaatcaaccgctttcactccctctaccaacgcatcacgtgagatctcaaattgaggaacaccttcgaacacagccaacaatgtatcttcatccagctttttcaacgcatcggaagtagcattaccaaataagatattggatgcgtctactgcagcattgtaatcctcttcagagtgaaccatcacagttacttcctttgccagacgtttctggagcacccgcaaatgcggagcttcattatgttcggcaaccagtccgtcgatttcggccttatcgagtgaagtaaatatcttaatatagcgctcagcatcggcatcactcacattgagccagaactgatagaacttgtaaggagaagtataacgagggtccaaccagatattacccgattcggtcttaccaaattttccaccgtcagctttggtgattaacggacaagtcaatgcataagcctcaccaccgttagtacgacgaatcagttcagtaccggtagtgatatttccccactgatcagagcctcccatctgcagtttacatcctttggtttcgtagagatgaagaaagtcataaccttgcaacaactgataggtaaactcagtaaacgacaatccgtcacgggcttcaccgttcagacgtttctttaccgattccttagccatcatgtagttcacagtaatatgcttacctacttcgcgggcaaaatccaagaaagtgaactccttcatccaatcatagttgttcactagttcagctctgttaggagcatcagattcgaagtccaaaaacttagccagttgctttttgatacaagcctgattgtgacgcagtgtttcctcatccagcagattgcgttcggccgatttacccgaaggatcgccaatcataccggtcgcaccaccaatcaaagccaatggtttatgaccacaacgctggaagtgacgcaatatcatcacaccacataagtgtccgatatgcaatgaatcggctgtcgggtcaatacccacataagcagtcacctgttctttagccaataactcttctgtgccgggcatcatgtcatgcaccattccacgccatcttagttcttctacaaaattcatcgaatgataataagttttaaagtttaattagggcaaaagtacgactctttatcgtaacaagcaactcttattgcctaaaaaagacgttattaatgttttgacgcacttgttgcataagtttgcaaagaggtatctccaatagcaaagcagcacgttcataaagacaatgaatatctatcatactttcatccgtttccagaaataaatattccaagggaatgccccaaagcacttcctcttgatatttctcacccaatgaaacataaatcccttcccggatgtactgcaaagccagttctttctttccacggaacccatgtataatccagggattagagggtttcatttttttcctcaggcagataatttcgttcgccgaacgcactgcatgaatcaccaacggatatttcatttcgtgtgcaagcatagcctgtttctcaaatacttcctgttgcaacatatagtctgtccgaaccaatttgtcaagaccggcttcacctattgccagaacctggggacactgtatcgctgcaagcaacatctcccactgccggtcaaggttttcacgagtcagataccacggatgaattccgacagaataataagcaccggccaacggatcaaactctgcaggctgacaattttgtatcgcctgtccaagttcaacaggcatccgatgtgtatgtatatcgagaatatccatagactattaaggaaccggatcgtatcctgatccaccccagggatgacaacggagaattcgtctgacagcaagataaagtcccttaaaagggccatgtttcttaatcgcttcaatagcgtattgcgaacaagtaggagtgaaacgacatgaaggaggagtcatgggcgaaatgcatgctctgtaaaagtagataggaagcaacaatatatatgacaacaggcgtttcataccagtttctcactaatacgagccagtagaatcttcatcttttcctctatttcggccgaggacgttaattcgtccgaaagatagataaaggcaatagccaactgttgctgcttatcagtaagaatctgcaaaagttgatgtttatgcatccggtaagcctcacgcaactggcgtttcacccgatttctttttactgcacgtttaaatcgttttttcgaaacgctcagtaaaatagatgcctgaacatcttgattttcaacaggcatatacaccacacgcaacggaaagatggaaaacgactttgagccgcccgcaaacatcttctcaatcagaatcttactattcagcctttcggctttgcacagggtatttgccataataataacaaacggtaaacaataaacagtaaacaacggacagataacttagcttgttcatcgttcaccatttattgtttaccgtttcatttattttcctttattgttttccttaataaacaaatcgagggcagccgtcattgaaggagctttcacgttaggtgcttcaagatcaagacggagtccggcatcacgaacagcttgtgctgtagtcgatccgaatgttccgatcttaatgtccttctgatcaaaatcagggaagttcttcttcagcgaagatactccggcaggactaaagaataccaacatatcataatcaaactcctctccctccataaagtcattgctaacagtgcgatacattacgcattccgtatgctggatgttatttttatccagcagatccctcacgtcatcgttgtgtacatccgacatcgggacgagatacttttctgttttatgtttcacaatcgaaggaatcagatcctcgatcttgcccgtagcaccaaagaagatcttacgcttacgatactgcacatacttctgaatataaagagcaacagcttctgttacacagaaatacttcatcgtctcagggatcgtcacacgcaactccgtacaaagatggaagaaatgatcaatcgcatgacgcgatgtaaatataacagccgtatgatctaaaatagatactttctgttgtctgaattctttcgcagagacgctctcaaccttgataaaggggcggaaatctatttttacaccatacttttcagcaatgtcgtaataaggagatttctctgaagcaggctttggctgcgacactaatactttcttaattttcaacgtcctaaaaatttattatcaaaacattatttagctgaatcataccttgatacactatcagacaaggtacgatttcaagggcacaaaagtataaaattaaaaggaaaaccccataaatattacaggaaaaaagctttaaccacttgtaaaacatcaatattttagtaaaaattaccaaaacgcaaccaattgaaactaaaaaggtgacattcaaatcaaaatagaccagaaacaaaacaaacggaaataaagcgaatccaaggtaataaatcagcgtagaataagactccagccatatatctgttttgcttttgtcaaaaaacacccatcccaaaaacgaatataaaatccatttaaacaaaagatagagtaaacaaacagccacataaactcccaaaagtatatgcggcgaaacacgctccatcaatgcaggccagatatcattaaaatagttaaaaatacaaacacctccaagaacacaggtctgcacgataagtaatagcaaatagcgcatgtcagccgccgtagaagaagcgaaaatgctcgttctttcacgatgtaacataaaatctttcacctgttgcaacagaaacttcttgctgcgtgccaacacatacgcagaaacaaaaaagcatcccaacagtatcatagccaacccatcatcagttcttggagaataaggaatcggcataccctccgccccggtcacggtctcacttaccgcctgtaaatccacccggctacccaacgtatcctggggagcaccggctgcactaattacgtgctgcacagtatctgcctcctgtgcgccaagagagtcctggacaaaaatcatatagcggcaaacttacgaatagaaccatcccacaccggtatggaataaaccaactctacagcctcctccggagtatgtgccacatgccagatatctccatgctgtttcctcatgaaattaccttctatagcattttcaagcatctccagcaacgggtcaaagaaaccattagtgtttaatatcacgatcgggttaagatacaaccccaactgtttccaggtaataatctcaagcagctcttccaaagttccgcatcctccgggcagtgcaatcacagcatcactcttttcagccatcaacctcttacgctcgtgcatactttctacctcgataagctctgtcaatcccgtgtgatgccatccctggtctaccataaaatgaggaattactccggtcacttctcccccattctgcaatactgcatcagccactgaacgcatcaatcctatattccccgctccatttatcaaacggatatgccggtttgccaacagatgccctaatttcatggctgcatcaaaataagtctggtctatttttgtacttgaagcgcaatatacgcatacggaagttatttggttcatttcttgcatgggtttagttcaacacgctgcaaaagtaccaaatttcaaggagaaaagaagaaggctgccttgttttctccccatatcgggttaaaaacaagtgcagccttctataataaatagctgtaaagctacgctgattacaaaccgaaagcggcttttactttgtccacatagtcaagtttttcccatgtaaacagttccacttccatagtccggtcgccttcataacgagattgaaaatgcttagtcaccatctgaggttcacgccccatatgcccgtaagcagcagtttcactataaatcggataacgcagtttcaggcggtcttcaatagccttcggacgaaggtcaaacagttcatcgatctttttggcgatctctccatcactcatcttcacgttactgcgtccgtatgtatttacataaatattaataggacgagccacaccgatagcgtaagaaacctgtaccagcatttcgtcggcaacgccggcagcaacaagattcttagcaatatgacgggcagcataagcagcactacgatctactttgcttggatctttaccggagaaagcaccgccaccatgagctccctttccaccataagtgtccacaatgatcttacgtccggtgagtcctgtatctccatgagggccaccgatcacaaacttaccggtcggattcacatgatagataatatggtcgttgaacaaagcaagaaccttcggatgattaatagaagcaatgacacgaggcatcagcacctcaatcacatctttccggatcactgccaacatctcttcatcagccttcagttgggcagcggcagaatcatcagccggtaatataaattcatcatgctgtgttgaaacaacaatcgtatcaatgcgtaccggagtaccgttatcatcatattcaatggttacctggctctttgcatccggacgaagataagtcatttctttaccttcgcggcggatatcggccaacacaagaagtattctatgtgccaggtcaagagacaacggcatatagttttctgtttcgttggttgcataaccaaacatcataccctggtcgcctgctccctggttcatcgggtcttcgcgttctacaccacggttaatgtccgcactttgttcatgaatggcagaaagtacaccgcacgaattactttcgaacatgtattcgcctttcgtgtaaccaatcttttggatcacttcacgtgcaatcagttgcagatcaacataagcacctgttttcacttctcccgcaagcaccacctgtccggtagttactaaggtttcgcaagctactttcgaactgggatcataagccaacagtttgtcaagcacagcgtccgatatttgatcggccactttatcggggtgtccttcagacaccgattcggatgtgaataaatatcccataataaaattatgaattatgaattataaattatgaatgagggcaaagattcaaaaaagagtagaaaacgcatacagaagggaatgttgttttagcatttttttctgtggttgcaagctactcaaatctttccacatttcatttcagggacaaaggtagataatattttggatttattgctacttttgcttcgtattaacagactaccttatgaaaaataaactaaaaaccgcttttacattattggtgtatattgctgtcacagtgggtatttacgccttaatctgtcatctgaatcaccagcccttcgacgatttgcgcatactgtatgccgtactgatcggctgcgtagcctaccttccccgacacctgatggttcgcaaatcacgaaagagccagaaatagctctttaatcgtcttatgaaacaccggatgaacaacgtcctgtgcaatctcggcaaggggttccagaacaaacttacggtcggtcatcaacggatgaggcactataagcctttcatcctgtagtatcttatcgccatagagcaaaagatcaatgtcaatcaggcggtcactatacacaccgtcccgtgatttatgcaaacgccctatttcctgctctatccgttgagtactttccagtatcccgacaggggacaatactgtctccactcccaccgcagcattcagaaagttgttttccgactgaaatccccagggagcagtagcataaaaagcggaaagagaaatgattttccctatccgctcctctattttttgtagggcaacacgaagatttagctccttatcacccaagttggtacctaatcccaaatatactttcatcacttatccaaaatcagcatcgcatctccataagtaccaaagcggtaaccctccttcaacgctatgtgatatgcatccatcacctgatcgtagccaccaaaagcagccacaatcatcaataacgtagaaagcggcatatggaagtttgataccatggcatttgccacagtaaagtcgtatggagggaagataaacttgttcgtccatccttcgtattccttcaaatgtccgtctgtacttaccgtactttcaatagcacgcattacagttgttcccacggcacatacattcttacccagatctttagcacgattcactatcttgacagcctcctccgtcacaaacatctgctcagagtccattttatgctttgtcaggtcttccacatcgatatcacggaagtttccgagtcctgcatgcaatgtgatatatgcaaagtctattcccttaatttccatacgtttcatcagctcacggctgaagtgcagacttgcagtcggtgctgtcacagccccttcgtttttagcgaagatagactggaaacgttctgcatcctcctcttcaaccggacggttcagaatcgtatgtggcaatggagtttctcctaatgcatacaatgcttttttaaattcatcatgaggtccgtcatacagaaaacgaagcgtacgcccacgtgaagtagtattatcaattacttcagcaaccattgagtcatcatccccaaagtaaagcttattgccgatacggattttacgtgccggatctaccaatacatcccacaaacgcaattcctcgttcaactcgcgcaacaagaacacttcgatacgcgcacctgttttttccttatttccgtataagcgtgcaggaaacaccttggtatcgttgaatacaaacacgtctttatcatcaaaataattcaggatgtctttaaacatcttgtgctcaatctctcccgtacgcttgtggagtaccatcaagcgcgactcgtctctgtactttgtagggtgcaaagcaatcttttcttcgggtaacttaaatttaaattgcgacagtttcatgataataatgtgcgtttattaattattttattttctatttcttttacttcaatcagatatctcaacatcttgctgatctatccattccgcgaactttgccggatccagacactgctctaacttgacgtctcccacacgggtacgtatcagcccggtcaagtgcgccccgctttgcaaagcctctccgatgtcacgtgccaatgcacgaatgtaagtccccttgctgcaaaccacccgtattttaatttccggtaaattacactccaacaactctatctcatcaatcaccagcaatttcggtttcaactccacttcctggcctttacgggccaaatcgtaagcgcgtgcaccatctaccttacaagccgagaaagcgggaggtatctgctgtatctcgccaacaaacgttttcaacgtcttttccaccaactcacgggtaatatgctccgtagggtatgtagcatctatttcatgttccagatcgtaagacggagtagtagcgcccaactgtatggtagccacatactccttcgtatgatactgaaactcctctattctcttggtagccttgcctgtacaaacaatcatcacccctgttgccaagggatcgagtgtacctgcatgtccaacctttaatttcttcactttcatccgccggcacatatggtaacgggcgtgccccacgactttaaaagacgtccatcccaacggtttattaaaataaagtacttctccttctttaaaattcatccgcaatttattgcaattgtgaaacgacaatggtgaccactccaactattgcacaataaatagcaaagtaaatcaacttacctttcttcacgatattaatcatccacttacaagccaggcaacctgaaacaaaagccgcaatgaaacctactatcaatgacaaagtaggaatatcgcccgcaatagcctcaccttttatcatcttcataccatccagcagcgcctctcccaatataggaggcatcaccatcaggaaagaaaattgtgccagtttcgctttattatcacccaataacaaaccggttgcaatcgtactgcccgaacgagataatcccggtaatactgcacacgcctgcgccagtccaatgataaatgcatccttcatcgagatgttctctttctggcgtggctttgcataatacgaaaacgacagtaacgcagccgtcagcaacagcatgcagccaacaatcagtaatcccgagccaaaaatggcctccacttcatctttaaaaaacaccccgacgataccaataggaatcatcgaaatcaagatattgattacatagcgtgtttcactgttcatctcaaacttaaataaaccacggaaaatccagtctatctctttccacagaatcaccaatgtactgaacacagtggctacatgcaccacaatggtaaatgccagattttcttctccttctataccaaataaagccgaaccaatggccaaatgcccgctactgcttaccggtaaatactcagtcagtccctgaatcaatccaaggatcagtgcttcaaaccattccatcctgttttattcttttgttttgggtttgcgcatcacgccatatatcataaaaataaagcccaggaaacagaccaccggagccaccttaattcttctcacactgaaaatgtccgcctgaaacaccgtttccgacgatgaaggccctgtcatcaggataaagcccagaataaccactgccatgccgatagcaagcagaatgaagttcgttttatcgaaggcaaatttttgtttatcacccattgttatttacattaatttatttacatctataaatccggaattacacataatatagcgtacttgctttcatcctcagatatttattaatagaaagataagcacacaagaaagtgatgaccacaccgaacaccaatactgcgcccgataccagtaacatgacttcgggcgtaattacccgaatcaattcaggctcataggataccagccagtaagcggcccccatcaggatcgtatctgcaataaaagcagccagaaccccactccatatattccttttcaaaaacggacgacgaataaatccccagctcgctcccaccagtttcatcgtatgtatcaagaaacgtttcgagtagatagccagccggattgtattattaatcagcgcaaaagagataaatgtcaacatcacggccaatgccagcagaacaagactgatattacggatattttcatttaccgcgtcgatcaagtctttctgataaagcacatcctgtatattggtatttcttttaatcaatttctctattttcgcaatactgtcggagttcgcatagtccgaatgcaatttaatttctattgaagccgtaaacgggttataccccaaaaactcttgcggatcggtccccatggcttccgtctgctctttcaatgcctgttttttcgagatatattctgtttctttcacaaaaggttcattattcagccgtttctgaagcttcagaatatctgtctccttcatatcatcactgataagcacggaaaaattaatattttcccgcacataaacagacaaattattggccgccaatacaaagaacaccacaagccccagtaacagcaataccaacgtggtactgatactggaagtgatgaactgcatatcaaaatatgacacagcgttatttctgcttttactcttcatcagcgtttctttctgaatacataaatcatcgaactactccgttcctttttagcctgggcactcaaccatgccaccgttccggtccacatgcctttcacaaaggagtatgcactacctttatgtttctccgtcagcatcgatacatagaaagcatcgaacggcatcggatgacgggctgccagaataaatccgtgcttcgacccgaactgctgaatcgtggcaggcgtaaaatgccataaatgacggggtacatcataagcagcccagtacttcccgtatttcatcgcatcatacgacgagcaattaggcacagccactatcaatacccctttctcggtcaacagttcacgtaacaattcccacgtttcgtccaaatgttccaagtgctccatgacgtgccacaacgtgattacatcgaacgttcccggaactaattctttcaatgcagcctccggcctcacattcagcccgaaatgttcgcgtgcaaaattacgggcttgtccgctcttctccacggcctctacttcccatcccctattctgcatcgtatgggcaaagtaaccggtacctgtaccgatatccagtatcctcccggtttttcgatgagactctttcatcaccaaacgcgcctttcttccaagcatatactgacgtacatgatggtaaatggcattcatggcacctttcttcgtgtccgaatgggaaatataatcaggtgtttcgtaatatctgcctatttccgcctctaccgggactccttgcgtaaaagtaaatccgcaatcttcgcaggtgtacaagtcaaactgttcaccggaagcataaaaatccgtacaggtcatagcacgtttcaaatgtgcgcccccacatagcggacaggcatttatagtgagtttattcattggttttatctgcatatttaagtgtaccccgaaacgtcaggacacactccacccgaatttggtgcaaaataacaaataaaaagtgacgaataggcatttccttaaggaggtttaacaataatggcaaggcaactgttcgttcatagcaatcattcccacttcacatctcctttttcataagtaaatatacgctctgccgtctttcctttccagcgacagtttttcaacatcagcaatgctccccggggcactctctcaaatacaagataccctttatgatcagcttgcttacgctccacagtcttccaaccattatcccaatatcttaactcaaattcatccggacagaacaactgtgttttcaggtaagaagtcattccaatatgactgaccatatactcttttcccagatctatatctaccagcctttctgccaccctgcctcgatagcccgtcgcccccaaaccatcggttatcatcccgggcacttcattccttccggtagccctcatcggagtaattatcctcacattcccgatccgtccttcttccgtataaaaagaaagctcccccaaagcaatgctatccgacggtaataataaccttacaaaacggtaaggtaatcgtgcggacaccttccgtacaaccgactgcagagccagcgagtccgtccatctgcacagttcttcttctgattttccatcaagtaatcctactatccggcttcctttcatacaccccagatattccctattctgatcataagccggcgctcccgtcaccatcctcacggcaacctcctctgttccttcatttccgctcagcttctccatcgttccgtcattccgcaatctgaaaggttctgctgcgggcaataatcctccccgcttgtaataaacgggtaaataaaccatgtccttacccatttcccgaaagacagccctcccattttctatctttgcccactgcacagggtgccagtcctgatatccgaacacagccaaatacgcatatttcaccccttgaggcgcctcacctgtcaactccaccgttacatcggccgtttcaaaatactccgaagaaacatccacctttttcacactacgaaatagctccggaatatcagctttatccacctctacatctgccaacggtccttcaatatgatttgagtaggtatatctgtataccttcggaaggcggaatcttccccaaagttcatcatcatcccggttattataaatccgcttatatttccagcgatcattatcccaaaacgcctcaaaagcatgcgattccccgtttattagcaccacattccaggtatgcgaattatttcggtttccccatgccggaacaaagtcaatggcaaccggaatccccaatgatgataataacaaagagttataccaacagcgctgtgcacataacccatgacgcatcttctcaagagtcaccgcattccatatcggaatcttcgtcccccaaaaaccggaatgagtcagatacttatattcatataacaacgaatcgatctcttgttgccaatcctttccctctttcacaaaatactttccctgatgccgtttgttgaactcccggcgtgcattgtcaatcaataagccattctgtcgcctataaggcagtatatactcacaaaaatcttcaaacgaacagtttcttgaatgcacattctccacccatgcccgaaatgccagatcaatttcccggattaaatcttccgccttcatgcgggtaatatcatagttaagttcctgccttacccgatgtcgattactaaaatccttccaaagactatctacctgtttcccccattccgttcctacccgatagtcatacttttgtcccaatgaatcataagcctcgtaaaaagcagaacaatcctgctctactatcggattagctccataacttccgggcatattgccaatcaagaagcgtgccgcctccagcttccggccatctccttcataatgcttcagcaccgcttcaagttcattacggttattgcccgaaagggataaggcctcctccacttgtctgtctctacccccgcatgagcagacaagcagaagcaagcctaacccaatatatttcataattttcatattcatataactcttttcaccacggagcatcacagagccttttattaataatcaacgatttaaaatcgcctccgtgctaccctgtgtcctctgtggtgttcagattacatgttaaaacgataaatgataattttatcttcaaagttccgaactccatagatatgagttccatcaatacagaaattacctataggaaaaggtaacacatattttttcactttattcccatcccaatcaaaacagaacagttcattagacgcaaagtctgtttttgcagcctcattgtaattttgtaaaaagagtgaaaaacaaatcaagtcatccgagactgctatattttttattcctccaatactttggttataatcaattgcataaccgcctcccttcttccaggttttcggaatatgcttaaaaggactcacatagacacgatttattccatcgtcagaaacacgataaatttcgaaaatatcagaagcacgtattgaaagcacaaatttggattgtttactatttgccttcaatatacctccgaaaacgatacccttctctaaaccggacacctcacccgcatcgaaaggaagctctgccacattaggtataatatgattctgtgagtcaagagctccccaataacctttcttaaacccgcctgttactatttttttattgccaacagcattaatctccaaaaccctgaaatccacattataaggataagcctcccttgttatatccggatgttcttttttgcttaagatatcagataataataccgaaatcctttctttcttcattcgatccagaaaaacaattctcgagtcaacgatttcaaaaccagacccaaaatctataaactcttctggtccttcgcctgtacgcccccattgagataatagctccccattatttacattaataaatgaaaatgcatattcatccattgcatgctggagaattaaaatgctgtctactatttccatattcattatagctccccaaggagcattttcatctgaacaaataagattatagtctacaattttgcatactgtgtcaaatgaatagaccgaaccaacatcgttcttcctacatgaaaaaagcacaaaacacaatgaaagaaataagatatatttttgtttcatcttcgttatttttaaacaactaacgtatatttcatttttaaagtatatcaagcaaacccgtaacaccctaaccaaaaagtcagtttaactgataacaataataatgataacgctcttctccaccatccgtttcctttgtcatcaggcagagtcgttcatcattactatccaccgagatgcatacaccccatctatccagtatcactttctttacagcacgtccttcccaatcaaatacataaatttcatttgctattgccttatttttcccaatttgcccactgtaaagtgcataaacatagttttcagtggctaccccacgaagaaatcctttaggagaatcggtagagacattaacagaagacacttcgttagtagattgattctcaaataacggcgtatacgtattcaaatgtactacactttccaggcacgtgtcatttaccactttctgaatagataataaatcgcactcatacgccaagtaagcaaaacgttttttatccggcttcataataagatccccctgaaacaacaaatagtttacatcccgatttaccgcttgctctgtgtgtggaaaagggagatattgatttaaaatctctttctgattgcatttcgctatcaagccactttcaaaagtcccacttccgtaaaatatggaatccgaataagcatataccctattcattcctaacttaggagctgaaacacaatctatctttgaaagactgccttgagctaaactatcaatttgaaaagaacttatagtttgcaaagactgatcatacagtaccaaagaacgcttgcccatatctacatacatttgggatatagatagaaaatcatccggtcccatgcctttattcccaaaagcaaccatctctttccctgtattcatgttataaacatgcaccatcggattggcagtccaatctattagacacagagtggaatcataagaacacatcagatagggagctaatagttccttgtttaaactaacttccttatcactcttaagcgattgttctaaaggaaaatcatacacagttttttcttccctgccacaagaatagaaagaaagtaaaattacaaataaaacgactaaattaaatctcatattattcatatttattctataaagtcactatcccacttcaatcgggcaaatgcttccacaactctaccaaatcgacagattctatattacaatccacatctaatagatacatcttggatttggtaaacacgaatgatcttattttaaacggaaacttaaattttacaattggaactccatctttattaaaaaccagcaaatgagtggggactaaagctgaaatatcattctcttgatccattgttatatcaggtttccctatatacgtcgcaaaaatataattctgataaaccctgatatcaccaaagcccaaaagatgtttgtatttatctaatgaaatcccattcgctgatttttggattattggagatatatacatcctctcaaatactggttttatctctttctcagataaaatatcataagcagccatataagaaaagtcattagaagcataataaaccgtattatcatctatacataaatgaccaataaaaggagcgagcttattatttgcattttcctcaatgtctatcggcacccgtgcaaaagtggtaagtgtatccaaactttcgtctaacaatgtaaacaaatgttcttttccaaataaacgggcacctacaaataaaccactttgtagacgacaaatctgataataaaattctgaattcattttaggactaacatcttcaagacacttatattgcaaactatcattatgatttgatagtaaataagtcattcgccttgttctagaacgttcagaaacataaatagtatcattgcaatgtcctatatatccaggagtgatacattctccaaaaccatttcctttttgcaagaagtgtcccagttcggaagcattcgattcacataaaaccaatgctccagacgaaggatctccattgaaaagaaagaataatgaatcaatcatttcaaaaggaaatgcacctctagcaattacttcgtctttattaatcctattagttttaatatctatagaattcattgacagaatatttgctatatgctctttcctatctgaacaagaacaaacaagaattaaaataaaaaacgatacaattttattcataataataaattaggggataaaattgactagtcaaaactaatatttctatccccactttttataagaatcagtactttgttttttggtcaaaataagtttctagataattcccatttggggtcactatcaaaacagagcaataacgattagatgcactgacacaatcctcatcattaatctcagaaccagctaacgcctctacattggccatcgtcaaatccgacatgatactttctactctctgtgactgatatatattgtagcctgcaaaagttgcgactacagcgactatcaaagacaaataagacaactggcagcactcgccctatagaaatttatttcattatgctccaattatttagcatttccagttatctttaattccaaaggagaagcggaagcattgcaatatagtataatagttttattaaagtgttccggatggtctgctttataagttactttaactgctaaagactttccgggctgaacgggttctttggaatattcaacagaagtacatccgcaagatgtcttattatcataaacgaccaaattattattaccaatattgtgtatctcaaaagttatatgctgctctcgtctccaatcaaaactccccaaatcaaccatatcttcctctatttttatcactgttcgcatatttgaaagagaatctccatctattcctcctgaaataagatggatatagagttctcttacatcgtaattatggaccggatttcctatcgcaattacatgattgtttttatctaataaaaaagtttgaaaatttagctgtgaaggaaacttattcactttattaaaagtatcttccgtatccatacaaacaggataatcaaaacgattttgttttaacacagacctcatctcgcgaacattagcaggatgaagaaaaaaaagaaccggtatttgatagcctactatagaatccgcatatttcataaattccttccatttaggcaattgcaatttacagctggaacaacccaacgaatcgacataggtcacgatcttataatccgaaacagggattttaaaatcgacaggagtttttccatataacgtaaaactaggatttgtcggaaatagtacctccttcccattccaatttttaacaagttcttcaagtttttccttctcggtctgctgacatgagattagaaagaaaaaacaacctaacaccagtataagatttttcatttgaaataaaatttgattaaacaggggttatcatcttctaaacgctcttccagcttcttatattcctccggaggaagcactttttcatagtttggaaagtcttcattgaaaacaatacaagtcaggaaatcttcattaaaagctaaaggttcaaaatgaatgccttctgttgttttttcaaaaaagaaactcttactgtcttccttccgataaaatagatttttcgaatgcttaagcccgaacaccaacatgatataatagaatttatcattctgatattgatcgcataaaaaataaggcacagtagaatcacgtaaatactgcaacattaatttatattcttcaacctttttatcctctaataaagtgaatccatactccttcaaatcaagattatcttttccaaaatcccaacggtatgcaacccgtaagctatctgtccttacttcatatacttcattttgataaggattcgaaaaatatattttatgttcataattataaaaaggtttagaattcagagtagtgagaacgggaggaacatgccaaaattctttcacattcttggaagactctttagaaataacgctgatacaattatcattctcagaggcaggaagtgtccatgtaacgaaatacttactctccagctcctctatcaattgataatttgccctcgttggcagttttatttcttttatgaattttccatccagagaatacacataaagagagccaaatggagatagcatatacactgcattttctttttctttaataacggcatcgtatatttcacgatactctccgggaccttgtccctttttacctattttatgcaaaagatgcccttcttcatcaaaagaaaacacagccggaaccccttcatcgacaatataatatctgttatcttttataataacttttacaggccttacaagaaaggaactatcattggtttccaatggaatgacagatattttagagaataattcttccgttggaacagggcgttcaaccaaatcgacatgtaatacttcacagtcggttttatctccagtgcttttacatgaaaaaagtataaacaagagaaggattaacgagatattcttcataactttattagattagattaacaatacaggaagttataccaagaaattcgtagtaatcatcccttttcctgtatttaaaaaaagaaatgaagaaactctaaacttttggtataacttcctcttaatagttagcaggtacaagaatatgtttgactaccgtcaaaatgacagtttccccacttatcataaaccttgtagcaacgtcctactccgtcagaacacgtacgggagcaagtgatagtagcaccgccctcagtatcgcctgccaatgcttcgacattagctatcaccaagtctgaaactattttctctgttttctgtgactgatatatattgtagcctgcaaaagttgcgactacagcgactatcagggccgcaaaaatctttttactcataatctacttttatgatgttaattatttttctcccatgtctctctttcggggagccacctcctccgtaaaaaaagtaaatgctacatttactcattccaattattttttcgctatcttcgtgccgggcaacctccttttttaaaggttatccgggagtgaacgattctaagacttttcccggacgtagatcgtccactccctttctaacccaagttaataatgcaatgaatgattctagtgtgataagatttatataaaagagcactcactccccaagactaaatccttgaaccacatattctactttaatatggttaataggacaatctacagatccgtcacccaagcaacctaaattggtaacgtgttcactaccggcaagcgcctctacattttgcaagaataaggaatttactctcttaggagttttcgcggcaggccaatacccgaccaaggctattaaaccaagcccaaagatcaatttcatatagtttttcatggtttcaaagtataagtgttaataactggcagcaaaggtaaaaagagattttggataaactgctatcaattttattgccatttattgccatttatgtcaaatcattatcaacaaggtcgtctatgaacaacatacgataacgatcgcttccaaaacgcctgaaacaaacaccacaaccagcttgctctaatctcttccctaatttgtttccggcagaacaaaacgtatttatctgaacgttcgattgacctttccaaataaacttaataatatcctcatcagtcacagtataatcgggagcatctaaaaaaagctttagaatctgacactgttggggggacaaagacattttcttgccattacaattaagaactctattctgggcatcaaaaacaactccataacgtaaaccatatagttgtccttctactttacaaatttgctttattaaaggtgcctttttttccggagatgtttctttttcaactattatctcacgaatgacctctttctcaacaacgacttccttttcaacgacaacctcataaggaacctcttttaattccggagggcgattcacctttttataataaaagcagataaataaaagcatcaataacaaacaaattacaatccatccaaaaggttgccaatgataccataatattgttttccaactaaaagctaaaagaccgatgacctctatctcacaacgattacctatatatgaagttataatcccagaagaagtatcccacacaccatcgtgacttgatgaactaataatctttccttgaagattttccatccgcacatgtatagtggactctgtatcaatgtgatctttcttaagcatactctgccaatgttcatttaaagaatccggcaataaatgggatttctcacataatatagagtgtattgaccggtttctcaggttctgagaaatgttctttttacttttcagggaatcaacctcatactcttttttcccctcttctgtgataatgcaaattttcaaaggtaaagtatcagatgaactctcagaaaacagatgaaatagatttaaatttctttcttttctttctatctcttcttgaagcatctgtacgaatagcctctccgcctgttgatgtacagccaccttatttcgttgatagaaataggctccaaccaatagtgataggattatcactccaataacacacgaaagcaatttattttttgtcatttcgatttattttaccgacaaaaataatattatttcttaacaagaagctaaaatatagaaaaaattaaataacaaatttagggatatacaaaacagtttgtaagtattctgttcatttcacacgcaaacaagaactcttgtacgagtcaactaattccaatattcctccaagatagattgcattcagtaccgtttcaaattcatcacggttattgcccgaaaataacaaagcctcctcccgcttgtctgttccatccctgcataaagaaaaattagaaaaacaaaaaatatacatatcaagcaaccccgtaacaccctaataaaaaagtcagtttaactgataacaataataatgataacgctcttctccaccatccgtttcctttgtcatcaggcagagtcgctcatcattactatccaccgagatgcatatatcccatctatccagtatcactttctttacaatagtacctccttcccattccaatttttaacaagttcttcaagtctttccttctcggtctgctgacatgagattagaaagaaaaaacaacctaacaccagtataagatttttcatttaaaataaaatttgattaaacaggggttatcatcttctaaacgctcttccagcttcttatattcctccgaaggaagcactttttcatagtttggaaagtcttcattgaaaacaatacaagtcagaaaatcttcattaaaggctaaaggatggagcaaaacaccttccgctgttttctcaaaaaagaaactcttgccgtcatcctttcgataaaacagatttatccgatgccgaaagccaaacgtcaacatggtataataatattttttattctgaaattgatgccttaataaataaggtacagtagaatcacgtaaacactgcaacattaatttatattcctcaaccttttgatcctctaataaagtgaatccatactccttcaaatcaagattatcttttccaaaatcccaacggtatgcaacccgtaagctatctgtccttacttcatatacttcattttgataaggattcgaaaaatatattttatgttcataattataaaaaggtttagaattcagagtagtgagaacgggagggacatgccaaaattctttcacattattgaaagactctttagaaataacgctgatacaattttcattctcagaagcaggtaatgtccatgtaacgaaatacttactatccagctcctctatcaattgataattcgacctagttggcagttttatttcttttatgaattttccatccagagaatacacataaagagagccaaatggagacagcatatacactgtattttctttttctttaataacggcatcgtatatttcacgatactctccgggaccttgtccctttttacctattttatgcaaaagatgcccttcttcatcaaaagaaaacacagccggaaccccttcatcgacaatataatatctgttatcttttataataactttcacaggccttacaagaaaggaactatcattggtttccaatggaatgacagatattttagaaaataattcttctgttggaacagggcgttcaaccaaatcgacatgtaatacttcacagtcggttttatctccagtgcttctacatgaaaaaagtataaacaagagaagtgttaacaagatattcttcataattttattacattaaattaacaatacaggaagttataccaagaaaattgtagtaatcatctcctctcctgtattttaaaaaaggaaatgaagaaactctaaacttttgatataacttcttcttaatagttagcaggcacaagaatatgtttgactaccgtcaaaatgacagtttccctaatcatcataaaccttgtagcaacgtcctactccatcagaacacgtatgggagcaaggatatttcgggtagccacctccgccgtagaaaaagtaaatgctacatttactcattccaataaatttttcgctatcttcgtgccgggcaacctccttttttaaaggttatccgggagtgaacgattctaagacttttcccaggacgtagatcgttccactccctttctaaccctaattgataatgcaatgaatgattctagtgtgatgagatttatataaaatgaatcctcactccccaagactaaatccttgaaccacatgttctactttgatatggttaataggacaatctacagacccgtcacccaagcaacctaaattggtaacgtgttcactgccggcaagcgcctctacattttgcaagaatagggaatttactctcctagaaattttcgtggtaggccaatacccgatcaagactattaacccaaagattaatttcatatagtttttcatggcttcaaagtataagtgttaataactggcagcaaaggtaaaaagagattttggataaactgctatcaattttattgccatttatatcaaatcattgccaacaagatcctctatgaacaacatacgataacaatcggttccaaaacgcctgaagcaaacgtcacaaccaacttactccaatctcttccctaatttgtttccggcagaacaaaacgtatttatctgaatactcgtttcgtctttccaaataaacttaatgatatcctcatcactcaccgtataatcgggagcatttaaaataataaattgaaaaatattacacagattgaacatccagacaccgctgattcaaaaactctatagccaatgctcttcagctattgctgcttactgtttctttgaaaagaagcctgccattgatgtatgtttatcaagctccaaccaatggtgatagggttatcactccaatgacatgtgaaagacctaccaatctgagtcgtttcattgaaaacaacatatttaggtattgccccttcggcaataccatatttaggctcgtaaatataaagtatctttgccaatgataaggaacaattatcatccaaatcaaacaattccaatactcctccaagataggttgcattcaacatctttgtcctgtcaggtcttaatttgattttggtattgctacagaaaactgaccagacttcttcgtcatcgttcgtatttacacaatcagagaaagaattgtataattgagtaacctttccatcttttaataatccaaaccgaaggcccttatgatttgcttttaccagaaagtttgaatctttaagagaaagcatatcatagattattgtaggcacttcggtttgaggcaagctatcataattcacctgtataacctcagatttcaatgaatctttcaaaaaagaagaaacatcatatttcactattttacgtaatgacgtatcgtaggcatacatgatttttctatcttcagataaattgaatgattccacatttataaagtcaataggaccttgccctttttctccaaatgattttatgggtacaccctttagagtaaatagatggaagaaattattattaacattatccaataccagtagcattgagtctatacattctatttgcaaaggatacgaaaataaaaacgtatcatttaaaacaaccagttctcgcgatatgctatcgctacaaatcactctgtttgaaaactcaatcttctcttttgtcgagtgacatcctaaaagaatagtctctattaagattaatatactgatatattttcccatgatctttttaatttagagctgactataatatttttatctttgctatagctctatttctaaagtatttaaaatccagctcccttcctctaaatctactccattttcaaaaaggttattgagtacaaccttaatcgtttaattagtactcatatacaacctctaccttatcatggctaacaggacaatctacagagcctcgccaataacaatgaatctgtgaaggctcttctccacttgccaaagcttcgacattctgcaacaagagagtatcttgagatttttttgtcggctttaagcaccaaaccgaaaggacagcgacccaaaatacagttactttcaaatagtttttcattttcataagatatacgttttaattattcacagcaaagttaaaagctattgatcaatataacaccattttttgcattacaatttattacataatataaaagtttccctaaatcacctcttttcaggcagtactagttggtatttattaatatccttctgaaaaatagaaatttcaggatctatacttagcgcaacacgtaaacgagaaattgcgactcgcaaacgaatcatatccccagtaccatcttcccataaatatcgcaagagctcctcataagttaaaatatactcggaagcattcagaaaagcatccaacagttgacatgcttgtgaagtaagagatattgtttggtcgctacaaattaatacctttgcataagaatcgaaagtaacttttggactcaatctgtaaagtaatggttccttcccagattcccttaattctttcagtttttgaatttgattctcatactctttcagtattttctccatactttttctctcttcctcgtattcttcgccttttgctgaaaagtcttttatccgtttttcatattctttttgttttacctccaaccttttctgatccttttccaattgtatacgaacctttctttcacgatctcggtcattagctaaatgttttttatcatttcgaattttagatatatacttctttatcaaataccaactacagagaataatgataagaacagccgtcacactccatataacttcaaatgggatactatgatactgatatacggcccatcttaaataagagcaaaaagctataacctcgatttcgcatctatttcccacataaaaagtgaatttatgcgttccaaaacaataatctttgcaattcttacatttacaataagaaatagtattatctaaatgagttgtggttatatgtacatcggttttagcaaaaatttgctggcttttaagccttctattccaaagcaaatttaaagtatctgtagacaaacgactcttcatacaagcagctgaatgccaagaccgctctgccatactttgagaaatattctttttactctttttagcatcaacagtaaaagtcttgactcccttacttgttgtaacacgaatcgttaaaggaatagtatcgattgttactttggagatataaaatagattcaattcttgctgctttctgtgtagttcctcattcaaaacttccttcagaagatactcggtttcggcatacattgcttccatgttcctctgatagaagtgcatactaattaaaaatgcttgcatcaatatcccaaaaatccataaaaataacctagaacgtttcatcactgtttgtttttgcaaacaaatgtaatactttacaatattatctcaaagttccctcatagatttcactgactgacagagaataaactcacaattggcccattgttgatgctggtaagcaggccttcaaatatttgcctcaaacaggcacaaaaaagcagatgtttgccactgtcttatttttcatatcaaattcagattactttaatattttccctttaaaaagaaacctttacattatgggtatatttcagtgtattacaatttattacatagtattacaatgtcgatatttaccccatatacaggtaataataagtaataatctatatttaacctcaattagcacatcgaattaacacttgacacaatcgcatcagcccttgattatactactatttttatgaatttggattgaccaagatatccctttcaatcaaaaaaaaatcatcatatccaaaaatcaaaaacagatattttcatcagtatatcagccacttataatccaaaagatagttgcataagacaggtattacatatagagaagaggcatccctaaattgaatctgattcaactagagaaaataccccgttggaggtttctttctacccacccaataagccctatatagcatcttcaatatagccaatcgacatctaaataggaataaaaaacatataaaataggaccattcgggcataaaagagagaaagagacttgacaattcaaaataataaataactcctcatgacaaaaggatctttattacgaaaaagatatacatcgcaattctgcaccaaatattacccatttcttttgaaagattatacccaatcaggatgttcaaaaaatcatatacttgcagcaacaacaatagttaagatattcataggaataaaaaatgtataaaaaaccatagatcaaataggaacataaaattaaaatttatctagctataattatgaaatcaattctcactttcttactaattatcttaatggacatacaatttaattacgcatgcccttgtagcccaaccaatacacttattgaaatgaatgaaagtttcgcgagtcagtttcaaacggccaccattattccaatgttcttatggcaaccgtcatggtcttatcctattgagggcctggcaatagggttacttatctcccttatcgtatattaccgaatggtatacagcacaaagctatttcctcacgaaaagctgagactgatcttaaacataacccataaaactcagacaccgttaactttgatccaccacctactggaagaaatcatttcggacagtctctccgaatctacatcccaaaaagtaaagcggatacttagatacaccagtcatattatgagttgctaccagaacattgcggtattcgacgataaggagaatgaactgcacccgggctcctctcccattgaattcgaactttacacttttataacctcaatcgtcaaccaatgccgggcgtacgccgatactcgtcaaataaaattaaatattaataaagacttcagttatatcagttgccgggtggacgaaataacgatgactgccgctctgcaatgcctgctgaataaaatgatagaagccacaccttgcaaaggctgcataaatatggacgtgtcacacagcatcaagcattggaacctccagataaccaatggaccggaatgcaggcaaagtcacaaaaagatgctttcgttcatctctacatttatgttaatacactattgcggaagtcttcaaattataaaaaagataatccgcttacatggtggaaagttgattggcagctatcacggacggtcaataactctccgggttactgtacctatcaacggatattgtaataccatccaatgtccggaagtagtgcctcctgtaatgaaagatgataaaatcatccgtcccgataaaaaacagcatcacatactgttggttatggcagatacagagttaagcaactatttgcataaggcgttctccatacttttcagaataacgatccttgaaaatccggaacagatattacatttctcgggagatcggctaccggatattatcgttattgacgaaacggtaaacggcatacgcggcaaggaaatctgttctaaaataaaatcgaatacaagcatggttcatattcctgtcattctcctgatcagtaacaatgataacggaagttatcttgcccatgcggactgtggagtagataaattggaaccccgcgcaatcaatatttgcagactcaaaatggatatacaaatacttatcaataagcatgaacgtatcatgaaactcctggagaaaaacctgtcggacaatctgccttcaccaactgcaaaaagtgaagaggacgcactgttcataaacaaagtgaacaagcttctggaaaagaatctttcaacagaaagctatacagttgacatgttaagtgccgatatgggaatgtgtcgtaccaaattctacaccaaaataaaagaaattacagacaagacacctacagaatacatgcattatttcaaaatgaataaagctaaaattttattggttacccaacaatatacagttacggaaatagccacttttctaggcttttgtaatgccaaatatttcggaaaacgatttaagaaattctataaagttccacctacacaatatattaaagaggttttctaaagttatacggctttatactcctttcaaaaagcaaattcagaagaaaacaagttaataatcttcttttcataacacgcttacaataagaatgttacttctttatatggcatcattatctgagtccatatacccgggctcatcggcccgcatacccgggctgatgggcctgtgtacccgggacgatgggcacaggtatgcgggacgagataaagaaaagaccattttcactaaagataacgagaaaaacaaaatacaataatggatataaacagataaaaatccgaatttttatctgtttatcagaaatttatgatctattcggtccttaaaaacaggaggtggaagatggaagatcaaaatacattttcgtaggaaattttgaaatctacgatcaaaagcccgaatgttcattcttattttcatatgaatcgatttccctgtttttctcaccggaataattccattcaatctcgtcagtatattccttccccttagttgagactacagctttcagtatattttttccgtcggcaagtgatacattgtcaaacacataatgtacatcggtatagccattgcgaatgccactcagttcctgtccattcaagtatactttcggaattccgatattggaataaacggtaacggctgtcgttcgcttttcacgatcggcattgcgacgctgtgtgagatagagcaccggctcttcgctccagttggctttataccagaaataagagtctttctttgttttacgatcgaaggtaatcagccccttcatgttacgggcaggcacaccgccacgagtccacataggtacggcaaaatcgaacatattccagagataagaagcaatgatgtacggatggtctttgataatactccactggtattcatgtgtcttagtctgaaatgtttccggataaaaaggctttccccaattcagggcatccccaaggtattcggtctgatgagccagattcgcatcggcaccatattcggtcaacatcaatttttgatagggatagtctttttcaagttgttccacccatggcttgatgtcctgtatctttttctcgtaccagccaaaataacggttcataccctgtatgtctgcgttcaggttgaccggatgatccatgtgaccatacccattgaccgaaacggtgtaacggtccggatcttctgtcttggcaagatcatggagagaacgggtcaatgcagctgtatactcatgtggttgatatacttcattgtgaagcccccatacataaatggaaggatgattgaaactctggcggatcaattcgcgaagctggctttgcgcattctcagtttcgtatccggtcacccggttcacgcaaggtatttcggcccaaataatcagtcccaatgtatcacagcgggaataaaggtagtctgattgctggtagtgggcaaaacggacagtagtggctcccacatccataatggcagccaaatcgaaatcgtgatgttcgtttttaagggcgctacccaatccccaccaatcctgatgacgggtcacaccatacatcgggtacttctctccgttcaggaaaaagcctttcccggctactatctcatacttacgcaccccgagaggctgcaccacttcatcgattacttttccgtctgccatcagcctgcagacaactttataaagatacggatctttacgtccctgccagagatgtgggttcttcagtttaaaagtggacaaataagtttgtgttccttgcggactcaagtcaaacgaccggctgtgtgtaccgactttctgaccctcctgcgtataaatagtgttttcgagtgttacagcagcaggttgaagtcctgcattatccaattttacttttacggtgatatcggccgatttcttcgatacatccttttgggtgatgtagacacccggcgaggcacaatcggtaaccgttatgttattctgttcggttacaatcagccatacgggacgataaataccgccgtagacaccgaaaaggttttgattgaccggaattacatcgggacgggctttattgtcggctttaacaatgatttcattctcggcaccgagtttgagcgctgtacctatttcgcatgcaaaggcagaataaccacctttgtgcgtacctgccagtttcccgttgacatacacttcggcacaggctcctaccccttcgaaacgcaaaaaaacacgcttaccctccaggtcgtggggaaagaactgtgttttgcggtagtagcctgccccttcgtagaaagagcccgactgtacctgcatatccatggcattccaggtatgtggaatttcgaccgtttcccactttccatcccattgggaggcggcccgcatcggatctgtagcaaaaggacctttcttaaattgccagccggtattgaaagccgtgacctgacgtgccatcagaggaatgacaccactgcacaggcataagcacacgatgattaaataagatagttttctcatgatattttattttaatggtttgttaaagcaagtgcatagcgtgacgggggtaccgttacgttaatgcgtcccgatatccgtctgctgctccggaagcctccttaacttgtagtttgattataaacggctcacccggatcttgcgaaggcatggccacattatattcattccgggcagtttcagttacctttaccacctgtccatccggcaaaacggctctttctatttcggtacctttgggaacctttactttaagaagccctgaataggggcgattaaatacaaccatgtatacctcttgccccttacgggtatagtatccccagtcctgcttatcccatccggcatagtcgcatccatatatacattcaccatacctcttcatccagcaccccaatgccatcgccaactctttctcttccgaacggaaatctccatcgggctgaggaccgaaattcactaccatatttcctcccatcgacaccgcatgcacaatgcggtcgatcacctctatcggggttttaacatagctcaacgaccaatctttgtgatatccccactgattttcaggaatagtcatacaagcctcccagtcccacttagtcacttgtaagtcttttaccggatcgggaagacgccgttcatatcccgactcataatctcccataagacggccattactgtcaaagtgcctcttaccataatcatcggcacgaagccggctattaacggtaactcccggtacaagttctttcagcatttgttcggcatgagctgtccaccaaccgttcttcttgatacttgcatcccaagttccgtcaaaccagaaatctttgactgtcggataacgggtagccagttccttcaactgatggtcggtaaaagtcagaaaacggctgaaagcaatgctgtcttctttcgatgtaatctcataacgataatccggatgactccaatccatcaccgaaaaatagaaatgtacatcgataccttcatcattgtaggctttcaccaattcacctaagatatcttttctataaggcgtctgcgctacggtatactgactgtattgactgggccagagacagaaaccttcatgatgttttgtcgtaatcttaacgtatttcactcccatctctttggccatccgggcccattgtctggcatcgaacttaacaggattccattgtttcatcaattccagccaatcggcagcagggactttagcccatgatttcagccattcggcagccccattatatactttacctttccattcgccaccgggaatagcatacagtccccaatgaataaactctcccaagcgattgttgcgaaaccgcttcatagcatcatcctgacgtttgccaatattggtagctccatattttaaaggtatctccctggagggctgttgagcataaacatggactgaaatacaaaatgcaaataaaataaataatttgttcttcatagtgttctattttctaaggtacgcacaaagataaaacaatgtagccatataacaaacaaggtgcagtcataccttcctgatgactacacctttttatcttatatacaaaaacccggattagctgaagacttcttcacccttcaatgtggcagaactggcctccgtgattctcacattcacgaaatcacctatccgatgggtaccgcggtcgaataccactaccctattctgttcggtccggccgaacagctggtcgcgtgaacgcttcgaaacaccttcaaccaacacttcgtacgttttaccgatgcaacgattattggattcggccgacaaacgattctgcaaagcaatgatttcattcagccgacggacttttatctcttcgggaacgttgtcctccagatgcttggaagcataagtaccgggacgctccgaatatttaaacataaatgctgcatcataaccacaagcttccatcaacgaaagtgattcccgatggtcttcttccgtttcggaatggaagccggaaaatatatcggtagtaagtccgcaatcgggcacaatacgtttgatcgccgctacccggtccagataccattcacgcgtatatttgcgattcatcaatttcaggatacgcgaacttccgctttgtacgggaaggtgaatgtgtttgcatacgttaggaacctgtgcaatcacctccaaggtttcatcactcatatctttgggatgcgaagtggtgaaacggacacgtattcccggtgcagcctcagccaccagacgaagtaacattgggaaagtaactacttcccccccctccttctcaaaacgataagagtttacattctgccccagcagagtgatctctttgtaaccttttgataccaaatcggccacttcattcaatatactctccacatcccggctacgttcacgtccacgggtataaggcacaatacaataggtacaaaagttattgcatccgcgcatgatggatacaaatccggagatatggttaccacagatacgcgaaggaatcacatcccggtaggtttcagtagtcgaaagttctacattcattgccttctcaccggcctctaccgaagcaatcaactcaggaagagtcagataagcatccggtcctactacaaggtccacatgatggtgttctatcagatcatcttttacccgctcggccatacaccccaatacacctacaataaggtgcttctttttcttcttcatcgaatgaaagaactccagacgattcaaaatcttctgttcggcattgtcacggatagagcaggtattcataaacaccgcatcagcctcttccagcgtttcggcaaccgaataacccgccatttgcatcacagaggcgattacttcactatctgccacattcatttggcagccataagtctcgataaacaacttcttgttgtcatcagcagttgcggatttaaagtccgctcccgtcaattcgttcataaattcagaatttaaatttgcgtccgcaaagatactgcttcatcctcaaaaagttgtaaaatgaaaccaaaataacaccttaacttatcaatttagagctaaaaggataatttatgttaatagaacaaacatttatggcgtaaggatttggcactattaattttatttcacacatttgtgcaatgaaagaaacattagattttttcatagttaaggtttaggttaaaaaaattaaggggagctgtgaagctgcccttttttcatgccaaaatattggtatcaatcagattaaatgtataactttggcggactgtagaaaataaaagtactatggatgatattgtaaaagtcctcgtcattatggctgctttcgcattacctcttatcagacagatcaaaaagagcaaaacagaaagatctgcccaaaaacctttcgtacccattccggatactgaagaaccggaagtcctgaaagtcacgcgaaaataccaaccgttacactcccaacccacttctcagaaagtggaagtaaaaaagaacaaaacagtttctcagaaaatagaaacgactccggccaacgacccggaatttactattcattcggctgaagaagcccgaaaagccattatctggtccgaaattctgaatagaaaatattgaaataattattcctaacacgaaaataatactataattatggcattcaaatccatttctgcagcagaagctgccagccttgtcaaacatggctacaacatcggcctcagcggtttcacacccgcaggaacggccaaagcggtcacttccgaaatagcaaaaatagcggaagcggaacacgcaaaaggaaatcctttccaaatcggcatctttaccggagcctctaccggagattcatgtgacggtatattatcacgtgtaaaagccatccgctatcgtgccccttacactaccaaccccgatttccgtaaagctgtgaacaacggtgagattgcctataatgacattcacctttcacaaatggcacaagaggtacgctacggattcatgggaaaagtgaatgtagccattatcgaagcctgcgaagtaactccggacggaaaaatttatctgacggctgccggcggaattgctccgaccgtctgccgcctggccgaccagatcattgtcgaactgaacagtgcacacagcaaaaacatgatgggaatgcatgacgtatacgaaccactcgatccgccttatcgccgtgaaattccgatctataaaccaagtgaccgcatcggactaccttacatacaggtcgatccgaaaaaaatcgtaggtatagtagagacaaactggcccgacgaagcccgctcatttgcagcagccgatcctatcaccgataaaatcggccagaacgtagccgacttcctggctgccgatatgaaacgcggtatcattccttctacattccttccgttacaatcgggagtaggcaacatcgccaatgcagttttgggtgcattgggacgtgaccaaacaattcctgccttcgaaatgtatactgaggttatccagaactctgtgatcggtttgattcgcgaaggacgtgtaaaattcggcagtgcctgttcgctgaccgtaaccaacgattgtctgcagggtatatatgacgatatggactttttccgtgataaactgatcctccgtccgtcagaaatctctaacagccccgaagtagttcgccgtttaggcatcatctctatcaatacagccattgaagcggatatctatggtaatgtaaactctacccacattggcggaaccaaaatgatgaacggtatcggcggttcgggcgactttacacgtaatgcgtacatctctatcttcacttgtccgtcagtggctaaggaaggtaagatcagttctatcgttccgatggtttctcacctggatcatagcgaacactctgtcaacatcgttattaccgaacagggagtagccgatctgcgcggtaagagtccgaaagagagagcacaagcaatcatcgagaattgtgcacacccggattacaaacagattttatgggattacctgaaactggcaggtaataagtcacagactcctcatgccattcaagccgctttaggaatgcacgccgaactggctaaaagcggagacatgaaaaacgtgaactgggcagaatatgaacgatgaaccattaatggtaaaccgttaacgatcaatgggacgatgaaccgactgtggtttccacagagggttcatcgttcgtcattgatggtttgccagtatctcacatactttattttgaaaattccttgctttagcggctgaaagtatattctggttcattatggcaaaagccacttggtgtccattagccatcttaagataaccggctaatgtattgatagcagtataagaaccggtcttggcatgtacattcttaaacgccgccccttgtttcatccgattttttaatgttccatcgatgcctgcaaccggaagggccttatataatttccggaaaatatctgtccgcgaataagcaaacttcagaaaatcaaccagtagggcaggagagaggtagtcgtagttggacaatccacaaccatcagctatcttatagttatccggatcatgtcccaaatcctgaatcaaccgatatatttcctcaattccgtccttagccgaaacctgcttcttacctgtagcccgggcacctaaacggcaaagcagtgcttccgcactcaaattatcactctctttcataatctggtctatcacatcctgaaccgggcactcccaacgtgccatacagatagaaagactgtcagaccggaaactgtcgaaagcataatgattggaaatctctatacctttattacgtaaacgttcgacaaaagtatgcatgaaaaagtcctgcgaagaatatacatttacatcacctattcttctattctctacatttccactgacaataagattatttttattttccaaccaacctcttgacacagaaaacttaccggcagaggatgtacgtgttttagtttcattggtcatagtataataagacgatgacggctcaaagcttaaacgtgccgagtcacctcgtgtcgcccccggaacagctgtcactttcaccatgcctttatgatacattaatggtgatagataaggttgaaaagaggagggagtatcatcccatgcccaaccgcttccccaatagagagaatctttcatcgatatatctccgtagatattccctttcaataccgagaaagggaaagtaatcacctcttctaccaatgcattcattccttcatcatcaaactccggatcgaatccgccaaccacatagatatctcctcgaagtgtatcatgttctattgtacctttataccacacttcagtacgaaaaggttcatctgcgtccggccgggcaagcgcagtaatggtagtcaaaagtttcatggtagatgccggacgcgaaagtttggtatcacgataggtgtaaagtgcctttcgggcagtcaggtcatacacggaaataccaacctccgaaccttgaggcagttcttttttaataagtgaatcaatcgctgcaaaattggcttgtccccaagtgataatcgaaaaacaaaaagagaataaaataaataagttcagtttcttcataatgcttacaagctacgaatgacaaactacaagttacggactgcagttcgctacatgattaatctgcaccccactataatccgtaacctgcaatctgtaactcttataatgcttcacggaaaatctcggcaaccgtaggatgtgggaaaacaatcttcttccactcggctgccttcagtttcatttctacagccatccctgccaacgtgataatctcagaagcaggattacccaaaacatgtgctcccaaaatagtatcatcctcgccaagtagcaccttacatactccattcactccttcattctcagcaacaaaacgtccggaatatgccatgggaagttttacggcacggtaagcaatgccttttgcagtcagagattcttctgtctgcccgacaccggctatttcaggattagtataaactaccccggggatagcggcataactcatcctatcttcttttccaagaattgcatgtacggctacttctgcttcacggacagcagtatgtgccaataaggagaatccggttaaatcaccgcaaacatagactccgggtaacgagctttccatttgcccgttcactacaatacttccacgttctgtccgttgcaggttaaggttctcaagcccaaagccttttgtcaccggacgacgtcccacactcattaatagcttttcggcaatcacgcttcctgccccttcggcgttttcataagaaaccacagcaccttcttccgtctgtgccaatgaaacgactttggtacttaacaggaactgaatgccccgctttgcatagtcggcacgcaacagggcggaaagctctttatccatgcctcccagaatttcatccatcatctcaataacggtcaccttcacacccagactattgaaaaaggacgcaaactccataccgatcactccaccgcccacaatggcaagtgaagccggcaactccttattgtctaatgcttcacgatgtgtccaatagtttacactatcgattccgggaataggaggaataaaagtttcggaacctgtacagagaattaagttatcacattcataagtttcttcaccgcaacgaaccgtattcttgtccaaaatggttgcctctccacttataatagtaacattattggacgttaacttcgattttacccctaaaaccagtttacgtaccaccttcgatttacgagcaatgatcttaggaagatcaaaaaagacctctggaaccgttacagcatattttgacgcatgtttagcaccatcataggttttagccgaatagagtaacgtttttgtcgggatacacccttcgttcagacagacacctcctaaattttgtttctcaaaaagcaacacactcagtcctgctttcccggcagcctcagcagccgtatagccggcaggccctccaccgataataataacctggtatttcatagttcactaaattaagtttcttgttttttcaatcagttccataaattccttttctttcaccggaagtacagaagcatatttcccttttccatattctatcaatagatagttggttacagagaaacttccgaatttcatagaatgaactttccggatagaagtaatttctgcaataggaatggttttcttacggataaaacggccatgattaagtaacagcaggccgtctgccgtaacggtataaacagtatgtatgatctgttcgataacaacaatcagaaacaacatcatcagagtagctaatataatattcttacaccataagaaaccaaaagcattaacacccaatacaaccagcaggaaatattggtaccagacaatgcgagcatgaaagatacggttcattttgtcagatttttggcggaaagttagtaaatttatgaattaatggcaacgaaaagcacaacgaaaaaacttattttgtagctttgcggtgataaacactaaaacttatggttaaaaagttcgatttcctcgtaatcggttctggtatcgccggaatgagttttgccctaaaagtggcacataaaggaaaagttgcccttgtttgcaaaagcgggctggaagaagcaaacacttattttgcccaaggaggagtggcctcagtgaccaatctgctggtagacaattttgaaaaacatattgaagatacaatgattgccggtgactggatcagtgaccgtaccgctgtagaaaaagtcgtacgtgaagctcccgcacagatacaagaactgatcagttggggtgtaaacttcgataaaaacgaaaaaggagagttcgatcttcaccgggaaggaggtcattcggagtttcgtatcctgcaccataaagataataccggcgccgaaattcaggatagcctgattcgagccgtacaacaacatccgaatataacggttattgaaaatcattttgccatcgaaatcctgacacaacaccatttaggagtaaccgtcacccgtcagacaccggacatcaaatgttatggagcctacatactcgatccgaaaacagggaaagtggatacttatctggccaaagtgacattaatggcaacaggtggagtaggggctgtctaccagactacaaccaacccgcttgtagcaaccggcgacggcattgccatggtatatcgggcaaaaggaaccgtaaaagatatggaattcgtacaattccacccgacagcgctttaccatccgggcgatcgtccttctttcctcattaccgaggcgatgaggggatacggtggtgtacttcgtaccatggacgggaaagaattcatgcagaaatatgatccccgtttgtctctggcaccgcgcgatatcgtagcgcgtgctatcgataatgaaatgaaaaaccgtggagacgaccacgtctacctcgacgtaactcataaagatccggaagagactaaaaaacacttccccaatatatacgagaagtgcctgagcctgggaatcgatattaccagagaatatatccctgtagcaccatcggctcattacctttgcggaggtattaaagtggatttgaatggccaatcttctatcgagcggctatacgctgccggcgaatgttcgtgtacaggtttgcatggtggcaaccggttggcttcaaactcactgatagaagcagtggtttatgcagatgctgctgccagacattgtttatcggttatcgaccaatatacttataacgaagaaattccggaatggaatgacgaaggtacccgctcaccggaagaaatggtacttattactcaaagcatgaaagaagtcaatcagatcatgagtacctatgtaggtatcgtccgcagcgatctccggctgaaacgtgcatgggatcgtctggatatcttatatgaagagaccgaaagccttttcaagcgtagtgtagcatctaaagaaatatgtgagctgcgtaatatgatcaatgtaggttatctgattatgcgtatggccatggagcgtaaagagagccgcggtcttcactacacggtcgattatccgcatgccggtaaatagaaaaaaataactcaacagagagataaaagaaaaggtggggctatatttaagtatagctccacctttctgcaaaatgcagtctattaataattttctttcttgatttcgaagtatgcttgtggatgcagacatgccggacatacctcaggagcttctttacccacttcgatataaccacagttacggcactgccatacaacttcgccttctttagcgaatacagatgcaacttctatattttttacgaaagcaaggtatctttcttcatgccctttttctgcaatagagatattgcgatacatagcagcgatcattgggaaaccttcctgttctgcaacatctgcaaaatgcggataatccaaagaccattcttcatgttcgcctgccgctgcagcctgcaaattctgaagagtattaccgataacaccggcaggatagcttgcagtgatttcaaccatacctccttcaaggaacttaaacatacgttttgcatgctctttttcctgatcggcagtctctgtaaagatagctgcaatctgttcgtaaccttcttttttagctacacttgcaaaataagtgtaacgcattcttgcctgtgattctccagcaaatgatgtcagcaaattcttttctgtctgagtgcctttaatacttttagtcataatcttatttattttagattggtaattacgtttgtcggttatatgccgttattaataacgcaaatataaggatttagttcaaaaaacacggaactttatccattaataaaatctataagaacatagacaaaaccaatctaaaataaataagatgttcaaaaacataatattgccatttattttatgtaattttgcaacctcgactttgcaaaacggagattataacgacatttatcacattatataagtaaaagaaggaaatgaaagtgttggatttcaaaccaaggttattctctaccttgaagaactactctaaggaaacgtttatgtcagatctgatggcaggtatcatagtaggtatcgtagccttacctctggccatcgcattcggtatcgcatcaggtgtatcacccgagaaaggaattattacagctatcattgcaggattcatcatctctttgctcggaggaagcaaggtacaaatcggaggaccgaccggagcattcatcgtcatcatttatggcatcatccagcaatatggagaagcgggattaatcgtagctacactgatggccggcatactcctgatcctattaggagtatttaaattgggagcgattattaaatttattccctatccgatcattgtaggctttaccagcggtatagccgtcactatttttacaacccagattgctgacatattcggattgaatttcggtggagagaaagttccgggagactttatcggaaaatggatgatctatttccggcatttcgacacagtcaactggtggaacgctgtcgtaagtattctcagcatcatcattattgccattactccgcggttttcgaaaaagataccgggttctcttattgctattattgtggtaacgataggagtatatgtattaaagacatatgccggcattgattccatcgataccattggcgatcgttttaccatcaaatcagaattgcccgaagcagccatacccaccctcaactgggaagccatcaaggatttattcccggtggccattacaatcgctgtattgggagctatcgaatcattactatcggcaaccgtagccgacggtgtgacaggagataaacacgattcaaataccgaactgatcgcacaaggaacagccaatctgatcacaccgttatttggtggcatccccgcaaccggagccattgcccgcacaatgactaatatcaataatggcggtaaaacaccggtagccggtatcattcatgctatagttttattgctgatcctcctgtttctgatgcctctggcgcaatacatcccaatggcctgcctggcaggcgtattagtcatcgtatcatataatatgagtgagtggcgtacattcaaagcattgctgaagaatcccaaatcggatgtgaccgtattgctgatcaccttcttcctcaccattatattcgatctgactattgccatcgaagtaggtttggtgatcgcctgtatcctgtttatgcgacgtgtgatggaaacaaccgagatatctgtcatcaaagatgaaatcgatccgaatgacgaactggacattgccgtatgcgaagagcatctgataatccctgccggcgtggaggtatatgaaattaatggtccgtacttttttggtattgccaccaaatttgaagaaacaatggcacaattgggtgaccgtcctaaagtacgcatcatccgcatgcgtaaagttccattcatcgattcgaccggtattcacaacctgaccagcctttgtaaaatgtctcaaaaggaaaagatcactatcgtactctcgggagtaaacgagaaagtacacaaaacccttgagaagtcgggcttctatgaattactgggaaaacaaaacatctgcccgaatataaatgtagcgttggacagagccaaagaaattataaattaatcatctgatactatctgcacacacgaagcggatggaagtgaataaatcatcactttcatccgctttctttattatataactcaccaattctatggattccacattgcattatacctttttataggtattgtagactctttcaggtacacatacctttgcggctcgctaaattttaatattaatttaatgctgttaaatgtatgaagcaaatttatagtaccctgcttttattagttttactaatattcccatcgttactttttgccacagaaccagagtctgtcgatagagtccctgccatccgtggagtagtctatgacgaaactgatacgccattggcttcggccactgtccaaatagaaggtaccaccatcggaacaacaaccaatagtgaaggccgatttattctgcgtaatctggcacgtaaagtttacaagataaatgtcagctttgtaggatatgccactcaaacccgtacagtcgatctcacctcgagaagtgtagcgcaactctcgtttacgctcttaccggacgataatttactatcgactgtagaagtgttcggagaacgatataaacaaccgaaaaaactggatgccatcacccgcatgcctttacgtcccagtgaacagatacagagtatttctgtaatctcagaaaaatcgattaccgaacagggggcacttaccgtaaccgatgtcgcaagaaatgtacccggagttactcttttcggatcgtatggcggagtaagagaaagcatgtccatccgcggataccggggagtacctattttaaagaatggagtccggatagattccgatttccgtaccggctctgctttatccgaaatgcagggagtagaaagcatacaggtcatcaaaggttccgcagccgtcacacaaggtatcggaaacgacctcggaagtgcaggcggagtaatcaacgtagtaaccaaaacacccaagttcaccaatgaaggagaagtatctttgcgggcaggcagctggggattgttccgccccacatttgacgtacagtccgttctggataaaaatcagacgatcgctttccgtatgaacggtgccttcgaacgttcggataattatcgtccggtcatccattccaatcgcgtatacatcaacccttcattagaatggcgtccggatgacaaaacaagcgttaccatagaaatggattatctgaatgataaccgtactccttataccagttcagtcaatctatcgaaagatacggaagagaatctgtacgacatgccacacaacaaattcctgggattcaaaaacgataatgtaaacaacaagacgctgacttatgccgcacgcatcacccgccagctgacagataatatcagtgtgcgggcagcatatttcggctcttcatataaagtggataatacaagtacttccgtaaaaaccgtagtcaataaagaatataacatgcgtagaagaacgatttcacgttcattacgcgatgaccgcaactcaactttccagcttgactttatcggcagagatattttcaccggccctgttaaacatacattccaattaggattcgactacaaaaacaccgatctgtcgatcaccaattatacccctgtcaacatagacactatcaacgtactggccccgagcatctcgaatgtgctacctgttgcggttaaatttgttcccgaaaccccagtagaatccaattcttcaagttatggaataatggcacaggaagtaatgacttttaataaatatataaaggctatcctgggactgagatacagttatatcagcagtcaggacggcacaagtgcaggtcccactaccggagatgcctggaatccgatgttaggcatcatgctgactccgataaagaacattaatttgttcggttcatatacaactactaccagccttctccatgcagccagacgaatggagaacggagatgaaataggtccgtcgaagacccgccagtttgaagtgggcatcaagtccgattggctgaataaccgcctgcgctttaacctgacatatttcgatatccttactaaaaacctctcttatagtacttatcatccgggaactactcaacctaccggttattttgataaagcgggaagtctgaaaagaaaaggtattgaaaccgaattaagcggaagtatacttgaaaacctccaagtaatgatgggttacgcttatctggatgcaaaatacgaaaacagcccggcctttaaaaatggttcagccccgatgaataccccgaaacatactgctaacggatggattcaatatcgattcgacaaaggagtattaaaaagactatcagccggtataggagtctatttcgtaggtaaacgtcctgttaatgattttgcaatcaagccggacggacacggctccatgaccaacgaaaagccttttgacatgcccggttatactacaataaacgcccagctggcctatagtatccacaagtttactgcccgtgtatacctgaacaacctgttcgatgcattaggatacaattcgtattatcgcggaggttatatcaatcagatcgatccacgtaatttctcagcagtaatctcttaccatttttaaatgaagataaaaaaatattgccgttacattcacttatggctttcactaccggcagggatcctgatcagcatcatttgttttacaggcgccatccttgtattcaaagaagagcttctgacaataatgggatatgattccatccgggaaagtcctttgatgatcgtgatgaagctccatcggtggcttatggatgatacccgtacgacaggtaaaatgattgtaggtatttctaccctttttttcatctttatcctgatcagcggacttacagtatactggccgcgcaagtggaagaaaagccggttgattatagaacatcaaaaaggcagaagaaggttaatgttcgatttacactctgtactgggattatatgcagcacttatcttattagtatgtgcactcaccggattgatgtggtcatttcaatggtacagagacatcgtaagttttatctttgatgcggaagtaaaacgcggagcacctatctggaaaatagtacgtgctttacattttggcacctatgcgggaatgttttcaaagatcgtcacttttatcgctgccctgataggaacttcattacctgtcacaggatattggatgtatctgaaaagaaaaaaattactatagtccgctaccgcaaatttcacagattaacatagaaatgattattaaatctgtgaaatttgcggtgttttcaacacatcttcatggtctggaataacggttgggatcataaatcctttccggattgatcaggatacagggatttataataattgatacgcttagtccatggtctgtattcaaaaggaaatacctgttgtttttctgcccattgattccactttttttccaatgttttcactctatccgggtaacgggcagataaatcgttctgttcaaacggatcttgtaacaggttaaacagttcccacggctgcttaccattagcccgaaccaacttccagtctccggatataatgccacaggaggtttgatgttcaaaaaacaaatctcttttcgataatttctttcctttcaacgccggaagaatcgttctgcctccaggagcatcaatggcatgatttcgaaattcccggggatattcaatagaagccatatccaggcaagtgggaaaaagatcgataatatgtgtaaattcgtgacgaaccgctcccttttttccatcaggttgtccgcctccgtacatgataatcagaggagcactcgtacctccctgaaaacaccattgcttataactgcgaaatggagtattactcaaatctgcacgcaattgcgtgatcatatcgccttcattggtagcaccgttatcacttaagaataaaaatatggtattatcaaatatacctttttccttagtggcttttattacttctccgataccatcgtccataatttcaatcatggcagcataagtagccatttccgtaatccatcgttcctgctgctgcggagtaagactattccatgcgggacgttttcctccaaactctttttcaaataccggaagttctctttcaatgtcgattaagccattgcgacggatgcgttcgaagcgttgtttacgcaatacgtcatatcccgctttatacttttcccgacaagcctctactctctcttttggagcctgaaggggcagatgaggagcatagtgagccaaatacatgaacataggttcatcaaccggatgttgacggataaaactaacggcagaatcggttatggctgtggtataataatagtctttcggaaactccgtaatgcgctgcaaacccgaaaataccggtttgggagtataatagctgccccctcccgaaaggcaaccgtaatatttctcaaatccccgttcaaccggatagcttccattaggttgggtaaatgctccttcaacggtaacatgccatttaccgctcatataagtgtggtacccattttcacgaaatacctctgcgattgtaggataccggtccgatatctgtcctctgtatcccggacgatgttcatccacagcagtcatccagcccatacctacttcgtgttgatatctacctgtcagcaaagccgcccggctggggcaactgcgtcccgtatttttaaattgactgaaacgtatcccgttttccgccagaaaatcaatatgtggtgtatgtacttctccgccataacacgataaatcagaaaaccccatatcatcacacataatcagaattatattgggtttcgcttgatcaggatttgctttacggtctgttatttgagctccccaagcattctgaattcccgaagcaaacaataaggaacatatcagacaattgtttttcataaattaagctattaagattaatcttttatccatgcactcgtaatctccgccacatacacatgatgcaaacctccatgtgtagtataccattgttcatacacagacggatccagaaagttttctttccgcaacacatcagtatataatttccggcattccagactcaaccttccttgttcgaacagaacgttacctttatcggtaatcatcggtttcaatccggtctccttgatcttatccacctcacgtcccgacttagaaccacatattttatgaatacttttattctcctcccctaaaaaagaaagagtgaaataatcatttttctccataaagccgaacgtatatctttccggacgaatgaaaacataaacaaccggtttattccacagaaatccgataccaccccagttggcagtcatggtattaaaagcatctttattaccggcagttaccaacatccattctttactgatggtttcaaagaaattatcactaagttggttgacagcaattggtttcatcatatccaaatcttttttataaatgatacgtttaagaataattctcaataagaagcagatgccgaaagtccttctttcgtgagaagagccacaatacgatccaactcttcatgagtagctttttgcaagtcctgatcgggagtttcccgatcgatcgtataaatcatcacctgtcttggggcaatatcctttacaactttcaaccagggaagtacatacttgtcagaagtattatccacatctttccccttatattttcctttcataaacatagtctgcacgatgcaattacctttaaaagcttttaaaagtccgactgttccattcagatcgtatcgtccgttcggacgatctacagtccggatatactcttcatccaccgtgtccaactttaaaatgttattatccaccctgttcaacgcatcgaatacagccggacggttaataaaagtagcattactgagcacactcacctttgcatccggaaagtaagcatcacgcaaagcaagtgtatcctcgataatctccggaaagtgaggatgagcagtcggctcaccgtttccggcgaaagtcagtacgtcgggagcaggtccgttgcttttcatctcttttaatttctcttccagagccatacggactttttcgcgggtcggtaatgaagatttaggacgatgttcaccattgtaaccacattcacaataaatgcaatcgaaagaacatacttttccgtcggaaggaagcaaatttattccaagtgagacccctaaccgacgtgaatgaaccggtccgaatataggagaaggaaaaataatagtcatacttaattctgtttaatcgttcaatcttagaaactgttttgaatttctacaaaattactaaaactttagacgcagctgcatttgtacatccgtttttttatttcccctgatcaggtcgttgccggaacctatttcatcacgatcaaaatatgtggtttgtccgagcttggcaattgctgtccaatgcttgttcatatcatagcgaaaatgaatagccaagcgaacaccttctccctgaaaagatggagtataaaaagaatacagcaaccctttctcgtagatataaatgcgtgaatcataatcgtctgtatgaaaatagctaccttgcaattctgctgtcagaggcaaccagggaagtttccatccagccgtctgcgtcagttgataaccttgtccagccgtttttccggatgaatgaaaatgattataatcgactgttgtccggagagataacgaagagcagggtaaatagttcaatcgataacgcagccggtgatgataggtgggcagaatcacttttccctgcgtaccggtcacatcacgttctttttgtttataacggtaattcacatacatatcaaccgttttcgacggaacgtaatttgcctgaaagagcagatccactcctttcgaggccttacttatccggtacctccaccacggaaaagaaaacagatcggcagaaacaaaaaatgtccaacggttgaaaggatttacagaagcagccagataccatccgttttcattctgaacactacttccttcactaaatgaatgagcaaacatagcccaataatcatgggaataataacggtgaaccaacatcaaccggatatcttgtaaaggagaataaagcacctgattcataaaagccataccactgatccccaaagctgcttctccttgtatagaaaaacgatgaaaacgatatttataatccatacccagattataaaaagaacgaccatgtaggttgtattttgaatagtctttaagttccggttcataagacctgttaaaacagtagtaaacaccggttatacccagttgataactatttccggtataactgatatttcctccgctcatctgcatagtcaattgattcattttatcagcttccttttcgcttcggtgtaaacctgttttataaatcgaggtaatttcaccgccttttatcactccatccaacgaacgatgtgaataaaatacggaaagcgtccattgtttccattttagagctatgccactcccacggaaataattatattcgtcggtagaagtatgtctgcgtatacctgtactcctgaaagtgaaagacgaagaataagctgtttttccaaacatagaaccttgtccgagtaccagtccctgaccgaagttcaaccgatagtttcctacaattccagttttcagtattcctatatcatgaagaagtagatagaaagagtagtaatcgtatccctgcttattatgtaaagctccgaaaggttcgccgctatctttctcggcaactatacctgcataaaccttttcccgatagtgaaatccatatttcaccgagttataaacagcaggacccaagtaatttttctcgtatcccttacgcttatacaaaggcacatccatacgagtcaccgcttcatgttttccatattttaaaatctgctttaacgtaacagactctttcttatcaacaggctctacacagacaaaaggaagcagatattgaatagtctgccgatccaactcctccactaactgaagttcatagacagtctgcatcgatccgtgaatataaatgtacgcaagtaaattctcaatctgaacatcattaagaaaaggaaaccgctgtaactgctctttggtggcagagtttatattaacagggttgttaacaagatcggttaattcctccaattcattctcccaattacgtgtatctccttcttcatcggatatagacaagttttccatcacctcttcccaaggataatccgaacgattctgagcatggcaagtagaagttatcaacgtcatattaacaagtaggaatatactcaatatagatatgctttcgttcatatcgagtgtgattattgtgttttaaatagcaaacgaattgtcgaagataatttaaataggttaatgctgcaaggaaaaccattaatataaatttaatcctttatttttgcaaaatgaatatgaggcttaccataggacttttaatgttatctatcgccttattgttttcttccgaatcactggcacaggaaaaaacaaatctcggtggatacctggtacctatgtgtgtgtataatggtgatacaatcccggctttccagattccgaccattcatatattcaagcctttaaaattcagaaacagaaaagagcagatggaatattataaattggtgagaaatgtgaagaaagtgtatcctattgccagagaaattaaccgcaccatcattgaaacttacgaatacttacagaccctgcccaacgaaaaagcccgccaacgtcatatcaaacgggtggaaaaaggattgaaggagcaatatactccacgaatgaaaaagctctcttttgcacaaggcaaactgttgataaagctgatagaccggcaaagccatcaaagttcttatgaactggtaaaagcatttatgggaccttttaaagcaggattctatcaaacatttgccgctcttttcggagccagtttaaaaaaacaatatgaccccgaaggagaagataagttaaccgaacgagtgatactgttggtagaaagcggacaattgtaatgtatccttccagattcatttcctatactttgagtaataggttattctcaaattcatattatcttataagtgtgttataggagtgacttttgatacatgctcctagatattcttcgttaatcttgtatctgtgaagaaaccaactcaaaataatgcccctttttctccatcaatatttcatgagttccggtctcaacgataaaacctttgtccaacaccacaatttgatcagcattacgaatggtactaagcctgtgagcaataacaacaacagtacgctgttcaaatgcattgttcaaggcattcacaatttttcgttcatttattgaatccaaagagtttgtggcttcgtccataaagagaaatttcggatcccgatacagcgcacgagcaatcaacaaacgctgcttttgtcctccactcaacccgcgtccggtttctccaatggtcgtttcaaaacccttaggcatcgcgtttatctcatcctcaatctgagcgatacgacaaacttccctcaaacgcgtataattaatttgttcatcatttaatacaatattattcaagatggtatcactgaatatttttccatcttgcattaccaccccacacatgtttctccattggcgtagattaatggcacttacattcatcttgtccatttttatttctccatggctgggcttataaagccgaaccaatagtttcagaagagttgacttaccactaccacttcctcccacaattgccgtgattttattttccggtatttgtaagtaaatattacgcagaaccaaaggagagttaggcgtgtattgaaaatgtatattctctaatagaatcgtttttctttccggaaggatggttgtactgccaatagaaagtaattcatcctcattttccaactgacgaatctcgttgatgcgtaagaaactgattttggcatattgcgctgataccacaaaattaataaattgcacaagcggaccattgagcataccaataataaattgtgtagaaatcattattccaaatgttatttcacccttgataaccgccatagcacagaaaaacacgatagccatatttttgatattttctataaattgggcacccagattttgagcattggttatggcaagaacacgcttattgacatgataaagccgtgcctgaatttcttcccatttccaccgccggtacttgtcataattgtagattttgatatcctgtatagtcgaaacggtttccacccaatagctttggtttttggacaaaagttcaaaatattcccaatccagttttttacgtatgctcaaaaacagtaacacccaacaagcgtacagaaccgatcctgataaaaatatatagaaaattatagtattgtaaatcaataaaataatactaaagacggcaaatgtaagcgttgaaaatatcaatgccaaagaattattcataatgaaactgcgtatacgttcatgatcttgtgcccgttgcaaaatatcgcccagcagcttattctcaaagaaagtaacaggtagtttcatcaattttatcaagtagtcagaaatcaaagcaatatttactcgcgccgtgatatgcaataagatccaatccctcaacacattgaaaatcattacactcaacaagatacagatgttccctatcagtaccatattaataaagttcctgtccgaagttttaatgccgacatcaatcaccgctttagagataaatggtaacataccttgtaagacagtaacaacgagcataataataaatattaactcgaagctctttttatatggaaaaaaatatttaagaatgctcgaaaagctgtttctcttctgttcttgttcagctttactattcttaaaatcagtagttggttccacggcaagtaatacaccttggctttcatccctttgataccaaccctttcgaaattcttcatgcgtgtattttatgcgtccttttgctggatccgagacccatatgtatttcctatcagaatgatataccacgatgaaatgactgtcattccaaaacacaattgcaggaaacggaatgctgttcaccacatcatcaatggtacattttatggcaagcgttcgcagcccgatactttctgccccggtacttagatcaagtagcgatacaccttctttggtaatgccgcaacggtcacgcatgaactgcaatgagtaaaacttaccaaaatgcttagcaataattttaagggatgcgggtccgcagtcttgcgaatccatttggtattctacgggaaaacggtggagtagcatattcttatttttctccttttgattttaaattatcaaatagtctttcaatcaaacgttttcgtttggtgataatctcaactgtaccttttgtttcaaaatcgaggggtaatattttcccaaagttagttaatgtaccatcgggaaaagatatgattaccagataagtatccatgtctccattttgagtttttatcttgttggtaatgcgtgaaacagatttcaccactcccttcagtaatccatattcatcatatggatagttgtccatttttacgtttactgtttgcccaacttctacttttcctgcaccgaaagaaggtatcactacttcacccaagatgttagttttatcgggaatgatggagaatagctcctgcccagactgtacaaaacgattgttccgccagaaaccaagatattctaactccccttctacaggcgcatattgcaaataatgctctttccagagtttaatggcatttgaaagttcattcttccgagtaatataatcggaataggctttctctttagcctcagtttcttccaaacagatacgctgtatttccaattgattacgacttatttccgattgtttcatctgtcggttactttgcaaatttaattgtgattcttttaaagaaagatgtgtcgagaacttttgctggtattcttgttcgcttattcctttcatcgacagcaatatactgtccttactcaattggttttgagagttatccaatatttgtttttttaatcgcagctcattattaaaattagcaatgactgcttcgtcagaaataatttgttgttgcaatttttgtcgcatggttgaataaatgtcagaagtaagtaaccgctcatattgtaaaaaggaaagtaaaaaggaattgtatgcggaactgacttccccaagcaacagcgtatcgggcaatgcaacacgaattgtgcttttgtcactaagtgtcttcaaaaaagaatcaatccataaaatatgtttgtaatccgcaccactttcaatacaactaatcacatcgtttttatgcagtaatgctttattgggttgaaataacgtaatccgtccgttactgttagcgaccaaacgtaccggtgctgcatttgcggttactgatatttgtccgtctaccgtatcgggatactgtatcaaaaaaccaagtaatatgatcactcccatcagtacccctacgcatagtatcacccattttgcccagtaggtgggcatacggtcaataatggcttgtacttcctcagatctggcaatcacatcagattttttgttcggattaggcaaaataatttttggtgaacatataggttgttcctgcttttgtattcttgaattcatctttttgcctgttctttaaatttatgactaacatgatgaatcattctcaagcggtagttcgcctgagaaaaatagttgcttatcatccccggagtcccattataaacggttacgtccgaatagccaaaatctttttgaacggagatgaacggatagatagtcatcttatctttagcaaggacagataaaactccatctgccgtatcagtgtctttgaagtcatagtctaatatcttttgaaatagcggcttaaaaataatgataaattgcgtagaccaaaaccaatccatccaatagcgatttgtgtccactggtaccgctgtgccaaatcctccgacacctcccgaaagcaactcggaaccttgagcgtttgctcctattatattggcaaacaaataatctttgttatatgcgggggtaaatatatggtcgtcttcgcaaatgatcatgatatcatcccttttgtcgatagctgtttgtacagcctttagcatgctttgccataatccaactgctccaatggaatgttcgattgcctctatccaatggagagcaaactctaccctcccttgaaactgttcctctatatgttgccgccgttccgtgcgctctttaaggttgatgacatatacaggcagataaaaatcactgttgtttgttcccattattcttatgatgttcttctacaatttcttccaatattttatttactttctcgctccatacctcccaattaagacgggtttcaaattcttgccgcgatgacatccggagtttcagatagttttctttgtcagcgaaaaccgactttattttctcagcataatcttcagctgtagcatccggcatgagcaaatacccgtttttcccttcacgtaccggttgactcactccacccacattggcggcaatgctgggtacggcataagccgatgcttcacaaaacacaattccaaatgcgtcgaactctgtaggaagtactaaaaaatgagcttcctgcaagatattacaaaatctttccaaatgttccggttgggatttatctaaataaggaattataactaaattctcatcttcatcataaggttcccgaataatagaaccaataatcgtaagcgtacatcgaaatccatcggatttaagctttctatatgcccctaaaactttatctccaccttttttctgccaattttttccgataaagactaaattacaaatatctgtctgtatatctattttatagtctgaaggagtagggatatttgccccaaattccactacatgaattttacccggctctatatcataataatttattgtactttgctttgcccattccgaactataaatgatggcagtatatttattcaataatttcttctccatcatttctattttctttatctgttcttcattctttagtgggtttaagtagctttggaatgagtggtatgtcacatcactaagatgcacgaccggaacatttacatccagaaaaggagctaaatataaatctccaaaaaacacaagatcataattcgtcaattgttcggtacataatttcccgaaaacagaaacatagttctctaatggattttttttaatataattatctttggtaaaatacgctgcctgaagaagggtattctgtccaatcacttttacatgatgctttctgcttagagcgtgaaacaaatgaaatgtcgttcccgaccaattatttatatcagccggatttaatgttgttaaaaatgcaatattcatatattgagatctatttttgattgcatgaaaaaattagtttcactcacccgatc

SEQ ID NO: 5012 - DNA, 5760 bp, Unknown
  gut microbiota DNA sequence
cggaaccgtaatagaaaaaacaaaatctgaaccatttcacaaaatcaaagggaaagtaaaattatcattctactaccaaatagaatgtttttacctatttacgacttattcttatttgggaaaatttcaaaaaaggaatattatcacatatttcttctttcttaatttcattgtcagatagaacatataaaagattcttttcacactcttaacagtgatttagagcgtctgttgacagagaactaacaatttgttttcaagaaattaatttcgtatctgcacgaagttaacttcttgaaaacacaaagttaacattctgattttaatcagttaatatcttccggtagttataacgaatttatatacactactttcgccaatacagtatattattccccaatttattcatattatcttctatctgtaggataagtgataaaattacaggattcccaaacaaataaaatgctatctttttgcatcatattttatcttgtcacttactatatgtctaattgtatatttcgacaattaaaaaggagtatatcaaaaaaataaaactatatttgtaatatctataaaatttaaatcaaatgaaaaatatttttttaataattggaatatcactgttttttaatggcagcctatatgctcagtccgatgactggtctcctaaagatcataatttaattaagtctgtacgtgaggacggacgattcttaagttcttatggtgtagtgcatgccatgctcagaaatactgagccacgctatgcttttcatagtgacttttctcccaaagaatttcgaaaatggcaaaagggacttcgccatgcgatggaaaaaataatgaaatttcctcaaataaaaaactctccagctcctgtctgtataaaaagagaacagcgggaagggtatcgattagaaaaatgggaattttatccgcttcctgaatgcgtttctacttttcttgttttaatacctgataatataaacaagcccgtacctgccattttgtgtattcccggttccggaggaaataaggagggacttgcaggtgaaccggggatagctcccaaattgaatgaccggtacaaagatccgaaactgacccaagccctcaactttgtaaaagaagggtatatagcagtggcagtagataacccggctgccggagaagcctcagaccttgagagatatacattgggctctaattatgattacgatgttgtatctcgctatcttttagagttgggatggagttatttgggatatgcttcatatttggatatgcaggttttaaattggatgaagacccagaagcatattcgtaaagatcgcattgtagtaagtggattttctctgggaaccgaacctatgatggtattgggtacgcttgatacttcaatttatgcttttgtttacaatgatttcttatgtcaaactcaagaacgggcggaagtaatgactatgcctgacaaaaacggacgccgtccattccctaattctatacgccatttaatacctgatttctggaaaaattttaattttccggacatcgtagcggctttggcaccccgtcctatcatactgactgaaggaggattagatcgagacttggaccttgtgagaaaagcgtatgctatagcaggcactcccgataacgtgaaaatatatcattataagaagttctcagatccggatacacgaaaaaatgtagaatatttacctgaaggactagatcgtaatgaatattttcggatggtaaatgtagatggtcccaatcattattttaaatcagaactggttgtaccttggttgagaaaattattggaagaaagatgaaatgtagtaattgaaacttaaataaacaatcaattttaattgagtagacggaaaacaaaaacaggaagaaaagaattttgttatccgccctctcatatcaccacgtatactgttcggtacatggcgattctttatctatgatacaatttactgtaatacttcaccaaagtgggatatttcgcctgtctcagtttgtcatgattcaaatcagaggacggataaacgggatctacctttatgcaaatagatagttatcgagctctttctcgtcttaatggacggacaaaggacatgccgtatactaaacaaagtacacggcatgttggcaatcaagattaatcgtatttaataatacctattcttgttttttataagtagcataccccggagtttgataaatcaaaggatcattacccaataaggttttgtcaaccggccaaagcactttatgagcctcagttgtttcgtctaaagtaggcgtatctgttccaatgcttccctctttacaaaaaacgagatgttttcctcctttagtcaatgtcatgcgacgaatatcccaccaacgctgtccctcttgaatgaactctttatctttttcatgaagaatcgctaattcatttgtcgtataatcagagtttttatatccgtatattgcctcattccaattagtgccataagcacgtttacgaacaatattaatatattgagcaacatttcctccttgcatattctcaatttcggcaagcattaaatagacaagtggcaagcgataaataatataatcaccacaatagatacggcttccctgagcattcacataaccaatgtttttacgaacatgcgttcctcttaaggtcagctcatttgtctcaacatttttattatatgaagcaataaatgtagcttcacgtcgcgtatctgttacatcaaaactattataaatctcatgtttatattccaactgctgactaccagtattggcaatattcaatgcatcaagaaatttttcaccattagctaaataattatctttagtacttccagtagccattgcataggtgaacaaattattgttattagtggcctcaccttctgcatatctaactgcaaatatgatttcagaatttccttttccatttttggcatcaaatactgatgaaaagtcatctaacattttcagtccataattgctcaagacgttttgcaaatgtgtttttgctatttccagattcgattcattcgcagaatcatccccagtagataccttggaaatccaaagataaacctcacccatcaagcactcagtagcggctttggaccaatatccctttttatttccacgattatttggatcaaatgagttattatcaccaaaatactccatggatttatccaagtctttttttatttgatccatgacttctttgggagtagcacgcgccatgtatagtttattggggtcaataactccttctactacatctgcagtgagacgtaaaggtacaccaccataagtacgatacaagtcgaaatagtaaaaggctcttaaaccataagcttgtccaaggtaatatccttttttggtatcgtccatataggtggcatccgttactctggcgataaaaaggtttatattggtcaaccgcccaaaaatatcaccaaatttattaatgcctccagtatggtcttcgtcaaaattctgtaattttatgtcaccatataacatacccatgccatcggcactggtaccggaaggtattaaagcgccgccacgggcttctccccaaataaaagtatgttgaaaggccgcatcacgtaaatgcttatgtataccatccatatatcctattacgtgtgcttctgttttccaatatgaaccactcccgtagtaatcaatcggggaaagatctaatttatcggcacaagaagtacaaagtactccggaagacgctgccaataagccatataatattgtagattttattcttttcatatatttttctttttttaatcagttaaccattagaacgttacattcaatccaaataagagagttcttggcaatgcatatcctgatcccgcattagaaacttcaggtgtcgctacattggcagaagtaatatatcccaaattctgaccggtgattgacacatctactttttgacaatatgctttgtttgcccatgctttgggaagtgaataactcaaagaaatctccctgatagccaaatagtttcctttgtaagcaaacatagttgagtttcgtgcataattggcgttcgttaagacatctgcatatgcataacggggatattttgcattgggattctcttctgaccaagtattgaatacctctttagttgtattataagtaccttgagcgcaagctaagaatatctcaggtaaagtgtggtcatagatccaataatccaaagcaaagtcaaaacgaccataaagttgaaaattcttccagcgcaaagtagtgttgaaaccaccgatccagtgaggagttgtattacctgctacgatttgatcataagaatcaataattccatcttcattgatatctttccatttcatgtcacccggcataataggcaacgcattcttttgctgttctttagtcaattttttccatgcttcaggaccgtacattttcttaccataataattaccggaagtaataaccaagtccccgggaatctcattccaattacgataaattccttctgacttataaacaaccattactcccggctcttttccttcctgatagccaccaacccattttttcgcatattctatttcacctttttcattggtgaacttctctcctgtatagatttgttgtccaccctggcggttaagttccagtccgttatcaggtaacgcaactactttattcttattaaatgaaatatttgcggacgcttcccaactccaatcttttgtttttagaatttttccagacagttcaatttcaacaccactattacggaattttccattgttattagtaatagaagaaaaaccggtcgttgacggtaaactaaaagcggcatacttatcagatgtcaaacgattataataggtaaagtttgcattcaagcggttttcaaagaaactcaaatccataccaacttcagccgttttcgttttttcccatctcaatcccggattaggtaaagtcccaattaggaaacctgtatttccattatatacggctgtgttataagagccttgtaaagtgtaggcgccaataccagaagcattaccgttaacaccataactagcacgcaatttaccaaatgacaagaatggaatagcttcttttatgaaattctcctgaccgaaaatccaaccagcagatacacccgggaagaatccccaacggttatcacctaataatgacgaatagccatcttgacggaatactgcagatagaagatatttactcttatagtcataatttaggcggccgaaatatgaaagaatacgatattgttcatgccaagaattaatagtacgtttcccttctccgttatctgttaagctcagatctgagaaatcatctgtcggtgcaccacttccttttgcttcaaatccacgtttgtagttatcataatattccatacctaacattaaattaacattgtggtctttggcaaaagtatgagtaaagttcaggaccgcattatacgtttgtgcaaagttacgttcaaacttggcagtacttgtgcgtgttttagtataatgctcagtcaacatattatccatataatctttagtgaaagattcatataagccttcagaataataccagtttgctgtacctttgataaacagccctttcatgatatcaatctgaaatccttgaatcatggtaaacttatctgtttgattaaaggtttgccat

SEQ ID NO: 5013 - DNA, 56750 bp, Unknown
  gut microbiota DNA sequence
cgtgaaggtggcgaccgtccctaccgtccgcgctttaacagcgaaggtggtgatcgtcctcagcgctcctatggcgaccgtccgcaacgtccttcatacaatcgtgaaggcggtgaccgtccctatcgtccgagatacaataacgataacagatcgcagggattctcacgtccgatacgtcgtacgggggattacgatccgaatgctaaatacagtaagaaaaaacagattgaatacaaagaacaatttgttgatccgaatgaaccgatccgtctgaataagttcctggctaatgcaggagtctgctctcgtcgtgaagctgatgaatttatcacggcaggtgtagtttctgtcaatggagaggttgttacagagttgggtacaaagatcaagcgcgctgatgtggtgaagtttcacgatgaaaccgttagtattgagcgtaaggtgtatgtgttgctgaacaagccgaaagattgtgtaactacttcagatgatcctcaggctcgtctgactgttatggatctggtaaaaggggcctgcgctgagcgtatttatccggtaggacgtctggaccgtaacacaacaggtgtattgctgttgactaatgatggtgatttagcttctaaactgacacatccgaaatacctgaagaaaaaaatctatcatgtatatttggataagaatctgactaaggcagatatggaccagattgcagccggtattcagctggaagatggtgaaatccatgcggatgccatcagttattctgacgaggtgaaacgtgatcaagtgggtatcgaaatccactccggaaagaatcgtatcgtccgtcgtatatttgaatcgttgggttacaaggtggtgaaacttgaccgtgtattctttgccggactgactaaaaaaggattgcgccgtggtgagtggcgttatcttacagaacaggaagttaacttcctccggatgggatcttttgaataataaaagaatttagaagatggcagtcagtggtcagtaaccgggcgtttgtcactcccggttgctgacttctggctactatatataataatgtatataaaatagttgtatggaaaagattagtagaacaaaaattgtcgacctgatgaagcgcgaagattttggcgctatggtcaatgtgaaaggatgggttcgcacccgcagaggcagcaaacaagttaactttatcgcactgaatgacggttctacaataaataacgtgcaggtcgtagtcgatctggcgaactttgatgaagagatgctgaagcaaatcacgaccggtgcttgtctgagcgtgaacggtgtgttgacggagtcggtaggcgccggacagaaggctgaagtgcaggctcgtgaaattgaagtgctgggaacttgtgacaatacgtatccgctacagaagaaagggcactctatggagtttttgcgtgagatagcccatttgcgtccgcgtaccaatacttttggagcagtattccgtattcgtcacaatatggctattgctatccataaattcttccatgaaaagggattcttctattttcatacacctatcattacagcgtctgactgtgaaggtgccggacagatgtttcaggtgactaccatgaacctgtatgatctgaaaaaagatgaaaacggttctatcgtgtatgatgatgacttctttggcaaacaagccagtttgactgtttcggggcagttggaaggtgagttagctgctaccgctttaggtgcaatctatacgtttggtcctactttccgtgccgaaaattctaacactccgcgccacttggccgagttctggatgattgaaccggaggtagctttcaacgaaattcaggagaatatggatttggctgaagagttcattaaatattgtgtgagatgggctttggataactgcgcagatgatgtgaaattcctgaacgacatgttcgataaaggattaattgaacgtttggaaggtgtacttaaagaagacttcgtccgtctgccatacacggaaggtattaaaatactggaagaagctgttgccaaaggacataaattcgaattcccggtttactggggagttgatttggcttctgaacacgagcgttatctggtggaagaccactttaaacgtccggtgatcctgactgactatccgaaggaaataaaggccttctatatgaaacagaatgaggatggtaagactgtgcgtgccatggatgtacttttccctaaaatcggagagatcattggcggttcggaacgtgagtctgattataacaaattgatgacgcgtattgaagaaatgcatattccgatgaaggatatgtggtggtatctggatactcgtaagttcggtacttgtcctcactccggattcggactgggatttgaacgcttgttgctcttcgtgacgggtatgtctaatatccgcgatgtaattccgttcccgcgtaccccacgtaatgccgatttttaatgaatcatatctgaatattcatacaaatgataagaaactcgcatattcttttgattatgcgagtttttttatgtctttagattgctatttttataaaagaaatctttatatttgtgacagacagatgaattaaagtgttaactaaaatcgtacagatatgaaaaagctttatttctttaccatgctggcggcgatgctgtttgcggtaacaaatgtgatggcacaaaaggctaactttaagccagctaatctgaaaggaatctggcaattgtgccactatgtttcagaaagtccggatgctccgggtgtacttaaaccgagtaatactttcaaagtactgagtgacgatggaagaattgtgaatttcacgattcgtcccggagcagatgctattataacggggtatggtagctacgagcagttgtcggatcatacatacgctgaaagcattgaaaagaatattcatttgccgatgctcgacaatcaggataatgttcttactttcgaactcgttgatgataaagtattgcatcttaaatattttatagagaaggatctgaatggcaatgaactgaattgctggtataaagagacttggaaacgtattgagatgccggacaaattcccggaagacattgtaagataattcagattataagatcgacttacggactgcaggtagcaagctgccgattatgtattgtagcattgatcgtgtgtggcttgttgcctgcagtctttttttgtcttgttgggcgcttttacggcagatagcttgtggctcgttatcaaccggataaatccaaaaaaagacagaaatagtttgccaattcaaagaaaagccgtacttttgcaagccgattattatctcaaaaggataagagattaattcatagcaagttaatcttcctttgtccggggaaggttgataagtggtgaagaaaatttttagtagtaacatttaaaaaacaaattaagagtggatactttaagttacaagaccatttctgcaaacaaggcaactgtaaccaaagaatgggttatcgttgatgctacagaccaaactttaggtcgtctgggagcaaaagttgcgaaactgttgagaggaaagtataaaccaaactttactcctcatgtagactgcggtgataacgttattatcatcaatgcagacaaagttaaattaagtggtaacaaatggaatgacagagtttatttgtcttatactggctacccgggtggtcagagagaaatgactcctgctcgtttgatcgccaaacctaacggtgaagacagattactgagaaaagtagtgaagggcatgcttccgaagaacagactgggagctaagttgctgagcaatatgtatgtttacgcaggtagcgaacacaaacacgatgctcagaacccgaaagcaattgatataaactcacttaaataagatataatggaagtagtaaatgcattaggcagacgtaaacgtgctattgcacgcgtattcgtaagcgaaggtacaggaaagattactattaacaagagagaccttgcagagtactttccatcaactattcttcagtatgttgttaaacaaccattgaacaagcttggtgttgctgagaagtatgacatcaaagtgaacttgtgcggtggtggttttactggtcagtctcaggctttgcgtttagctattgcccgtgcactggttaagatcaacgctgaagataagccggcacttcgttctgaaggcttcatgacacgtgatcctcgttctgttgaacgtaagaaaccgggtcagccgaaagctcgtagaagattccagttcagcaagcgttaatgggctgcctgacggaagatgtttagtatctaaactaccgggactcttactatacaggctacccggcggttggtttagaaaaaacaaaaaagaaagtaaacgatttaaagaaaaaacaagatgtcaagaacaaattttgatacattattggaagccggttgccacttcggacaccttaaaagaaagtggaaccctgcaatggctccttatatttttatggaacgcaatggtattcatatcattgacctccacaaaacagttgcaaaagttgatgaagccgcagaggctctgaaacagattgcaaaatcaggcaagaaagtcctttttgttgctactaaaaaacaagctaaacaggtagtggctgaaaaagctgcatctgtaaatatgccttatgttatcgaacgttggccgggtggtatgttgactaacttccctactatccgtaaggcagtgaagaagatgactactatcgacaagttgactgctgatggtacttactcaaacttgtcaaagagagaaattcttcagatttctcgtcagcgtgctaagctggacaagactttgggttctatcgctgacctgactcgtctgccgtctgctttgttcgttatcgatgtaatgaaagaaaatatcgctgttcgcgaagctaaccgtttgggtattcctgtatttggtatcgttgatactaactcggatcctacaaacattgacttcgtaattccggcaaatgatgacgctactaaatcagtagaagttatcctcgatgcttgctgtgctgcaatgatcgaaggtttggaagaaagaaaagctgaaaagatcgatatggaagctgccggtgaagctcctgctaacaagggcaaaaagaaatcagctaaggctagactcgataaatctgacgaagaagcaatcaacgcagctaaagctgctgctttcctgaaagaagacgaagaggcttaatataataatgtgccaatttgctaatgtgccgacgcatctgtaagggtgtgggcattttgattggcagattggcacattttgtttattcaaaacgattattcattttaaaatataaaagatattatggctgtaacaatggctgatataaccaagctccgcaaaatgaccggtgctggtatgatggactgcaaaaatgcgttgactgatgctgaaggcgatttcgacaaagcaatgaagatcatccgcgaaaaaggacaggcagttgctgcaaaacgttctgaccgtgaggcttctgaaggttgtgttttggtaaaagtagaagaaggtttcggtgctatcatcgctttgaagtgcgaaactgactttgttgctcagaatgctgacttcgtgaaactgactcaggatattctagacgctgctgtagctaacaagtgcaagactctggaagaagttttggctcttccgatgggtgatgctactgtagctcaggctgtaacagacagaaccggtatcactggtgaaaagatggagttggatggttacatggttttggaaggcgctacaattgctgcttacaaccatatgaacagaaacggtctttgcaccatggttgctttcaacaagaaagttgacgaacagctggctaagcaagtagctatgcaggttgctgctatgaatccgatcgcagttgatgaagatggtgtttctgaagaagtgaagcagaaagaaatcgaagtggctgttgaaaagactaaagtagaacaggtgcagaaagctgtagaagctgctttgaagaaagctaatatcaatccggctcatgtggacagtgaagaccacatggaaagcaacatggctaaaggctggattacagctgaagatgttgcaaaggcaaaagaaatcattgctactgtttcagctgagaaggctgcaaatatgcctgaacaaatgattcagaacattgctaaaggacgtttggctaagttcttgaaagaagtttgcttgctgaatcaggaagacatcatggatgccaagaagacagtgagagaagtgttgaaagaagctgatcctgaattgaaggttgttgatttcaaacgtttcactttgagagctgaataatctcaaggaatcaagaatatagaaacggccgcacagaaagtctgtagcggccgtttttttgtggctgtccgtaagttacggttatctgtttacgcagaatccggaacaagaacttttgcgtataaagtgaatggatccggaacttgtttacattttgccggacctgtttcaagtgggatttgtttccccttatcctcctactgtttttgttttcgtatatccttctttctttagcagttctactattttttgtttgaagtctccctgaacgataatctctccgtctttagccgatccgcctactccacatttcgtcttgaggagttttcccaaatctttcaggtcgttctcggtgccgacaaagccggtaattagggttacgactttgccaccccggtttttccgatccaattgcacccgtaagttctgttgtgacggttccagggttacttgctcttcgtcatcatccatctcataattataatccgggttggtggagtaaaccacgttcagccggtctttccaatcgctgttcttcattattccagtctattaattaagttcaaaaataatatattgttccgaaccttgcaaactattaagtgtccccgggcgtttttgtatgtagaaattatgttaagtttctatgacatccttatggcatttcggaaaaaatagtgtaattttgtcaatcgctaatgtaaaagcagaatgaagtgactatgaacaatcagatacagcataaagacagtacaaaggttccggagcctactttgcgtcggctgccttggtatctttcgaatgtaaagttgctgaagcagaaaggtgaacgttacgtctcttctacccagatctccaaagaaataaacatcgatgcttcgcagattgcgaaagatttgtcgtatgttaatatttccggtcgtacgcgggtggggtatgaagtggatgcgctgattgccgttctggaagattttcttggctttacaaatatgcacaaggctttcctgttcggtgtaggaagtctgggaggagctttattgcgtgattccggacttagccatttcggcttggagattgtagctgcttttgatgtaaacccgtcgctggtaggcactacgctcaatgggattcccattttccactctgacgattttcagaagaagatgcaggagtacggtgtgcacatcggtgtactgaccgtgcccatcgagattgcccaatgcattacagatacgatggtggccggtggtattaaagccgtctggaattttacccctttccgtattcgtgttccggaagatatcgtggtgcagaacacatcactttacgctcacctcgctgttatgtttaatcgtttgaattttaatgaaatagaatagagcatgaagattatagctgttggaatgaattatgcccggcacaacgaggaactgggacatacgttggagaataaagagccggtaattttcatgaaacccgattcggctatccttaaagatggcaaacctttctttattcccgatttttcgaatgaagtgcattatgaaacagaactggtagtgcgcatcaatcgcttgggaaagaatatagcttcacgctttgctcatcgttattatgatgcggtgacagtcggcatcgacttcactgcacgcgatttacagcgcaggtttcgtgaggccggcaatccttgggaattatgtaaaggtttcgatagttccgctgccattggcacatttgtaccagtggagcgcctggccgatgtacagaatcttcatttccacctggatatagacgggaaaacggtacagcaggggcatactgccgatatgctgttccgggtagacgatatcattgcttatgtcagccgctttgtgactctgaaaatcggtgaccttcttttcaccggtacgcctgtaggggtcggtccggtcagtatcggccagcatttggagggataccttgaaaccgagaagttgcttgatttctatatccggtaagtccggatactcctttattcatttataaaataactcttatgaaaataaaagtaggttttggtttcgacgtccaccaattggtcgaaggacgtgaactttggttaggaggcattcttttggaacatgaaaaaggattgttgggacattcggatgccgatgtattggtgcatgctatttgtgatgctttgctgggtgctgccaacatgcgtgatatcggttatcacttccctgacaatgccggtgaatataagaatatagacagcaagattttattaaagaaaacagtggagctgattgcttccaaaggctatcagatcggtaatatcgatgccactatctgtgcggagcgccctaaactgaaagcccatatcccttcgatgcagcaagtgcttgccgaagtgatggggatcgatgcagacgatatttccattaaagccactaccaccgagaaacttggttttaccgggcgggaagaaggtatttccgcctatgcaaccgtgctgatcaatcgcgtgtgatgatcttttatggcaaaggcggatttatatgatgtagtttactgtattggggaatacggtcagatatttttgttgaatttataagaaatagggagagatctgtactattagccgattaggttatactttagaaatgtttctagaaattatagccaattttggcatttagcgtgttcctatatgcgacgtctgctacccaccagcctgtataattgaggcctatactgaaagatttactaacccgataatcatatcctattgagatggaggtggcgtatcggagtaagtaggtatttttagttcccatttccactgttggtctataactgtggatgaccggaacagactgtttgagtttggctaatccaaatgtggcttgcgtgtatatattatgtctctgtgtctttagtaaatcgattcccattccggctccacctttatattcgcgagttctccagtgcattgagaagtccacttcgcctatttccgccatggctgttcgaggtgtgaattcattataaatacctgcatgaaagttggccagagcatagagtctgttatagaaataatacttgaactcgcaacctaaaccatatccggcagtttggttgtgtggattttcttttttgaagtgttcatatcctcctattattgaaaattgcattttgtcctgtccgtgaacgatggctgttccgaagattaacagagtggttaataatagctttttcataattaataagtttggtattcttgtttgtgtatatgatatttttgtttgattacaaatatacgtaaatattataataacactataaaaatgtgatcttttttgtcaggggtatgcgaaagagaaatttctattgattatcagatattaaaaatttaatcaatgtagtgtgtattagggggaattgttttattttgttcagtattatttctgtctttgcgaaaaaaatatgaaagtattaaaaaagatgccagtgttttaatagctggtttagttgtggcatcttgtgctaatgatttggatggttttattagtattcctgatgatgcgacaggtgttcaacaaatttctactcgtagtagttctgacaatttgaggattgtatatcatggtaaggtctatgaaactttatatacgattattgatgactcaatttattcatatcagaattctgaagtgaaagatttgatggataatttgagtgaaacccggcctaatcttaggacatttattcatgggaatggagtcattgaatattttgatgatgaaaatgattttaatttaaataaagagaggataatgtctgaatatgaaaaagagtcattgtcgacatcgttttctgaaagatggtttcctactgataatgtaccacaacttgcgcctatagatccggagaataatgaagtggaaatttatttgtacgaagatccatattatttaggagatttgtttagtttgcagcgtagtagaagtgacagtgactacaacgaacttagtaaagtttggaatttgggtggtcagatatcatctatgatagtacatactattggttttggtggtgtttttacattttatgaaagaatgggttgtcagggtaaaggtataacattagtctttactgccggtcaatatattaatttatgttcagaattatctgctgatgagtaaacttaagaggatctttttctaattttgatactcccctttgagtattgatttatgtgccgataagaaacttcacatggctcaaacgtgtatactttgagccataactttcgtacgtgcgcgctatccgtgccgaggcgatgtggactatctcgccggggcggaactcatgttccagtgccggaagttggcaggatacggggctgggtgttttcgaagaaatccttaggaccaccagatttccggacggatcggttaacgttactatctgtcgtataaagaactgaacggaagtacccatgacccttgttttatacggatcgtcttcaagccgcactcttaccacttttagattcaggccctccaacttttcaccctcgttgcccagaaaacggccggcttcgcgtttctgccgtgcctttcgttgcatgatgtccagatgtacagagtgatatacttgcgctatggctacaaaacgctcctgcttggggattttgggtgtgaatttgtaggctatccagctcaggtaggccggatctactttcaggatttcgtgcagatagtgtccgcgataccttccgaacgatatgatatcgtctccgttgctttgcatccttttctcgttgtattccacgatcagcaggcaacgcctggaaaagaaaaacagcgtgcttgccatccgcagtgattcgttgatgtctgctgagagttcatgaataaacagaagtctgttcttctcgagtgtaggcgaatagatccagaccgagtaagtgggatgtcccggtcttggcagaaccacaaaataggctcctgcctctttgtaagacatgcggccccggttgtattcattcagtttggcatacaacagagcttgttcagcttcgggtattcccggtaatttggggtttgccatatctgagtcttcttatacttcaaatatactgattctttttgaagaaggcaaatgcttttagctattttttttatttctcttttctgctctatcccttttgtggttgagttaaaggataggactatgtaataacattttagatatatacttgtgtgccccggcggaaatgccgggaggagttcggcgactgcattcataggtttcctattgttcttttgctacttgtggccgcttttcgtgcgcagaaagtaattaaagtcggtgtttgcgtgacagccccttttctccggatcggcaaaccggatgtaatggatcgggaaaacagtgcttttaaggacggaaagccggggtcgggagggagaagagccgggcttttgggaaaatgaacggttgtttccgggaaaaagaaggaagcgtttgctccaaaagacggttacattttccgaaaatgcttatatgttttcaaaatatctcctaatattttcactcatatctcctattgttccggaatcttacttctaaagtgcccgattcctctccggttgttagtcgccaagagagctttgggaggtgataaaaagctcctccttttacgattcgccttctctactggtctccttctgtgtctttccgcttcttattgtatggttattgtccgattggctgctaaaaggataatcggctgattgcgtgtaggccgttttttcttacgaagctttccgtcggcccgaaaaaccgaaatgtagggaggttctgatatcaaattgacagaaagacaaaagcatcgttctacaagtgttctgttcatggatatgtaggagacattgccatgacatgaggtctgttatgccccctgtagttttaaagtttgtatactaacttgtccaattgattgtattctgccgggaatcttgtacatttgcattcttcgtaaaaagagaatgaatatgaaagaatccaagaagcgtgttcttgtcggtatgagtggggggatagacagcaccgccacctgcctgatgctgcaagagcagggatatgagatagtgggtgtcaccatgcgtgtctggggcgacgagccgcaggatgccagggagttggcggcacgtatggggatagagcattatgtggccgatgaacgcgttccttttaaagataccattgtcaaaaactttatagacgagtaccgtcaggggcgtacgccgaacccttgcgtgatgtgcaatccgttatttaagttccggatgttgatagaatgggctgacaagctggggtgcgactggatagccaccggtcattactcccggttggaagagcggaacggacatatctatatcgttgccggtgatgatgacaagaaagaccagtcctatttcctctggcgactgggacaggacgtgctgcgacgttgcatttttcctttgggtaactataccaagcagaccgtccgtgactatctgcgtgagaaaggctatgaagccaagtcgaaggaaggggagagtatggaggtatgctttattaaaggagactatcgcgattttcttcgcgaacagtgtccggagttggatgctgaggtaggtccgggatggtttgtcagttcagaaggtgtaaagctggggcagcacaaaggcttcccttattataccatcggacagcgtaaaggactggagatcgcactgggaaaaccggcctatgtcttgaaaatcaatccgcagaagaacaccgtcatgctgggtgatgccgggcagttgagagccgaatacatggtggcggagcaagacaacattgtggatgaggatgaattgtttgcgtgtccggacctggcggtgcgcatccgttacagaagccgtccgattccttgccgggtgaagaggcttgaagacgggcgtctgctggttcgtttcttggcggaggcgtcggcgattgctccggggcagtcggccgtgttttatgaaggccggcgggtgttgggtggtgcgtttatcgcttcgcaacgcggtatcgggttagtgattgaacagaacaaagactggaaatagaaacaaaaacaaaaataaaaatacgagatgaaaaaattagcacttattgccttggtcttcgttgctttgggagcgtcggcacaacaggatacgttaaagtatcgcatcagcctgaaagataaggctgcgaccacttattcactggatcatcccgagaaattcttgtcggaaaaagccatcgcccgccgccagcgtcaacagttgcctgtcgactctaccgatctgccggtctgccgtcggtatgtggatgccatccgcgacaagggagtgaagattgtggctatgggaaaatgggataatttcgtcaccgtgtcatgtaacgacagtgccgtgataggcgaaattgccgcgctgccttttgtgcgtgctaccgagaaggtatgggttgccccgtcgaaacctgcagcggaagataaacgggactccctggcgaacagtccgctcaagagtgagaactactacggtcctgccctccggcagatagaaatcagtaacggcgaaaaattgcatgaggccggatttaagggacaaggcatgaccattgccgtgatcgatgccggatatcataacgtggacaagatagaggctatgaaaaacatccgcatcctgggtacgaaagatttcgtggaaccgggaagcgatatctacgccaaaggatcgcacggaatggccgttctctcctgcatggcgatgaatgatccttatgtaatggtgggtacggctcccgaagcctcttattggttgctccgcagtgaagatgaagcgtccgagcatttggtggagcaggactactgggcggcggctgtcgagtttgccgatagtgtcggagtagatgtggtgaatacttcattgggatatttcacctttgatgattctaccaagaactataagtatcgtgacctggacggacaccatgcactgatgtcccgccaggcgtcgaaaatggcggataaaggaatcgtactggtgtgcagtgccggtaattcgggtgcctcttcatggaagaaaatcacgacaccgggggatgcggagaatgtgctgacggtaggtgctatcgaccggagaggcgtgttggcttcgttttcttctatcggcaacacagccgataatcgcgtgaaacccgatgtcgttgccgtggggctgaattcggatgtgatggggacaaacggtaatctgcgtaaagcgagtggaacctcgtttgcctcaccgatcctgtgtggcatggtgacttgcctgtggcaagcttgtccgcaactgactgcaaaggaaatcatcgaactggtgcgtcaatccggcgatcgggtcgatttccccgacaatatctacggatacggagtgcccgatctgtggaaagcttatcaatctgtttcgaagaaaaaataagatatgcaagacacgctttctctttatgaactgaatgccttggtccggcggagtctggagcagtgcctgcccgatgaatactgggtacaggcggagttgagcgatgtccgtacaaacagtaccgggcattgctatctggagtttgtccagaaagatccccgcagcaataatctgatagccaaggcaagaggaacgatctgggctaacatctaccggctgctgaagccttattttgaggagtccaccggacagttgtttacttccggcataaaggtgctggtcaaggtgacggttgctttccatgaattgtatggttacagcctgaccgtgcaggatatcgaccctacctatacattgggcgatatggcacgccgccgccgggagatactcaggcaacttgaagaagaaggggtgttgacgctgaacaaagagttggagatgccgttattgccacaacgcattgcggtcatctcttcggctacggcagccggttatggcgatttctgccatcagttgcagcacaacccgcgcgggttctacttccgtacggaactttttcccgccttgatgcagggcaaccaggtggaggagtctgtattggctgccctcgatgcagtgaatgcccgggtggacgagttcgatgtggtggttatcatccgtggtggaggtgccacttccgacttgtccggctttgatacttatctgttggctgctgcctgtgcacagtttccgttgcctgtcataaccggcatcggacacgagcgggacgataccgtactcgattctgtagcccatacccgcgtgaaaactccgacagcagcggccgaactgctgatcgaccggatggaagaggcggcagaccggctcggggcgttggccgaagaactgcatacccgtgttttctaccgcctggagcaagaacgcaggaggcttgctttgctacaggcacgcataccgtcacaagtgatgcgtaaactgtcggaatcgcggataaagttgcagatggcgaaaaacaatctctcgcatgctgccgaaactttattggcccgccagcaccatcggctggaacttttacagaaccgcattgcggacgcttcgcctcagaaactgttgaaacgagggtatagcatcactctgaaagacgggaaggcggtgaagagtgctgcctgcctgcaatcgggagacgagctgataacccgcctttacgaaggagaagtgaagtcgagagtcgaataagtccatgccgtttgaaatgtttttccaaatcatccggtaacctctctgcctgctctgcggaggaggggtttcctgtataatagtaaaatagtaatatgccagccaagaagaaagagacctattcacaggctatagaacgcctggaaaagattgttcggcagatcgacagtaacgaactggagattgacgaactgagtgaaaaaataaaagaagccaatgaaataatagctttctgtaccggaaagctgacaaaggcagatcaggaaattgaaaaattactgcaagaaaagaggctatctgaagaataaaggttatttttgttgctcaatcgaaaataactaataactaacgatatgaaagaaatagactgggctaatctgtcattcggttatatgaagacagactacaatgtgagaatcaatttccgtaacggcgcatggggcgaactcgaaataagcagtagcgaggtgttgaacctgcacatggctgccacttgcctgcattatggtcaggaagccttcgagggtttgaaagccttccgtggtaaagacggcaaagtgcgtattttccgtttggaggagaatgctgcgcgtctgcagtccacctgtcagggcatcatgatggctgaattgccgacggaacgtttcaaggaagctatcctgaaggtggtaaaattgaacgaacgctttattcctccttacgagagtggagcttctctttacattcgcccgttgcttatcggaaccagtgcccaggtgggtgtccatccggcagatgaatatatgtttgttgtatttgtcacaccggtcggtccttatttcaagggtggcttctctaccaatccttatgtcattatccgcgagtacgaccgtgctgcgcctcacggaaccggtatctacaaagtcggtggaaactatgcagccagtctgcgcgccaataagaaggctcacgacttgggttattcctgcgagttctatctggacgcaaaagagaaaaaatacattgacgaatgtggtgcggccaacttctttggtattaaagacaatacctacatcactccgaagtctacttccatccttccttccatcaccaataagagcttgatgcagttggcggaagatatgggcatgaaagtagagcgccgtccggtacccgaagaagagttgagcactttcgaagaagcgggagcttgtggtactgctgccgttatcagtccgatcgaacgtattgacgaccttgagaatggcaagtcgtatgtgatttcgaaagatggaaagccgggaccggtttgtgagaagctttataataaattgcgtggcatccagtatggtgacgaacccgatactcacggatgggtgactattgttgaataaacgttcgataaatgaactacaaaataacaaccctcgcggaaaacagtgtttacggtaagggattacagggagagcatgggctttccctgcttgttgaagcgggggaacacaaagtgctgttcgataccggtgcttcggatctgtttctccggaatgcccgcctgttgggactcgatctgagcgatgtggaatatgtggtgttatctcacggacatcgtgaccatacaggggggctttatgcctttctgaagatgaacagtgtagcgaaggtggtttgcaagcgtgaggtattccggaaaaagttcaagaacgagcgtgagaacggaatgcttcatcccgaagcattggataagtcgcgcttttggctggttgacgaaactacggagattgtaccgggcgtatttgcgtttccggacgtcaaggtggtggacaggaacgacactcacttcgaacacttctttacggagatagaaggagagatgcgtcccgatacttttgaagatgaactggcattggtgttgaagggcgaaaagtctctttcggtactgagtgcctgttcacaccgggggattaccaatatcattcgtgccgtgcagaatgcctttccgggattgggactcaaactggtgatgggaggctttcatattcacaatgcggaagaagagaagttcaatgtgatttcggcctttctgggtatgaaacttcccaaacgtctgggagtctgtcactgtaccggcattgacaaatatgcgttgttccgccagcaatttaacgaccgggtgttttataactataccggttgggtagaaacgatttaattttattgaatgggaaaaaataaattagagaagtttgccgatatggcaagttatccgcatgtctttgagtatccttactcggcagtggacaatgtgccttttgacatgaagggaaaatggcacaaagagtttttcaagaacgataacccgattgtactcgaattgggttgcggacgtggcgaatataccgtcggactggggcggatgtttcccgataagaattttatcgcggtagatatcaaaggcgcccgtatgtggacgggagctaccgaatctcttcaggccggcatgaagaatgtggctttcctgcgtaccaacatcgagatcatcgaccgcttttttgcagaaggggaagtgagcgaaatctggctgactttttctgatccgcaaatgaagaaagctaccaagcgactgacttctacctattttatggaacgctaccgtaagtttttggtatccaatggaatcattcatctgaagactgacagcaacttcatgttcacttataccaaatatatgattgaggagaacggactgccggtagagtttatcaccgaagatctttatcattctgatttggtggacgatattctgggtatcaagacctattatgaacaacagtggctcgatcgcggtttaagcattaagtacatcaaattcctgttgccgcaggaaggagaactcagagaaccggatattgaaattgaactcgattcgtaccggagctataatcgtagcaaacggagcggattgcagacatctaaataatacaaactatgacaatctatcctaaattaatactcgatgcactggctacagtgcgttatcccggaaccggaaagaatcttgtggaggccggtatggtggaggataacatccgtatagagggaatgaaggtttcattctccctgatttttgaaaaaccgaccgatccgtttatgaagtcggtgataaaagctgccgaaacagctattcttactcatgtgggcaaagaggtggagatagttggaaatatcagtgtgaaaacagtacaggctgcacgtcccgaagtgggcaaattgctgccccatgtgaagaatatcatcggcatctcttccggtaagggaggagtgggtaagtctaccgtatcggccaacctggctgtagcgttggctaagttgggttataaagtcggtctactggatgccgacgttttcggtccttccatgcctaagatgtttcaagtggaagatgcccgcccctacgctgagaagatagacggacgcgatatgattattcctgtcgagaagtatggcgtgaaactgctttctatcggtttctttgtcgatcccgaccaggccactttatggcgcgggggtatggcgagcaatgcgttgaaacagttgatcggggatgccgcctggggagatctcgattatttcctgatcgaccttccgccgggtacgagcgatattcacctgacggtagtccagacactggcactgacaggtgctgttgttgtcagcactccgcaggctgtagctttggccgatgcccgcaaggggatcaacatgttcactaatgataaagtgaacgtccccatcctcggattggtggagaatatggcctggtttactccggccgaacttccggaaaacaagtattatcttttcggaaaagaaggtgccaagaagttggccgaagagatgaacgttccgctgttgggacagattccgattgttcagagtatctgtgaaggaggcgataaaggaactccggttgctttggacgaaaatacggttacaggtcgtgcattcctcgcactggctgccagcgtggtacgtcaggtagataagcggaatgtagaaatggctcccacgaagattgtggagttacataagtaacgataagcgcttttaaatgatgaacgatcggttccttgtcccataggcaggagccgatcgttctttgtttattgtttgttgtccggagggttaatcatatactttcatcaattcctcttttatttgggctacacccgggaatcctgtcttttggtgtttgacatttccttcccgatcgatgatgagataggtgggtacgccccttatgtcgaatttatcacctaagaaactccattgggcatccgttaaacggaaatgctcaccgtggatatccggaatcatgttctcccatgttttcaggggggaggtttcgccggtaatgtaaaggtaaacgatgtcctttcctttcaactcttccttcagtggcaacattgctttattggccatgcgacaggggccgcaccaggttgcccagaagtctaccagaatcactttgccccggtacttagagatgatggatgaaaacagctcttcattgctgacgtcaccaacttcgttgatggtgaaccctgtcttctttttattggcctcaagggtcttcagcagttggttgttggcgtcccgcacttcattctgacaggcaggtggaagagtggcaagtatcacttcctgttcggcagtcagcggggtgaactctttgatggacgaatagagttcgcctgctttgttgatatcgaagtagattcctttgtcggttccccaggctttggtcagttcatcggttcggcggcgtagataatacggaatcagttcggagagcttggaattatagagtgctgccatggtgttgatggaagcgagcggtctgaaagcattcgcataataattttcaggcagttctatctgagccgtgttaaagtattccctggcctcttctttgctcattttgtgctccatggtgtaggcttgcttgataaccatttccgtcagggagatggcttgggcagcctcggcatccacttgattgcccaacactgccttgagagccttgctgattggagctttctctatggatgccaggagattggcccgctttccatagataaagtctttgtaagcgccggcgtccattcctgctacatccttgaataattggcggtaatcatttagaatggaggtttttagggtgcagttcgaatattcctgtgacaggccggctaatgttccgccgaaataaacggcttcgccataaggtttgtcatccttatgaagcttggattgctgtcggcaaagttcacgggtattgataatgatgctgctctcttcgcccggtacggcatagaaagttatcattttaccaaaaaggcggatggcagccgatgtggtggtcggcactttcactctcgtgacgaatgtaccgtcattgtttatttttacttcttcgctttcgtaggcaccttttaccggatcgaatataatcggtacaattttgctgacgagtcccgggcgataatccagaatccgtccttttatagtagcgtctttatattcaattttgggctcgggcaattcatcgttgatgtcgattttatgtacgatggcttcttgaggtaacaaaagttccgggagggctttgcctttcagctgaatgccccatatcttgaaagcaccttgaacgttgtctccttctgaaaaatcgatcgaagtagccgaggtcgggatcggtgggaataccaggcggaattctccttctccggattcgggcatccagaattccgtgtcaggcttgatgccgattcccgaacgcagagcgtaagtttctccgttattgtccttcaggaaactttgtccggaaatcctgatccattgcttgggatgatagaatgctttgatataaagcaccgtagctgtgtcgctgagaacaactttatccacttgaatagaggtactggtccaggcgatgaatgggggttgctctataactttctctttagcttttgtgaggctacagatacacagcaaaagaatagcaataaatgtgattttcttcatattgtttttattaaaatgattttcaggttaggggcttagaaactaagccaggcggaagcggaccggaagtgtgaatcgggttgctacgttctttcccttttgttttccgggtatccactgaggcatgttgcttatcacgcggatcgcttcggcattcagttccggcgatactccccgaactatcttgggatcatgtattttcccgtccttgtcaatgactatttgtatgacaacttgtccttgtattcccgcttccattgcgactgccggatattttatatttttatacatatatttcaggcaggcttccattccgccggggaattccggcgcgtgttcaaccacatcgaatatggtattctcctgattcttattgctgtctgttgacggagcggagtcggaatccatcagtcggaatcgtatcggcactgtgaccctggtggcaacagctattcctctttgtttcccgggttgccatttaggcatctcttttatcacgcgcatggcttcggcatccagcaacgggtctacgcttttcactattttcaggtcagagagtgtaccgtctgcctgaattacgaactgtgcgatgacttggccttgtgttccgttttcctgggcgatcaccggataacgaagatggctgttgatgaaatgattcatattccttacgccgcccggaaactccggcattttctccacaacctcgaatacgatttgctcccggctttcttcttgggcgggctgttcggctatgccgctctcttgaggttgtgaaatatgattggctgcctggggagaggaagtgctttccttaacagcaacagcgttttcgggttccatctgttcttctacggtttgcatcacttcctgtgcaatacttttagtggtacgtgccactgcttcgatgttacttactatcatcaaagcaagagccaaggggataaatagcagatacttggttcgtcctatctccttggttctctttttgttcatcatcgtgatacggttcttcagcggcaacacattgaagctgttggaaagggtgatcgcgctcttttgatgtgccagtcccaacaaatgatattgataggactttgaatcatgtccggcttccagcacccgattatctgccatgtattccagattgttccgtacttcccgcttcatcaaccacatgaaaggattgaaccagcaggcaatacacattagctcactgataatcacatctatggaatgtctttggcgggcatgtgttccttcgtgagtcaggatttcacttaattcgttctgcgggtgtgcctgcggataaatgaaaatccagtgaaaaaaagaaaaaggaccactttctttatccagcagatagacgggtattccttctatctgatctttccggcaacgaagacgtaaccgtagaatactggcaagctgagcgaagaaacgtactaaaagtaaagtgacccctgaccaatagatgatatttactgtagataaaatgatactttgccagtccgcagccctaacctcgggagttatttcgatttcgggcaatacgattgttgcatacaaatcgaccattgctaccatcggttcgtgcgatctgatccattcctgaatgttcagtaccggatagagcggagaaatgacaaggaagcaaagcaaaactgtccttcgccattggaagaaggtgtctctgtagaaaaacaaccgatagaaggcgtagaataaagcaattgctatatttattttcagaaaatatgccagttcgggagtcatgtttttcagggtattagcgattatttttcttgtcctttctcaatcatgtcgatgatttccttcaggtcgttggtcgatatcttttgatctttggcgaagaaagaaaccatctctttgtaagagttttcaaagtagttccgtacgactccactcatgaaacttcgtttgtattcgctttctttaatagacggagtgtacagatacgtgtttcctacacgctgtgcctttacatattttttccgttcgagattcttcacgatggaagccaccgtggtgtagggaggagtaggttgctcaaacttggcaacgatgtctttcacatagcaactttccagttcccaaatgtagatcatcacttcttcttcttgcattgtcaacttttccatggagtatatttaattacgtttatattacaaagctacggaacggtcgtaactaaacaaagtgaagtgtgttaaatgatgtaaatgaaggaattacttaagggtagcaccacagatccgcacggtttaaaaggtaaagaactggtcagttaccggtgttgtctgtgcgaatctgcggcgcccctttgagaggatgtatttgtttatattgcctttaggatagcctctgcccagtatttacccaagataccggctccctctttattcgggtgcagataaaaagtacctgcatttccattctccggcgtgaaataactctgataattgttccggaagaaatcggaagcagccgtatctcctaaaaagacttgattggggtttgcctgtgaatagtagtctaccagtttatggatcatgggagtgtagcttttcagtcgcttgaggccggcagccagatacatggcaccgttatatgtgttcgggctataccagattggttgatgaatcaccactttgcattccggatacaaagaaaggagttcgtcgataatcgctttcatgttggtatagtaggacaccggttccaccggagaaccgaatggaccgttacaagcactgtcattcgtgcccagcataatggaaaaaagcagtgttcctttacgttgactcaattcttgggcggcagattttacattcggaaattgtctttctgcgattggaagaaaatccagagtagtcgttccgcttactccacaatttcgaaaagcgaccgattgcttggttgcttgttcgatgtattgacttgcctgtaccggcggtgcctccgttaccggagttttcaataatgcgccttgggtaatactgttgcctatgtatacgatatttacgccttgcgcatatagtttacctaagcaaatacacaataaaagacaaaaagagataaacggtttcataatttcctttttgaatatggttatcgtaaagtcttgtttatagcctgttgaataagattttccataacgtcatatccttcggaagtgggatgtacaccatctttggtataggccggattcaaagctttgttgctaccgctcaccatagaagagtaatagtcgacgaatggaattttatttgtttgggcataggctttcagacgtgcattgagtgaagctatcttttgaggagcatctttaatggcaggattccaaccgaaagcggcagccggtaaagtggtggtcaatatcacttttatatgattggcttttgccagttccaccatcgaaacaatattgccaaaagtgcggtcttcatgatatgctcctgtgttctcggcaatatcatttgtggctgcattgattactaccagtgcaggagataagttgatgacatcttccctgaaacgtaccaggaactggtaagaagtctgtccgccgatgccccggccgatgtaaccgttggatttaaagaaatcaggatgagtgtttacccatccttctgtgatggaattgcccataaagaccactctcttttcgtttttgtccggtttcggaagttcggcgttttgttgtgcataacgttgcaggttagcccagtctttttcttgggcatttattcctatcaatgatgctccgaggcagaagacagccatcagcatccagcggtgtatgatttgctttttcatttttgtaatatgtcatatcaccacagagtgacacagagtttcatagagaaacttttttcataaatattccattaacaagagatgaagactctgtgtgttctatgatgaacttgatttatattctatttcattttaattgttccggcccatcccccgttgcgtaccattttcaatgtcatgcgggtttgattgttcacggtagactcctttttcttgtaatccattgcttgacggtcagcgttaatgccatcttcaaatgaggttaatgtgaatgattgtcctgccggaatgaatccgaggtcgatctcgatgttttgtggttgattgccggtgatacctccgatgaaccactgttctccttttcgtttggctacgacgactgcttcacctactttggcatagaggaccttggtttcatcccaggtgacgggaacacttgtgataaattcggtacagggaagttctctgtaatagtaaaccgggttgtcggctaacatttgcagaccactttcgaagatgatgaaaagagccatttggaaagcacgtgttcctgagcccatggcattggcccgggtggaacggttgtcttccggctgtgcagagatcattgaacccggagtgaaatccatcggtcccacggcattacgcataaagggcagataaatgctgttttcaggtttgcaattaccaccttgttccatgcccaatacgccttcataggaaagcacattcggatatttgcgttcaagtccggctggtttaaaagcaccatgaaaatctacaaacagtttatgcttggcggcttctttggctacacgttcataatagtttaccatccactggtcactgcggtccatgaagtcgatcttcactcctgcgatgccccaatcggcaaatgttttaaagaggtcgaaatgattctcgacagtcagccatggcagccaaagtacgatttttacgttgcggtcctttccgtattttatcagttcggtaagattgatggtgggattgggggtaaacggatcacgtgtgtttttcgcccatccttcgtccatgatgatataaggaataccgaacttggatgcgaagtcaatgtagtatttataggaatccatattgaaacccgaacggaaatctaccccatagaggcgtgcgtcgtgccaccattcccaactcacttgtcccggtttgatccaactgtagtcttcaagaacacaaggggcagacaggttatacaccatttcgttttcaatcagttctttgtcttctttcgaaatcaccatcatgcgccaggggaatgaacgtttgccgtccgtcttggcaatgtaatcggcttcttcggtaatcttgaggctacggtcaccgtcttctccgaaggctaaaggtgctttgggaaaaatagactgcattccgttcttaccggtacttttaaggaacatacagggataatcggataagtcggcttcagatatcagtattttatatgctttatccgtttctatcaatacaggcaggtaactcatgcggtcggtagcagcatacttttcggtatctacatgagtatatgggcattcgtatgaggttttaaagccatccggttgggaaagatgagctttataattggttggaaagttaattgcgaagtcttcccccgttacgatgttatctccttttttatctgtcacaaaacggtaagcgataccattgtcgaatacgcggaattcaacggcataatttccgctgaaattcattctcagggtattacagtgatttcttacgatcgcattcttgaaaggtatttcacgttttacactttcgtcaatggttccacgtttggtgctccgtaagtggggattcgtacctaacgtctcattctgcagttgcaggttgagatagcaatcttttaataactggtcattatcataggacaccgaataataaatccggtccttgatgtctaccgatactttaatggctccgttgggagacattacgtcaatcactttagcgtacacgctacttccgcttattaccgccaatgcgagtaatagggacatcatttttcttttcataacatgtgttttattattgtatgtgctctgtttacatcttctgcatgaagatatagacgcttcgaatgtactaattatctttgtttcaagcaaaagctattcgatatatttttatgcagaactgtcatagcagacatttccgggtaaatccggaataaatatgcacacgtatgtgattatgaaaagaattctttccctctatttttcatttctttgtatttgtctatgacgtgtttacggctcttgataatctgccaacggtatacccagcaagtggtcagaaaatagaagccggtctgtatccataacgctttgtattcaaatggaatctcactcagtgttgctcccatgttgttgattctcacaaatccgttgataccgaaagttgatggaaatatgtaagagaagtatttccagaatggaggtatggcagctcccggccaggaaatacctgagatgaataatagaggcacagaggtgaatacgaatatcagcatgcatgtctcccggttacggatagcgatagatgcagtcatggcaaaaaagatgcaggccatcagataggggagtatgaacagggccagtgtgccgggttgtcctatctggttgaggctgaacatacgggggacggcgcatagtacatagacagataccaaggcatataccatgaaataacttaatcctttacccaatacaatgcgcaaagtaccgttataatggcggttaatgggtaccaaatctttaaagcggttgttctcgcgtgccgtgccggccgaaagtccgatacccaataacaaggtttgctgaatgatcaggatcaacacggcgggtatcaggaaagcggcaaagccattggtcggattgaacatcgctacgtcttcatattcgataggataggccgtgatttcgtcctgccggtcggtcgtattgcccgagcgggctattttgatatcttcgttcatatccaatgacacggcagtattggccaaaagcatacttttatagtacagcagtccactcatatcacagtagatgctgacttgtgtctgtttgccttgagctatgtccgaactgaagtctttcggaatgtaaatgatgccatatgccagccggtctttgagcatttgtttggcttcttccatatcggcacaataagccacaatctgtatatcgggggtggcgtctactttacgcagatattcgcggctgagtgatgaacgcgagtcatctactaccacggcaggcacttcacgaactacttcgttggtataaataaaactgtagatcagtggatataccaatggaacgagtacgaaaaagatcaataccccctggtcgcggaatgtagtacgaaattcccgcttccagatataaaacaggtcattgatgccttgtgttatcttatcttttaaacttatatctttcattagggcacgtatttataatatatcaaagcttccttcaaccgatgtaccacgaagaacggaagtaacatgaaaatcagtaatgccatatagtttgaccaggaataagccatgctgtatccgttgagtgcctggtctacatagatcaggaaatagtggcgcaatgggaacaggttactgagtgcctgcaataccggattcatggccatcaccggaaaagagaagcctgaaatggagaaagaaatgactccccataacgaagcgaagctcagaccgaggcgaagggtaggcagtgtgcctatcatcaggataccgcaacattgcgatgccaataccaggcagagggttgccaatagcatcggaagaattccgctgttacatgggaagtgcagatatccatacagatagacattgtaaaatatacccatgataaagaataccacggtttgtggaagcaacttaccggccaatgcgatgtagatggagttgttgctcagtcgcagccactcccgggccgtgcggtccttgatttccacaccgatggaaaatactgttaccatgaatatcaacaacatcaatacccccggaacaagcgtattgcatagatagaccgaataatttaaccaaggattttgtatcggatgtgtatcgatgacaatgggttgtaaatatcccatcgcctgatcttccggtactcccttggcatataaaactgaacgggcggcagctcctgaggcaagttcggacatcatcttcatatccttgaacaataatgagccggcaatcaggtaggagttgttggtataaaaagataatttgggttggcgttgactctgggcatcggccgacattcctttgggtatataaaaaaatccgtagattttgccttcctgcatagctgtacgtgcttcgttaacactgctataacgcgccacgacagctgtttgcccgaatgcgtccagattgcggagaatgtttcgtgagctggcagaattgtccaggtctacagcgccaacgggcatattggtcggtaaccccgagtccatcagcgtggtgaagaaaatatagcaaaacagcggagctatcaccatgcagaagagatagagcgggcgagacacgagacggtggcattcgcgtttcatgactaaccacagggctatatatttcttttctctttctttcatttcttgatgatgactgacattccaggacgcagattagttactttttcaagcggagtcgcttttacttcgaatgttttcaagtcgaactggccggtggtcttggttgctttccaggcagcgtatgtaccaagatctttcatataatgcactttcaggcgaatggtctgattgtccaatgcgggtacgatagcatcgaattctgatcccatggtcaaattttttagcagatcctcacgtacattgaaagtcacccacatatcgtccattatggcgatattcataatgggggcgccggtacctaccaattcgcccactttgggaaatatctcggaaacctctccggctgcctgggcaatcaaataagtttctttgaggtacgactccacttcggcaacagctcccttggcacggtccaccaaagctgctgcagccattttatcttcacgttcggcaccgttctttgccatcgtgtattgggcctttgccgctttttcggttgcgatggctgcattacgttgtgcggtgacttcgtccagtttctgtgccggcataactccttggtcgaataagtttttgacacgtttatatgatttttcagctatatcgacaccggcgattgctttctgccacatttcataagccgcttgaatttgttcctgacgcgctcctttgatggctttttcgttctgtgcctgtgcagccgcttcggcggcgcgagcctgttccattttggctattacgtcgggagcctccaggatggcgagtgtatctcctgcctggactttttgtccctcttttacacggaactccaggatacgtcccggcactttgcttgagacgcggtattcagttacctcagcttgtccctgaatgatttccggacctttgcggagcatgaagaaaccgacaactgcaaccagtacaataactcccagcagggtgaggaatgcaagcagcatattgctgttctgtgatttttgtgatgtcattttatttacggtttttacgatttacaaattactattgagattagcttttcaggaatgtttgcactcggtcgttgaccttatttgagcgttcccagtgacttttgcaagtagatttctgtcagttttacatcaatctgtgcatctatcttttccgattgggccgacagccaggcggtatgtgcttcaagtacattactgggagcgatcacaccttcttcgaatccgagagttgcataacgcagattttcatccgctttttcaaggttctttttggccatagccagtttctttgcggcttcgtttactttgaaagccgattgattgacttgcaactcgattttctctttggcatcttccagttggtattgggcgatgcgtgcttcggctttggccgctttcactttgtaaatgccttctccccaatgccagataggcaactgaaccataacgcctacattccacatgcctttaaacttgttttcaaaactgttgaatacagacgggttggtgaccatgtaatttcccattagtgccacggaaggcaaatgttccgaacgggtcacgtttattttctgttgatagattttggcagccagttccagactgcggatctcggggcggttggcgtaggctgtttctatctcaaagttggtagtagccggaatcagcggaagatcgtctacttgttcgtcagccaggacaatcggagtgcttaggtcgatgccacacagttgacacagcagcatgcgggaaaggcttaatccgtcttctacctttgtcagtgtcatctcggcttcgtttacttttacgcgaaccgacaggccgtccgctttggtggctactccttcggcaatcatcttttctacatcactgtccagtttttgtaatagctttaggtaactttccgcaagttttttcttgttgaccaaggaaataacctgccagtaagcctggtctgtgctgagaatcacttcctgcatacccgagttatgttgctgacgagccagttcttcggcgtatttggtgattttattgtatgcacgtatcttaccacccatatataacggttgggtgagggtgatggctcctgcatatacatttcgggtatcggtgcggaatgcgtctacaattgcagttccggcttcgttgagcgccgggacaatggctcctcccaattgtgaaagcatgggggccagttccggatgcagctgtccgatgacttgggcggcttgttgcaacggaccgctcacacttgtacccaagccggatagagccgctttctggtcattgttaagcaatgagaattccttttggttacgcatgtaagctcctgtggcggagaagttaggcaggtagttggtaaaggctgctttcttttggtagtgtgcagcatttattttctctccgcttatcagcaactctttattgttggcaatggccaatgcacggcaactatctaaggatagaatcccctgtgatttcagggaaaagggagttgttaggagaaaaaacagaaacagtaattttttcatcgcatcttatacattataaaggtgatacttcatttaaaagaacaatgcttgcgagctgtttgtttatccggttttgttcttgttatccttgttaggacaagaaacaataattgcataaacaacgatgcaaatataaagggttaatcttaaaaagcaaaacgatttaattttttttgttatatagtgctgtatttgaattccgggtgatgtattcttgcttttcaattaacattgttaacgtcatcttgaggtctctcctttttcgaatgtaaataacaaaccttttgcatgtaaatgacttgttgtctagattcaaaacataagctttaacactgtgttaaagcaaatcttctccctgcaagaatttagtgctttgaatatcttgtttttcatacgtttaagtgttatcatgccttttctctatccaataagacttagcaggctgaaagcctgtatacttgcttatttatcaactacggattgatcatgtctttccggattattttttttgtaatattgcgtacccgattgcatactttggttgtagtataataaacaactaattaaaaaatagaaaaacaatgaattggggaatacacgacagaagaggctggatggctgtggtattattattgtgcgcatgtcctttttcggctcagaataccggtcaaatcacgttggaacttagaaacaagccactgcctgctgttttgaaactgattgagaaagcgggggagaagcatatcattttttcctataacgagactgagacttaccatgtcactgcctctatccatcaaagaaacgaatcggaagcactttccatcgttctgaaaagtaccccgttcatttataaagaacgagaaaactattttgtcattcagaaagggagcattgacaaacgcttgataactattcgaggaagtgtgattgatgaaaacaatgaaccgttagtttgcgccaatgtgctattgctggacaaagcagactctgcttttgtgaatggagtggttacgaatcaggatggttcgttccggataccgggtgaagaagggagagattatcttttgaaaacgtcctacatcggttatcagactaaaatccaaccttgcggtgcaatgaataaagtatgtctgttttccgatacccaattaatgaaagaagtggttattagtgtcgatcatcctttaatagtacataaagataatggcttattggctaatgtcgttggtactcctttagctaaaatgggttctgctgcggaaatgatatcccatcttccttttgtaacgggaggggtaggggaatacatggttctgggacacggggtccctgttatctacatcaatggccgtaagatacgtgatcagggggaattggaacgtttgcgtgccgatgatattttatcggcggaagtgattactacaccaggagtggaatatggttcggatgtatcttcagtcattcgtatccgcacgatccgtcggcgaggacaagggataagcagtggatttcgaggtgttttttctcagggacatgactataatgccagtgagaatctatacttgaattaccgtacgggtggattggatttatttgtgaaaggtgacttgaaacatggaaattattatcaggaatcaatcttaaatcaggaaactgacgcttcttcccgatgggaggtcaaaggaggagctaccagttttcataaagctgtttatttctccggtgaggtaggtttcaactatgagttggatgacaagaattctttgggtgctcgatatatgccgggtgcaaatgtcggttctgtgaatcggactaaccttggcaataattttgtgtataaggatggtgaaaagatagaagaaatatcttctttgcagcatgcacatacttatcctacctggactcattcggtgaatggatactataatggggtgttcggccaatggaatgtggatttcaatgctgattatttattgggaaagaataattccacgaatgaagttttcaacaatgatgataaagccgctcaatctgaaaatgaagtccggaactatctgtatgctatgcgtatggttgtaaaacgatctttcagaaaagggacattgtcgtttggtaccgaggaaacgtttacgaacaggcacgacgtatttgttcaaagtggcttttctgacaacgccgatgatcatattaaacagtctatttattctgtgtttgccgattattcgttgcatttggataaattcaatgttgctgtggggctgcgttatgaacatcaaaaaacggattattatgaatatggggttcaccaagatgaacaaagtccggtgtataatgatatagttcctgtcgctttagtaggatatgaagataaaggttggcatgcatccctttcttatcgcttaataaggaataatcccgactatcacatgctttcaagctcaattacatattcaagtaaatatatgtatcgtagcggagatcccctactggttccacaaaaacaccatgtctttatattggatgccggatcaagatgggcatttgtaaatctcttttttgatagaacattggatttatatacgaggttcctcaaaccttataatgatgaaacccatccgggagtgttgttgtttaccatggcctccatacctactacagatacttatgggatgaatcttaatgtttctcctaaaatcgggtgctggcaaccgcaattgaatggaggcatgtatttttatgatgccgatgttcgttctttagggataacccggcattggaatgaacctcagttttattttgaacttgataatagttttacttttcctgatggttggtttttgaatgtgaacgggaatatctcgacagccgccaaacaaagttattctttgatacacagggagggtacggtaaatgcccgcctgtcgaaatcatttctggaagatgctctgatgataacacttacagccgatgatatttttcatacccgttatcattatatggatggatatggagtcagaagtcatatactgacccgttcatataatgataatcaacgttttggtattcagatatcttataaatttaatgcaactaagagtaagtataaaggtaccggtgcgggacagagtgaaaagcagcgcctttagtctgcctgataaaagaattatcgctaattttgtcggcttatggcaaaattaacgatattccggtttcgtggacatatttcacgggaagaacgcttcaggcaattgtttgtggagatatatccccgcctgttgcgttatgccattcagctaatgagcgatcgggaagaagcgaaggatattgttggcgaagtgatggaagaggcttggaaatgttttgatagactggaggcggaaacgcagaacgcttatttctatacagctacacgtaatacgtgcctgaatcggttaaagcacctgcgtgtggaacagcagcatttggatactttacgtgaggtgacccggatggatgtgaataccggatatcggcagcatgaggcacagttgcagcaagcggaaacgattgcttgcagtctgtcggaaccgacgcgtaccattttgagactttgttattgggagaaactgacctatcggcaagttgcagaacggttggaaataagtccggatacggtgaaaaaacatatttcgaaagctttacggattttacgtaatgaaatgaacggaaaggaggaaacaaatggaacagagagaggataataaaaacgatatagcctcccgtaggctcaaaaatcttttcggagaggctcttggtgacctgtcttctgttgaagagacggaaaccgcttggcaggcatttgcctctcgccgacggcaggaaagagtccgaactttggtattcggctttgcagcagttacttccgtggcattacttttgttttggggcttttctcaggaaaactttctatcccaagaagtcgaagtgtttgcttctgtaaattcgcctgataaattggtgatgacagaggataaagggatcattgcagtcagaacgccacccgctgccactattactattcatttgcctgacagtactgaagtgctgttgaacgccaatagccgcttggaatacccgaaagcgtttaccggtgatcttcggcgggtaatgttggaaggtgctgcgagatttaatgttcaaagagatactttacatccctttattgtagaaaccgggagtttacaaacgcgtgtattgggcacggtatttgatgttgattcctatggatgtggtacgacttctaaagttgtgctgtatgaaggttcggtgcaagtcagtgataaagccaatacgaaagcctgtaagataaagccgggtgaacaggtttatctggatagagtaggtgatatctgtatttctcaggctgatatctgtatgcaaaagagttggacagaaggtctgtttatctttgataatgtcactctgagatatgttatgcaggaaatcggggcttggtataacacaaatattgttttccgttcccattctttgctggaggaacggatttatttttctgccagtcgtcaccttcctgtcggggaaatattaaatgttttgaatgatttgcaaattgcgagattcatagtggaaggggataaaatagtcgtatcaccactatcctgagttgttgaaatggaaagcattcaatgagatagaattaaagtaataaagaggatgtgccagaaaccggttattaagtgaccggcttctggcacatcctctttaaagtatatgtttttaaaattttagtccaatgtgaatttctgcgacccaatcatcgttccgtcagcaaaaatatctacccggtaggcaccggcatacaagaactcttctacatcccagaatacgttgatggtctgttcttctccgttgtattcgatatattttttgatggagtaggtcagcgtacggttttcgtaagggaatgtgtttgacgggctcttggtaagcgcatcattatccggcttggtgattcggatataaagtgtacgctctccggtttcggctgtgatattctttacgatggtgaagccgatggccagtttcacgatatcctttacttttttagcctttttgccacgtttgttacgaggttcaatccagatattagttgcgtccagttgggcggctaacgtaactttttgattgaggtttttcttttcttcagacaaattgttgatctgtcgtgaagcggcattgtatttttgcgttacttcggctattacttgcttttgctgggcagtcagtttgtttagtgagtcaatctgattgatgtaaccgatcattacttttcttagtgttgccaattcttttttcaggcgtcttatctctgtggcattgctgctctttaccgtacggagctcttcaagaaggcgttgcgttttgacctgttcctgggccagcaagtctgccagagagtcgttcgatacggtcagttttaattcgtcatattgctgtgcgaagcgagtgtattcattttcaaggtcttctttatccagttggaattcctgaaccagttcacggttagtctgtttttcagagaataacagataggtaagaccgatgagtgcaagcaccagaacagatacggcaatgatcagcagattctttttattcatattctataaggttgaatgataaaacgctgcaaaagtaatcatttcaatacagagtaacacagtctattcacttttctttaactaaaattattatggaaaaatttctttaatttcgattatcgttgtacttttgtcgtcacgaaaacgatacgaactaattatcaactttattaaaatataagtattatgtcaaaagtaaccgtagtaggcgcaggtaacgtaggtgctacatgtgcaaatgtactggccttcaatgaagtggcagacgaagtagtaatgctggacgtaaaagaaggcgtttcagaaggtaaagcaatggatatgatgcagactgctcagttgttgggtttcgacacaacaatcgttggttgcacaaatgattatgctcaaactgctaactctgacgtggttgtgatcacttctggtattcctcgtaaaccgggcatgactcgtgaagaactgatcggtgtaaatgctggtatcgtaaaatcagtagcagaaaatcttttgaaatactctccgaacgcaatcatcgtagttatctctaacccgatggatacaatgacttacttggcattgaaatcactcggattgccgaaaaaccgtgtaatcggtatgggcggtgctttggatagctcacgtttcaaatatttcttgtctcaggctttaggttgcaacgcaaacgaagtagaaggtatggtgatcggtggtcacggtgatactactatgattccgttggctcgtctggctacttacaaaggacagccggttagcacattgctgagcgaagaaaaactgaacgaagtagttgcttctactatggtaggtggtgctactctgactaagttgctgggtacttctgcatggtatgcaccgggtgcagcaggagcttatgtagtagaatctatcatccacaaccagaaaaagatggttccttgctcagtaatgcttgaaggcgaatatggcgaatctgatctttgcatcggtgttcctgtaattctgggtaaaaacggtatcgaaaaaatcgttgaactggaactgaatgctgatgaaaaagctaaatttgctgccagtgccgctgctgttcacaaaacaaatgctgctttgaaagaagttggcgctctctaatctgaatgccggatttttaatctgaaaatagaatatgcaggcctcacaactctttttacaagggctgtggggtcttgctttttttaatatgcttaaataatacaaaatgaaaaaactcttcatgagtgctgtggcccttctgtttgccggagcactttgggcacaagagaatccgttgtggatgcgtcattgtgctatctctcccgatggaactaccattgcattcacctacaaaggtgacatttttacagtccccgtatccggtggcaaggctacgcaaatcactaccaatccagcttttgatacgacaccgatttggagtcctgatagtaagcagattgcttttgcttccgaccgcatgggaagtatggacgtatttattgtgtcgaaagacggtggagagcctcgccgtttgacaactttttcggggggcgaaactccggttgcttttactgatgccggacatattttatttactgccgatatcatgccttctaccgaagatgccggattcccttcaaacggacaatttcagcagatatatcagattccggtttcgggcggacgtcctgtaatgttctcgtccatgccgatggaatgtatttctataaataaagaaggaacaattctttatcaggacaagaaaggatacgaagattactggcgcaagcatcagaagtcaccgattgcccgtgatatctggatgctccggccggggcagactccgcgctacgaaaaacagactactttcattggtgaagaccgtgaaccggtgtgggcaccggacggaaaatcattctactatctgagtgaagagaatggaacgtttaatgtttaccagcgtactcccggttcggatacatccaagcaagtgactcaccacaagcaacatccggtgcgctttctcagtatggcttccaacggtaacctttgttatggtttcgatggtgagatctatacgttggctcccggcggtaaaccgcagaaagtttctgtaaagattctatccgatagaaatgataaagacctgattcgccagattaagaccagtggggctaccgagatggctgtttctccggatggtaaggaagttgcttttattctgagaggagatgtgtatgtcacttcggtggaatataagactactaaacaggttacgaacacaccttgccaggaacggggtattgattttgcacccgatgggcgcactctggtgtatgcttcggaacgtggcggactctggcaactctatacttcgactatcgtacggaaagacgaaaaacagttcacttatgctacggaattgaaagaagaacgtctgactaattcggatatcgcttcattcaatccgaagtatagtccggacggaaaagaaatcgcatttcttgaaaatcgtacggcaatccgcgtcatcaatcttaagactaagaaggtacgtactgtgatggatgcacaatatcagtattcttatagtgatggtgatcagtggtttgagtggagtcccgatagtaaatggattctttctgaatttataggtatcggtggttggaataataaagacattgtgcttctgaatgccgatggtaaaggagaaatgcacaatctgaccgagagtggatattcggatggaaatgcaaaatgggtgttgggtggtaaagcaatggtgtggttcagtgaccgtgcaggctatcgcagtcatggtagttggggcgctcagtacgatgcttacattatgttcttcgatgtagatgcttacgaccgtttccgcatgaataaggaagatcttgctttgcttgaagaggcagagaaagctgaaaaggccgagaaagaaaaagcagaaaagaaaaagaaagagaataaaaaagacgataagaaaaaagacggcaaagagaaaaacaagaaagatggggatgaagaaaagaaagaagaggtgaaacctttgaagttcgatctcgacaatcggtttgaccgtattgtacgcctgaccgtcaattcttctttcatgggtgatgctgtattgacaccgaaaggtgataaactctattatctggcagcttttgaaagcggttatgatttgtgggaacatgatctgaaagagaattctaccaagattctgttgaaaggtgttggaggcggttcgttattgcccgataaaaaaggtgagaacatctttatgtgtaccggtgggggtatgaagaaaattgagatagccggtagtaaaacaacaccgattacatttgaatctttctttgattatcagccgggtggcgaacgtgcttatattttcgatcatgtgtggcagcaggtcgatgataagttttatgtgaaagatctgcaaggggtagattggcctttgtataagaagagctatgaaaagttcttgccatatatcaataataactacgattttgccgaactgctgagtgagatgcttggtgagttgaacgcttcacataccggagcccgttattccggtgcaggaggtgcattagcaacagcagcactgggtgtattctatgacgatacatataacggtgatgggttaaaaataaaagaaattatcgagcaaggtccctttacattgaaaaagacggatgtgaagccgggttgcattatcgagaaagtggacggtactcttattaagaaaggtgaagactatttcccgttatttgaggggaaagtaggacgcaaggtgctgctctctgtctatgatcctgctacaaagaagcgttttgaagagactgtgaaagcaatcagttatggcgcgcagcgtgaattattgtataaacgttgggtagaacgtaatcgcaagaaagtagaagaattgtcgggtggccgtttgggatatgtgcatattaaaggtatggacagccaaagtttccgtaagatgtattctgaattattgggacgctaccgtaataaagaagctgtagtcgtagatgtccgtcataatggaggtggttggttgcacgatgatgtggtgacgcttctgagtggaaaagaatatcagcgttttgttccccgcggacagtatattggtagcgatccgttcaataaatggctgaagccctcgtgtatgctggtttgtgaagataactatagtaatgcacatggtactccatatgtttacaaaacattaggtatcggcaaacttgtaggtactccggtggccggaactatgacagctgtgtggtgggaacgtcagatcgatccgagtcttgtatttggcattccgcaggtaggttgtatggatatgcagggtaattatctggaaaaccatacacttgaaccggatgtgttgatctataacgagcctgccgcttcgttgaagggtgaagatgcacaattgaaagctgcagtagattgtttattgaaagaactgccaaagaaataatgatttaactatattgtatatttgaactgagaggtcgtcttatttaaaggcggcctcttcttatatgtgaatgttttattaaatatgacttttatatgtgaaatactataaatatagttctatatctatatttatagttatatatttgtgtcattccattcaggttgtatcccaaatacttgatgaatagaagtataatctaaaattacttggtatgaatgaacagaaagaattgacaaaagcagaactccagatcatgcaggtgctttggcagaaagaaaatgcttttgtgaatgaaatcttgcaggagctggaagaaccacgtccggcgtataatacagtttctaccgtgttgcgtgtgttgcaaaacaaaggttttgtagcttatcgtagtttcggaaagaattatcaatattatccgttggtttcaaaagagagttataccaatcgttttatgaatcgggttgtggataacttttttagcggttcggtgaaagcaatggtttcgttctttaccaaaaaagagaaaatgtcggtgcaagaaatcgacgaactgattgaaatgctgaaggaaaacaaaaaagaataaggtatgatcgattttgattatagcgaatgggctattcttcgtttcataggagcttcatttgtgttatggctgtgttattacttgttgttcgatcgtaaagcacccttcaaccaatgccggaattatttgctgttttcggtgttgttggccggggcagtatcggtgttacgtattccggtttacccggtagaggtggtgaaaccggtaaaaatggaacaaatagtggtggcgcaggaagcgcaaacggataaagtttctttgatgcaaatagataataatgggatacaaccggatacgcttgcaacagcaatgctgacggatgtgaatgaagctgtcacgcatcagacggaagaagaaatagtcgaagaacctttttatgtttcgtggaattattggcaaatagcctggatcgtatacggttcgggagtatttatccttttggtgcatttattggtcgaaatggtgcggatctggcgtttaaagcgttggggaacttgtactacggatgccgatgggatttgcatcgtacgtaacaatgaggtcgtttcgccgttctcgttctaccggatgatttttatcaaccggaaattagaaggcgaagtgttgcgtgtagttctgcttcatgaaaaggcgcatattcgtaatcatcactatcgggacactttatttattgaaggtttgtctattttatgttggtttaatccgtttgtctggctggtaaaacgtgaactgcgagccctccatgaatttcaggtggatcgttgtttgctttccggcgagattgaattatttgaatatcaaagcatcttattcgaagagttgatgggatacagcccgaaggttgcaaatggttttcataattcattaattaaaaaacgatttatcatgatgaaacatcaatataaagaacgtttggcaggggtacgcaagatagcgttgcttcctttatgtataggtgtactggctttattctcttttacggaaaatccggtgctggtcgaacccgtattgccgatggtatctgtgccgataaaggtagaaactccgaaagtcgtattacccgaagtaacagtagacagtgccggtaatgagaaagactttttattgctggatactccaaagatagttcactatgtacaatcaagggatgctcacatcgttcaatccggggccggacagccgcttgcgcaagtctcaatttttgtaccgaaggctctggatacactttcggcagagagctcggatggaactttttcacaggagcaaaacataaatcataccatggatatcgatttacgggctgatcaggttgtattgtctcgtgctccacgtaaaaataatgcatatgtgcggttcattgaacggtctaaagaagatactcgtgttactttggctattccaatacattatgacaggcattggttgcaatttgaaaaggggttgtccatcgttgacgaagattcgaaggatgtttaccgtattcgttcggttacccgtgggattgagttaaaccgggtttattgggttgtggggcaagaagggcaaatgttggaatttactcttgtatttcctccccttgaccggaaagtaaagacagtaagtatccgggattgttttccggaagagaaaggattgacgccgcccaatggaggcgcatggacgttggataatctgaaagttgataattttcagccgacagctgtccgtcaagccgaatatgacagagagggacgacctctacgttctgataaattggaagaagtgactcttaatgcgaatcagctgtctgtttcttctcgtcacaatggtggaagaacgcagattcagaagattgaaactttgcctgataagacgttggttgttttgagtgtacctattcattatgatcgtaattggttagtcatcaataaaggattgtgtatagtagattgcaagactggtgatgaatatccggttctggaagaagcacatggcattgaaatgaataaattgctgtgggtggaaggttgtcaggggcgctctgttttactgacacttgtgtttccaaaacttcccaagagggtaaaaacgattgatttctataacaagtatccggatgcgggaattatttcgccgactaacggaagcagttggaactggtggaaaatcaagataaaagattatcagaaagaaccctataaacgcgtgattttgtagcatggtgttcttatgctgatagattaggcacggatgatgcggatttcacaagattataaatatctgtttttcggctacatccgtgcctgttatttttattccacttcgaatacggtcagtactgctgcatggtctgatgcccatacatagtctatttcaggagcagtacgtacgatcttggaagataatactttgagtcctcctttataataaatgaagtcaatgcgggacatttgcatttgcccgtaaatggctgcaactgtacctccctgataagcaacttcgtcgggattcttctcgcggaagctgtccttgaagccattctccagcatataacgagaggccgggaaagctaccggaccatatccgtggtgtaatggtttagcccgttcggtccagtcaagatggctgcacgagttaaaatctccggtgacaatgactggcatgtccgtttcaaggttcggggctatatccttggtatagatgtttcggatatcgggtaatgccaatatggaatcttctgcaacccatacagagggatcgagacctttttcagcatagccgctagtatattccgggcggtaagcatagcgcaaccagcagtcaacaaacattatccgcttaccattcggtaaggtgattttggcaggattcgatttgaaaggttctctccaggcgattgcttccaatgggaaacggctatacatggccaggttatctttgagagaatgtgtcttgaggtggtatcctagcgaatctgccagcatttgttggatgccataagcttcttgcatcatgataacgtctgcacgactgcttcgaatcagatcgagtactcgttgttggccttcgttacccagatggatacctccgtgccagatgttccattggagtacttttactatattggattgtgtttggttgttgcaagtcacttgtttacgtacttcttcggcagatgtttcgggaataattttttttccgttcaacttgaagaaaggtactgaggcatataaggtatgtccaggagttgctttggagcggacatcaaatgtgagaagaaaatagttgatgcccggttgcagcagaatctcttctccgtgagtgggacggagtgtcaatgactgttcgggagtatgtccgttgccgaacagctctttgcgctgtgtggaacgtgcttcactaccggtagaatagatatggatttgctcaatgtctgcaaggtcggtagttccggtgaagtcaagtttcagttccgttagtttcagtgggtttttggaaccttgtacggcaatcctcagttttagcgcctggtcgtttttacttccctgatcagcatcccattcactttggataatcacggcattgaacaactgttggtttccgtcaaactctttaaaagcagggttgtcgttggggactgcatgtgccagtggagctttttcgttgtatttgttacgtccgttacggatgtgataagcctgatgtcctttacctacccaattgacagatgtttcatctttcaggtcatcgaagttataatatccccacaaagatttaaatgccgggtgagtggcttctaccggacggttcatccaacgacggatggtttgctccggaagtgcgctgcgccagacacgtacttcgtcgattaatcccccgaaagtataatatacgtcatgcactccgatggctccgggaagaatagctgtcgccgtgtcagctttgtctacttgtttaccgtcaagatagaggatggtttgctttccgtcacaggtcagtgctacgtggtgccattggtcatccagtgtttggggtgatgagagattggcacggctagagtgaatcttgccttctttcacaaccaaaggcagataatccacccagttcagttcactatattctcctcctccgatgatcacttcgagactatcccattggcaatcatcccctttaatccaggattccagtgtccacgaaggttccaatattcccatacctgtccgtacgttattatctttcccgtcgaggtggagggcgaggttagactttccgccttttaaggcggaaagtgcaccctgcatctgcagagaggagcagatgcagaggatgagtattattacatatttcattatgcggttacttggttttgaaaattacggtccatggtttcgaacgtttgccactggccgaggtaacagtaaattctttgttcagcctgctccagtcctgataacctccgagtgcgggagacaaggtagctccggaagagagggtgcaggtggcaaagacattggacagatcggtacctttatctaccgtaatggtaacgactccttcatccgaaagaataacaggagtaccgacttcttctttatcctgattataaactttaaatgtcaatatctccgttttatcataattcggtacgtccggtatgtcgggttgttcacatgaaacaaagaggcagccggcaatgaagcagcaaatcagtatagaaattatcttattcataattatgctatatttaaaagtgtgatgaaatcaatcgttaatatcccggattttgttttagaacgctggagcggacaatctcgtcatgaggtaccggtgtcaggtataaccggtcattccaggtacgaatgtccgtcttggtaactttaaattctgtaggagaaacaaaacgtactccgtgcagggtggtctgtgtctcggggccgatcttccagcgacggacgtcgtagaagcgttgttcttcgaaggcaaattcgatacggcgttcttttcggatcaattcacgtaatttttccggatccgattcggtgaggtccggtaatcccactcgttgacgaatcatattgactgctttccgtgcgccttccacatcgcctgtttcaaggcgcgcttctgcatcattcagataaatctctgcataacggagtatgatccagttagtactgaagtccgggctgccggcacctgcgtacggatagttatagttgtcataatcaatccatttccagacattatatccggtaagcgaaccgtctcccttgtcaggagtatccatcagatagcggtctactgtcacggcacctttatctgcattaaagaaaatttgcgaaccgtggaacacgatgtttgcatagaatcgtggttcccgtccctcgtaaataccgcaagtgtttatatcgaatacctgatcggcaggagcttgagagtattgtgtagcgggagtaccgtctgccatttcaaatgcgtcaatcagttcctgagtaggaccgagtccaccccatccgcgatcaccgtatttatcgttgatatacgtcaccatgttacacaccatcatgttgttgtatacgtccgggcttttgtattgtacatcgaaaataatttccttgttatctttattggtagtccaccagatagagcgatatttctccggggtggttccatctaccagttcatatcccaatttatatacttcggcacaacttttgataacgtcttcatatcgtttgtcatacaactctactcttgatttcagtgcataagcggcacctttggtagcccggcctttttctctcgaaccatacgaggcaggcaacatttctgttgcttttttgaggtcttccagaatgaagtcatagcattctttctcagatgaacgggggatttcccagttatcttccatggtgagcactttatccaacaagatcactccgccatagcgctttaccatttcgaaatagaacatggcgcgcaagaaatgaacttctcctgttagccttgacttctcactttcttcgatggtcgatgtaccgattcgttcgaagaaacggttgcatttacgtacttttacgtaataatcttcccatacgtcgtcatcttgcggatcggaagcactgaccatgtcatagttgaacttaaaccagcttgcacggtatttatcacgctgtgccgagacggaattgtcgctgcggttttcttgtagttgcagtccgtctacggagatttcgctatatagatcgtttacgtaatatttcaccagtgtttcgtccgaccagaaggagtcgtccgctatttcgtccagtggagctttgttcagtacatcgcacgaacagaagagcaatacaaataagcaaaacagggctgtatttatctttttcataatcacgtttcaatttttaagtttagaatgtaatgttagcaccaaacacaaaggttttcatttgaggataagcgcttccgtcggtggaacgcaattctgggtcgaagtacttgatctgcgaccaggtcagcaggttggagccgctgaagtagaggcgcagtccctgaatttccgataccttggataacagtaacttcttgaagtcataacctatttctacatttttcagacggaggtatgaaccgttacgcatccagaaagaagagaacaattggttattggcattgcctccatagtacaagcgtggaaattcagctttcggattttcgggtgtccacgtgttgccgatgtgatgttcgagcagggctcctccgcgtccttcgatgtatgggaaggccaggtaaccattgtaatagaagtctgccagtgctgctccctggaagaagaaggttatgtcaaaacctttccattcggcattcagattgagtccgtataccaattccggatagttgctgcgtccgatagctatttcatcttccgcatcgatgataccgtcgccgttctggtctttgtatttgatatcacccgcctttgctttgccgaattgcggttgaggccagttgttggcttcttcgtccgactggaataatcccaatgcttcataaccgaaatattggctcatagagtgtcccgtgctgcgctgtctcggattgtttttctcaccggccggctccagcaggtcaatgactttgtttctagcccaagtcagattgcctgcaatagaatagttgaagtcgcgcaggtgattgcgatgtgtgatattcaggtcgatacctctgttgtctactttacctacattggctgccggcaatttatatcccaggatggccggcatatccgtacgttcgcgcaggatgtcgtttgtctttttatagaaccagtctgcttccagattaagttttccgttaaagaacgaagcatctataccgatattgaacatttcagaagtttcccaagtgatattggggttcgggaaacgggtttcagtgtatcccggggctatttccggattctgaccgccaaatacggcatcaccgccggtaccataagcggacatatactggaattgaccgatgttgtctgttccggcgcgtccccatgaagttcttaacttcaggttgctgagtactccggagaaaggttccatgaaaggttctgccgatatgcgccaagctgccgatacagatgggaagaaaccataacgcttgcttttcgggaatttttccgaaccatcgagacgaccgttagcctccagcatatatttctctttgtaattgtaagtcagacggaagaccgaacctactttaccggtttcggaggcactgccgctgttgtctttgtctttgtccggtccggcaaacaattgctggatagaatagatacgatattttgtgcgtgaagcccagaagttttcgtctgccccttccgaacgtgagaacacgaataatgctcccaattggtgatcttttgcaatggtcttgttgtaagctgcctggaactcgaatgtcatggcttgactggttgagtatgtctgttttagttcggcaccttcacggttaggtgaatgtccgtcatattctcctgtaattttgttccatacatagaagtctaccggagtagtccatcttttgatgctattgaatattttatcgtaggagaaaatacctttcaggttcaagccctcgagtcccggaacattgaagtccagcatgaagcgtgtgttcaatacacttttacggtctttcacccaaccaccttcggtagccagtccgataggattcacacccagtgacactttacccaggttgccgtcaggaaagcgtcccgggtcggtctgcgggttacggtgcatattgttgaatacatccgaagtactgcctgcaatgctgttccggtcttcctgacgataagccatgtctgccgataaattcagatatttgtctacaatgttggcgtctatattaacacgtgcattgtatcggttgaagccggatgttgatttattggtgcgtgtgtcgccatagagagcatcctgcttcacgtagccgaatcctgcaaaatatttcaccttatccgaaccgccgcttgctgtcagactgtgcatttgctgccaggcacgcggaagcaatacttctttgttccagtccgtattgggataaccgtaagggtcggaaccatctctgaacttctgcaactcttcttcagtataaatgccatacatacccggatcttcgcccaagtccatttctttgttgcgccatgcatcgttcataaagcgggcatggtcataagaactggctatttcgggcatacgggtaggggtaccaaatcctattttgaagttatagtctacctgtgctttaccgcttttaccacgtttagtggtgatcaggattacgccattggctcctcgtgcaccataaggagctactgcagaagcatccttcagtacagtcatactttctatttcgctggggtcgagttgcgacatgctacgtccgatgatgccgtccactacgatcaggggagaagaggaagtaggcgaactggatccgcggatgatgatggtcggatcgtcatatccggcctcgccaccggtctgctgaatcaatacgccgctgacgcgtccgccgagtgaagaagccaggttggcggttggcacatttttgagtgaagatacttttagtgtagaagccgaagcggttacagtttgctttttctgagaaccgtagcctacaactaccacttcatccagggttttagtatcttctttcatctgaatgttgaaagatgcttttccattcacaggtatttcctgagtcagatatccgatatacgaaattactaatacagccttttccggcacttccaatgtgaagtttccttctatgtccgtgatatctcctgttcccggctgcccttttagtgagatattggctccgataatcggctcaccgacctgatcgattactacacccttaattttaatttttcgttcctgctgggtgaccatggtctcaggggctttctctttgtctacgtaaagagaaatgtagttattagagaatttatacgtcaactttttgtttctgagcgccgttgtcaggatttcctttaccgtagcactggtgttttttacctctattttctgagaaaggtcaatttctgcatcacgatacatgaacagataattagtctgtttttcgatttcgcgcatcaattcgccgaaagtcaggctactcttagaaagagtcacacggacctcttgcgattttacgttaccagcctgaagctgaaagagaaaaacgaatataaagaacacggacagtttcataattcgtataatatgtgttaattcaagttgttgatggacataccatttctgcaacaagttttttttcataactttgtcgtacgtttaaagattaatactataggtctgtttcgagatggataaagatagtattgactcttttgggggtgagtgttggtagcgctcacccttttttgtcgcactatctattttgtttggatgggggatattttaagtcatagcgctgatctgttttaaaaggttagacatgggtatttagtaaatctcataatgttcatcatctgtttttttgaatttaaaaggatatactccctgcaaggctatcaggatattatccacatcttcgctttgtcggattttgcctgagattcgttcgtccagtttcacgtttccggtaaaattgaattgcacattgtaccatagggtcagatagctcaggatttctccgaaaggctttgagcgaaagctgaaaataccactcttcaggtattcttcattgtcgaagttggaagtagacactaccatgcggttgtttactaacgatactttttcgtgtgggttcagatagactttctcgtttttattatttttgttataaaccaatacgcgcccttctacgaggcaggtttcaaacttactctcttttcctgcataggcgaatacgttgaaccgggtacctaatacctgtatattgaacaactgtgtcttcacgataaaaggtttcttggcattcttggtaacttcgaaatatccttcaccgttcaattccaccatacggtttttccggttgaattcattggggattttgattttgctctgtgggcttaaccatacggaagtaccatccggaagggtcatgttcactcgttgccctttgggaacattgatctccgtatattgttttttttgctctttttgtgtataccagttagcgataaaccaagtagtggaaataagcaaaacaatcatagccgcatatttaaagaaccctatacggaatcgatgtacagaacggcgtttcagacgtttatcgaactctgctataccccttacagtcttttgagggtctccttcctgtgccatcagtccggagacagcccatactgccttcatgcgtgcgaattcttttttagcttccggattatctcggagtttattcagaaattctgttttttcggtggcagacagggtgcctgcgaaatatttttctaattcatcattcatggttccttgagtggttttatagtaaagacaatcgagaatgcatttaccaccaaaggaaatacaaaaaaaagtattaaatgataaaaaccagtaaaggaagatattctttgagttctgatctgagtttgcgaagtgcgatagatatctgattttcaacggtgtttacggatatatccaggcgttcggctatttctttatattttaatccttctatgcgactgagcaaaaagatttctctgcaacgttcgggcagcttttgcatcgttcggctcaacaggttttctacttccgaaatagaggaaacagcttcgtcaaattgttccaaagcatataggttcaattgagactccagttcttcgtctgctttgagcgaacaggttttggcctggatatacgactgatgtttcagaaagttcagacatctgtttttgataagagtaaaaagaaaggcatccagatggtctatatcttccaataactccagatgttcccataggtaaaggaaggtatcttgcactatgttttctgcatcctcttccgcaataacataggtttgcgagaaacgaagcattctcacataatatatagaatatatgtctgaaaaacttttttgtgttttcagtagatgattagattgcattctgcttatcgaacttgtttcttttatctatagtataagatacgtttaaaatgcaaatataactaaattgtttgcaatgtgagagagtagttttaatttttattttgtttattgtggagcatcttttttgaagttcgtttaagttctattgtttatagcacttaacacataggggattatgaaaactaggcgaaacacatctttcaggattagtaataatcgagtgggagagtttataattcggtccggttcaaaaaatactttagattgaagaaccgctatttgatttttttttatctttgtacttatggaaaaatattatagcacaaactgtccgattaatacgaccacaattattaagaccataattgttgcgatgcttttcattatcgcagctattatagtatttgccagtggaggatattggttaggaattagcataatattactgctgttagttatcatggttgtaacctatttttgtattcctcggaaaattattgtgaccgatacggatattgtgctttataatcatggatttaaaagaaaaattcccaagtgcgatatattgaaagcaagaagcgtcactgcaaaggacagaaatggtctgtggcgtaagtttgcagttgaaggtgtttgggggtattgtggtatttatgcttcaaaaatacacaagaacctttatatctatgcttctcaaaataagaactggattttgattgaaactgaaagaaagaattatattgtatcaccggaaaatctggatataatagatgtgattaataaataaatggtactatctacaatttagtggctactggagcacttttaagattagtttttaagcaatgtcctgtgggttttaatagtaagctcctcccgcttccattcccaaccttgctttttaaaattccctgcccccatacttgctttaatcacaactatccttttcggaccggcacttatcccttttcccagaaaatacccccttttttctctatttccttcattttcaatcctttttctccttttgtttttcctcttcctataacttgatttaaccctctgttaaatcaagccttttgtttccaaataac

SEQ ID NO: 5014 - DNA, 3368 bp, Unknown
  gut microbiota DNA sequence
cataacatagaattacagtttgatataaacaatacattatatgagtaagaaagaaacactcaagcaacaaattctcgatttaacccgggaatactacaaagaggttcacgggtcctcccgctccttcgaacccggtaagagttttgtcaactacggcggccgttattttgatgaccgcgaactggtgaacctggttgactcatcccttgatttctggctgaccgccggtccgtgggcccggaagtttgaaatccgttttgccgaatggttgggtgttaaatattgctccctgaccaattcgggctcttcggccaaccttcttgcctttatggccctgacctcgccgcagttgggtgagcgcagaatcaggcgggatgatgaagtgatcacggtagcctgcggctttcccacaaccgtgaccccctgcatccagtatggtgcggtccctgtttttgtggatgtcaccatccccgagtacaatatcgacgtgactcaactggaagccgcattatctcccaaaactaaagcggtaatgattgcccactctttgggtaacccgtttgatttgcaggctgtcaaagatttctgtgataaacataacctctggttggtagaggataattgcgatgcccttggctctacttatacaatcgacggtgtagaaaagaaaacaggtacaatcggccatatcggcacaagtagcttttatcctccacaccacatgacgatgggagagggcggtgctgtctataccgatgatcctctgctgcacaaactggtcaactctttccgtgactggggccgtgactgctggtgcatcgggggtgttgacaacacgtgcaaataccgtttcagcaaacagttcggcgacctcccggtaggttacgaccataaatatgtctattcccatttcgggtataacctgaaagtgaccgatatgcaggccgccatcggctgtgcccagcttgagaagctggactccattgtcgaagcccggcggtcgaacttcgcctacctgaaagaaggccttgcgggtacatctggccttatccttcccgaagcgcagaagaactccgacccgagctggttcggcttccttatttcggtgaaggaagatgcgggcttcacccgtaacgacctttcccaacacctggagagcaggaagatccagacacgcaacctgtttgcgggcaacctactgaagcatcccgcctttgatgaaatgcgttccacgggtgagggataccgcgtaatcggcaatctggaaggtactgattacgttatgaatcataccctctggatcggtgtctatccgggtatgacccgtgccatgctcgaccacatgatcggtacgatccgtgactttgtctcttcccgtaagtaatttccggttattaaccttcaataatctgtcaagcataatgaaagccgtcattttagccggtggcttcggcacccgcctgagcgaagccactaacctgatccccaaacctatggtggagatcggtggtaaacccatcctctggcatatcatgaaaacctacagccattacggcatcaacgatttcgtgatctgctgcggttataaacaatatatcatcaaggagtatttcgccaactatttccgtcataacagcgatatgaccgtggacctttccaacaatacgaccaccattctggacaaccattccgagaactggaaagtcacgatggttgataccgggctgaacacccaaacgggcgggcgtatccggcgtgtacagaaatatctcgggaacgaacgtttcctgctgacctatggtgacggtgtcaccgacctgaacatcggtgataccctgaaggctcacgagtcttcgggctgcctcctttcccttacggcctacaaacccggtggtaagttcggcgccctgcagctcgatctcgatacggacaaggtcctctctttccaggagaagcccgacggggaccgtaactggatcaatgcgggctattttgtgtgtgaacccgaagtgttcgattatatccctgagggtgactccaccatctttgagcggcaacccctcgagtctatagccaaggcgggccggatgcacgctttccgccatacgggtttctggaaaccgatggatactctgagagacaatacagaattgaatgaaatgtgggatcagggagtcgctccctggaaagtgtggtaagccgtatgggaattgatatatttgataatttttatcggggcaaacgtgtccttgtcaccggtcatacgggttttaaaggtagctggctctccatctggttgcatgaattgggggccgaggtgattggtgtggctcaagacccttttacggctcgagacaatttcgtactttccggtatcggcgagaaaattaaggccgaccttcgtgccgatatccgcgatggtgagcgtataaaggctatctttcaggaatatcaacctgagattgtttttcatcttgctgcccaacctctggttcgcttgagttatgacatccctgttgaaacctacgaaaccaatgtaatgggaacaatccatgttcttgaggcagtccgttctacggatagcgtgaaggtaggtgtgatgattaccacagataaatgttacgagaataaagagcaaatctggggctatcgtgaaaacgagcctatgggcggttatgacccttattccagtagcaagggagccgctgagattgctattgcttcatggcgtcgttctttctttcaccccgagcaatacgataaacacggaaaatccatcgccagtgtaagagctggtaacgttatcggtggtggagactgggctttagaccgtatcattccggactgcatcaaggctttggaatcgggacggacaatcgatatccgcagcccgaaggctgtccgtccctggcagcatgtgcttgaaccgttgagcggttatatgctgctcgcacaaaagatgtgggacgcccctacggactattgtgagggctggaacttcggtccccgttccgagtccatctcgacagtttgggatgtggccacccgggttgtgtccgagtatgggcggggtgaactgcgtgacctttctactccggatgcattgcatgaagcccggcttttgatgttggatatctccaaggctcggttctgtctgggctgggagcctaggatgaatatcgggcagacggtcggattgacggtggactggtataagagataccgggaagaagaggtatatgatgtttgtgttgaccagataaaagattatttattgaaatgaagatattattgacgggggcgactggttttttaggatcgcatattgcagaagccttgctggcaaacgatgttaacctgatgataac

SEQ ID NO: 5015 - DNA, 44249 bp, Unknown
  gut microbiota DNA sequence
ggttcgcttgcgatggtccccccttttttaaatcaaagatccaaaataagaaagaatatccattatgacaggtgactacaaattccggtttatgccggggatattatccttgatattcacagcagtgctgttatccgggtgcatagccgagaataccgatgattgtttcaagggagtttcccttcaggtgaagctgcctgccgatgtctccggagaaacaatgaaggatataaacctctacgtgttcgatgataaagacctgttgttagacatcctgcctataagtagttcggaatctgttgtattagattatccgggcattcccgtacttcattgtatcacttggtgtaataccggggatggtgctgtgtccgccggttcactgaaaaaaggcgatccgctctctgccggtttcatctctttgaaaccttctgctgctacaagagcacagatgagtctcttcaaccctcctgcggatttgttttacggagaacttattttagaaaatacctcgacgtctaatcatatggaagagcaggaactgtctgtctcccggatggttgcgtcaatgaatataacaatccgcggattggagcttttgggagaaagcaaccggggtgtttactcgttcgttgtgcatgaaaccgccagccgtctggattttgaaggccgttatggaggcgatcccgcttcctatgcattcactccctctttcgaggtgggaaaagattgtacgatgcctacctttaacctatttcctgttatggggagcggcggtataatcattgatatctaccatgacggtaagttattgagaagcgtaagtacggatagcggtaatcgccctcttgttcccgtagtgggtaaaaccctgaacgtgctgttgaacttcaagctcgatgtcgatgtgcaggtagagataaccggttggggagagaaatatatctggaaagagtataactgatttccatagagagtatagaactatagaatgaagataaaattagagaatatgacgaataaccctatatcgaagttacttcggttggtaatgctccttgcggtggtgctgttattgtcttcctgccgtcaggacgatgattcatatagtagtcacccgggccccaccacccttgtaagtctgtctgtgtccgcttccaacagtggtgcggtagcggcttccgatgatccggcttcatccatcagagacctttgtattctccaatttaatgtaaacggcacaggtttcggcaatttgcgtcatgtggccaagggctcaccggcaagtgcggggactttcaatgctacattgttgcagagtgtaaatccggatgacaagtataaacttgtgttgcttgccaacctgcccgattacggtttcctgaacagtctgtcggggaaatcttatgaccaggtgcaaaagacattgctgagcgaagagcttagtggggtgaacaatattctgtctttcgatggatcccgtcccttcccgatgttcggagtagccaattctggaaattcaatagagatcactgcaaacatgagtctgtccgatgtgtccctgatacgcggagtggcgcgtgtggatatcggcattggtataaaaaatgcagatgatacatggaataaaaacggggtgaaatttaacatgacccagattcagatctggaaagcgggcaagcaatatgcgtacatgccttctgaaaataatttttcctccacaggacgagtggatggagtgactataacaggtccttctcccgtggggactacggaaacgaaggtttatgacattacacatattacaaacaatacttattgttctggaaagatctatcttcctgaagccgatttgaactggggagatgtatatgatgctaaccacacagatcgcctggcagttattgtagggggtaaatataacggttcgcaaacagaaacattttaccgcgtggatttcaaaaatgatgtttcgggtgaaaaaatggacatattgcgtaaccatgtttatcggtttaccgtaacgaaggtaacggatgacggttatgatacagccgaactggcctataaaagtataccgaaagatataagctttactgccgagcttactccatggacattccctcctgcggtttccgtgccttccataatcggttaccgtatggtgtaccaaaacacgaatggtggcatgttgttgtggaatacagcaaccggacttactattcctaaaaagagagatacctggaaggggactaaaatgaactttaactataacggattttatgacgaaacaaataacgcttatgctataacctatccgatagaacctcgaaacggatcgctatatcacaccatagaggtggcttttgattatgagggagtatacccctcccttatggtatcggctgatgatgtcactgacgtgacgggtggagataccaatccgtggaaaacgggtaaaacccttacggcttttgacatttgccgcaactatgaaggagacggatttggcgactggaggcttccgcggctttccgagctggctttgctctatttaaacagagggagcctggaggcaaagagagggtttgctccactaagcggaacttactggagcggttcggaatatctggtaagtgattcgaaggtagataaaagacactccgaacaggcttggggaatcaactttgatgctacgaatccgggcaatgcggcaccctatgacaaaacaacgaaaaaatttaaaatccggtgtgtacgacaaacgcagtaaatgaaaaaatatcatatacaataaatatggatactcaaaagaaacataatttatccgggacaatcatccttgtatcgtgctttttattactggcaggagcctgtgataatagtgaccggatcgagacagagactcaggcaaacggtgtgctcctgaatttcaatgcgtcgacgattgatgcaaccactactgaaacaagaagttttgttcccattgaaggttttgccaaaaacgaatatatttttggcatgtctgtcaccaaagataatgcatcacggggtgagatttttgaaggatcccgtaatctgaaagcaaccatgagtagaccttcgggcgatgcgccttggaactgggaattcagcaataacgctagtggtacagtggtaactccccggggaccggaaggaaagccactaagggtaatcgcttattatcctgccattgccggaaccgagaacttcactgatggaattccgtttgattttacacagaccaataacccccaacagaaggaaatactctacaataccaacacttcatatacgataccttcatccggtggctcagacaaggtgactattcctctgaagtttcagcatgcctactcctggataagtatcaaggtaacgaaatctgttgataaaggcagtcacaagctgagcggcgtatccatagacaacctatcgggaggatggattaaaaacaaaggaaagatcaatccggcaacgggtatggcaatgcagggagctattcagggaccgataggagaagtgaggactgcagaggtactggatccctccggagatacagcaactcctataatatacgactttctggttcctgcatttatggatagaaatgttaaagacgacgaccttgttttcacattgataattgacggaaagaaagaaatcttttctctcggaagagagcacctgaacaatgacggagacacatatggtttcaagcagggttatgccaatacttataacgttgaattcaataattcgtctctgagtatgcggcttttaaactggacatcaacacgtattgatggagattttggtcaaaatgtaactaatcctacaaattatcaagagatgagtttctactatgccgaggataatggtggttggacgacggctaatggcaaagtatttcctccaaaatacaaagacttgccagctggtgaccgtcggtattataattaccttactactgtgaagtatggtggcaacggagaatatgtgccggccaaaccggtgacggatccgcctcctcccaaaggtataatcatagaggatgatgctaatgttgctacccaggaaccggcttgcaggctatttcagatgactacaaaagatgtttccattgaaccggtgccgtgggaagatgaaatgggacagttggttgcaaaagaactttgcaggaaatataacggggggggctttaaagactggaggcttccaagggcatccgagctcagggcactattggtatatgcaatatatggtgccggtactaaacaatttataaatttgaaactaacgaatgatgtaaaccgggagaaactttactggacaggaaccgaagaaagtgaggacaaagcttgggctatgctctattatgatgataacactcttgttggtagaggccctaacatatccgctcaagacaaaagcacaagactctctgtacgttgtatccggcaacttcaataacgacatcatataatttcatgaatgaataatattcttatgattagaaaattaatattctcaatatgcatgatatgcccgttgttggcggggtgtacggacgacgacatgatgccttcatcccaaatgcctctatcctcggaaaccgttcccgtcaggttgaatttcagcaccgaggcttttaataccccctttcagggcgacacgcgttcgggaggagaaagtactgttttgtccgtttccaatcaggatatggacatcgaattggtgaaaacacccgttacaagagatgctgtcgcagccattgataaagaaaacgccgtctataactataccgtattacagttcgccggaataacggaaactgccactttactcggtaaagctacctatccttgtaaggatggggtaatcacaacagcggatgtagagcttcaggcaactacaacagggcccggcgggactgtcgttaaacatcggttcgtggttatagcgaacgttgatgggacagattttaatactttgcaggaaaatacttccacatattcggatttgcagaatatgcatatttcgcaagcaggaaaccaagacttccctttgcataaagttacagtaaacggagtgaagaaagatgcaataatcatgtctggtttggttgatgccaccataaataccggtgaagccaaacagctatccatagctttgaaacggacggtagcgaaggtcacttttaatgttaagacagataatccggcgtttagtaacttaaaaaattgggacttgatattaatgagtattcccaataaaagttactttaacacattggggcggttcgctgttttccccactgtagatcccctgaaccagttttcggcttattggttcaagccacttacctccacagtaggcgaggctcttcctctgaatgagaagtcttcctatctccctgtcaatcttcagcagtcagtagcgatctccacttcgggcactcgccgtgataacgcgccaatcggaggtacttatctccaaattatgggtagagagatgtctcctgatggagtgggttcatttcccgtagtaaaagatttcgttctctatcagatttatctgggaaagaacctgactactgatttcagtgtgtactccaataataacctgacctataatatcaccctgaagggaaggtcggacgatgacaccaatgtcataaggtttattcccggctatttctccggagaacttaaagcgtatgatgcaaatgacaacgccttggcttcaaaaaccgatccgtctgccgttaaatgggaatattccaaaagactggaggctttctttcaggatagcaagtatacgggacaacaggtggggggtgaggaaaacggcagacaggatgtgagatggcaggttataggttcgtataataatcgtggagccacctccctgacagacggttatggcaatacccgacaactggaggcaaatgatattttttatctgcattatccggcggcgcaggcctgttatggaggattgaatggactggttaatggaggtgatacatcattttcatggtatcttccttccgtctcggaactgatcggaacatggatttcttctgcaagtacggcaagtcagttgagtgccagctactggtcatctaccgcccttggtagtcctaatgcttttatcatcacgaataaaggagaagtgaaaaccgcacctgtcaatagtaatgatgatcgtcactatgtacggggctttcgggatccggatgcagttaacaccattcattataatataacccattgaaaagtgaaaattatgagttttaaatattatatcctcctgccgattgtttgggtatgcctctgtttcccttcagatgctttcgggcagtatatcaaaaaagagactgtcaacagccaggtttatgccgtgatttatgcggaaggattggcagggtccgcccaatgggtctccgggttcaaaatgatgaaaaacgacgcaaccatccgtcaccaggtatcccgtggaaatggtgggaatccgattgtcaatgacaggattccgatgcgtttcattatagctcctaccgatgtagctaatgtcacctggatgcaggcagaaggtgcaggcgatggaaatggaaatctgaatgcagattttagatcaactgctgccacgggctgccgtagttacaaaatagccggtgacccaaaccgtacatggcgtgttcctacccagcgcgagctgcaattgatgtggctgtttcgtgagcctgtgggagttatctatccggcagcacagatggaaaacgtatcgtcaaaaatatattgggctgccacagaggaagatgctgccaatgcatggtatttcgatttcaaacagggggtgcctcagtgttcctggcagcttaaaactacttcaagcaatgtgagatgcgtaagtgattattaaccaataataaaatgtaatatggaaattccggtattagcaaaaacgatggaacttgacaatctgtatcacatctatcttttttatgttgatgataggtggtgtgcatttggctgttctgcgtattacttgagtatcatgtatcctgagttggatgactttgccgaggcattttttacgagtgatggagactgtctgcctttccttcccgttaccgaaccctgtttgttaaacctctcagattattacaataccctggtctcggatacccatatacaggttagcgttccacctacggtctatagctatcgaaatggctatgacaaatggtgcactaaactgtttgttgacaaaaataaacttcatatattgaaacatcaatgagacgaatcatacgatattgtttattattcttttttctattgtttgcaggtagtcttacgagtaatctgcaggcacagttttattcagtacagaccaatacgcttaaattggctaccactacttttaatgccgagggcagtatgcttttgagtacccattggacgttgaatcttggtttttcttataatccgtggaacttcagcgatacacgtaagataaaacactttctgatagaacccggtgcacggtactggttctggcaaacctatgcaggtagttttatcagtatgtatgccatgggggcccgttacaatgtggcttgggatggtctgttgggtggtgactaccgttatcagggatgggggtatggtgccggaatgacttacggacgttcctggttgctgagtaaacgctggaatatggaagtggaggcaggattgggattgcttgtggctccgtacacaaaataccgttgcgaacattgtggagataaggtaaaatcggaaacttactttttaccgactcctaaattggcatttaatcttgtttatttattctgaggttgattttttattcgacccacgagtgtatgaagaatactaaaagtttctatattatatttctgataatggttattactgcatgtacgccattcggtcttctccataaagatcagcccagggtgacactggcattgccggccaggcaggaaacgggaccgatgaatgtggtaaagcgtgattctgttagcttgcctccggtttcaaattttacatttgtcaattctaaaggagattctattcctgtgggtatgtctgtagaatgggatagtatccataaagagaacctgactacgctggctctggatgaggttgtggtgtcggcccgttctacccgtaacacggcggagcgcaacgggatggttaacatagaatttgtagtaacggtgccgcaagccctgcagaaggataactggatgcttaatatccgtccggtattaatgcggggggatacgcccgattcattaaaagaattgcgtttcacgggccaacgttttcgggaggcacaagagcgggattatcggcattatgaccgttttgtcgaaaaaatcatcccggattctgtcaatttttaccggacttatgtaaactatcactctttcgagcgctatctggagcgtttgaagtggtataaacgcgggttagagaaacgttgggcaatacaggatgccaggaaacgtcgtccggaccctttgctgttgcgttttgatatgttcaaccgtcaggtaggcaggcgggacagcctgatgaaaagtcgtatgttggataactctcaacgaatgattacccggcagtggtggcgatacggtcgtgcatgggagcggatgaatgacaccttacagtttcaaagtaggcatctgctggaacgtttccgtttcttcaacaataaatgggccgataatgccgctttccaatccgatggactgatagcccgcaagaattattttcgcgacaaagcactgagtacccctatgtggcaggcaaagcgcgcactctataaagcggacccggatgctgcgatacgaatatatgcttctcgctttggctattttaatgataaaatggaacggctggatgctaccctttaccgatattatcgtaccaaaggcgcgcgtgctgaaagtagagaaggagtaagatttctgcgagcttttatggtgggacgtgatactactttgtcgtacctgaaccgcaaccaattaacggagaaatatattcgtcgctacgagaaggtgaaaaatttcttcccgatgtttcatttccgccgtccggatccggatacgttatctcctttgtgggagacgaggacacggatagatacaatgcagacacggcatacattgctgtcgaagctttcaaaagaagatatatacgaatattatgtccggcagcaacaaggggtatctgataggggaatgataggaccttttcgtggtcttctgcctctatatacctatcatcgtgatttgcccgattctatagtattgcgtgtcccgggacgtaaaacacggcgggattttgaactcagccggtttgattcggctactacggtcaatcgttatatcggtcgttacgagtttctgcgatcaacttatccgcaataccgtttgatacgtaaattgtataacatacatccgcctactcagcggcatgcagcccgacaggcgagctatgaagagcgactggcacgtatcaattctcttgattcgaccagtctgataaagatgttctataatacacagaaaattgcccgtaatgaggcgcgtaaggcgatgaaagatacaaaataccgtgatatcgttcgttttccgttcaatcctgaagcgcagctcgatacggtgatttatgctactgatcaggtacatttcctctactcgcagaaagtaccggcagatgaaaattcggcacgtatgaaggtatatgtagttggtgatgtgctgaatagtaatggaagcaggttttcccttccgtactcggatacgctgacttatctggtgagttcgatgactaagtttattgacaggacgccacgctttgttcgaaaaatagttacccgtgatgcggaagcaaatgctagtgtaaacttttactttccaaaaaacagttttcgtatggatgaaactattgacataaaccggcagggagtgaagcaggtacataaccttactctggcattaatgaccgatccggtatatatcatagacagtctgacgcttttggctacctcgtcacccgaaggtaactggcacgttaatggagaaatatcccgaaaacgtgcggaatcaatccgtaatattttggtggaggacttcaaactgctttatgattcattggctatcggtgctgctatcgagatggatgagacgggcaacatcatccggcaggagatgaaggacgggattccgaacttgccggagttgataaagatacgtaccgtacctgaggggtgggagaaactgcgccgtctgattgtaaatgataaaaattttcaaggcaataaaggtgcaatcttgagaattattgatcgtgaacaggagcccgatcggcgcgaatggctgattaaaagtcagtataagacagaatatgcctatatgcttgacaaactctatccggcagtacgcagggtggatttccttttcagtctctcccgtcggggtatgcggcaggacacactctataccaatgaaccggatacaatgtatgctcgagctgtggattatctagagaaacgtaaatatgagcaagctttggaaattctgcgtccgtacgaggatgtaaatactgcaattgcctatatgtctttgggatatgataaggctgccttacgaatacttgaacaatcgtcgcagactaccgaaacccaatatatgcaggctattctgaatgctcgtctgggtaatgagcagcgggctgtatcgttgttgctcagtgcggcggaagtggatgaccggataagattccgggccaatctagatccggaattatctctattagtgaagaaatatggcttgtttaaagaggatgatttgtggtaattttgagcgggagatattggggaactgtgtagatgtctttacaaaagaacaggaatataacagatatagtaagtggtcaattaattttctttgatttgcttttgtataaaaactgtctattcacgttttgaaacgagcttagtttatgtttttagttagaatactttttggttcggtagaataggaaagtgtcattgtatttttatctcatgaagataaataagattgtttgttttattcagatgtgctcgcttctagagagaaggagcacattttgttaaaataatattcgctgtatgatttgtgattaaaaatacctttgtcggaagcgacggatgcattatcgggatttataagctattctcgattttgatataacctcagtaacttgataagattctttttatactaagtttattgtcggattgtgtattgtcaatccgccatctactactatggtctgtccggtaatgtaacgtgcatcttcggaggctaaaaaagcgatggtcgcggcaacatcttgcggttcacctaaatagggtgtcgcacattgcccgagaaatattttgcgtacctcttcattaagattattcagtgcggccggggtcaggatcaatcccggtgctactgcattgcaacggatgtttttctttcccgtttgggtggcaatgtatttggtcagattgatgactcctgctttgctggctccataaagagtaccattcgaatcggccgtgattccacttattgaggctacgttcacaatatttccaccaccttgtgcgctcataatggggataaccagttgggacaaatacatggtacaagataaattcagatggaaggcttcgtcaaaataatccatatccaaagtttcgatgtttgtgtcccgtctggggtttgtacctcctacattgtttaccagtacatcgatctgcccgtattccttcattgtaaaggtgattagttctttgcagcttttcaattctgtagcagaaaaataaaccggacgtacatctgctcccgaattactcagctcggcagcaaattggtctgctttttctcttgaatagtcagcaataactactttgccgccttcagatacaatgcggcgtgtggttgatgcgccgattccaccggcagctcccgtgataatgattatcttattttcaaatctgttcataataggatggttttgaggattgatacttacataaacagtctgtttcagaatttgttattcgaataaaccctctttagcaccatttccctgacttttgcatctgtatatcttttgttccgccaaatctttataaatccgttaaatgttaacgaaagaaagccttaatgttaataggacggtcgttctattaaaccatgttataagatagtctgtttcgcttggtaaatttgcaaagttgataaaagtccgtatctttgcaatgtgtttttcatagtattagatttaaggttaacaaaagattggctgtctgggatagatagcctttttttatgcccatatatgaagagactataaatacagtgttgacttcattgttctacttttagaagtaacagattgcatatctctgcaatggctgaaatctgattattaatcgtgcttttatagatttatacgtacttctttactcgatgcttttggatgatgttttatattcggtgagttgggaggatatgataaatagtttgggatagattagccttctttatatctgttgaggtgaaaaagaacttgttaattgttaacagtgtaaatgtaaaatgttaataagttgccgacaacattaaaccatgttatattatgactggatatggtttgtaaatttgctaattagttggaaatcggtatttttgtattgtgttttttcataagtattagatttaaggttaacaaaagattggttgctcgggatgagtagccattttttgttttatatggttatatagtttccctatattaatctttattcttccatccgattggtttcctttataatttatagatgattttgaaagcaaaatgatttttatattgttattagtgcaatatcaacgttctataagcttgttctatttattaattattaaaggaaacattatgaaaaaaaatctattgttagttggagcacttgtaagtgctttcctgttggcttcttgctcaggcggggataagagtaaagctcctgttgtcagtacggcagatattgaaaatgcggcagaagtaatcaagtattataatacttcgcttggggtgttgaaagatatggtgaaggaaaaagatgtaaatgctgtattggattatatggaacaaaaaggaaaagccccggctctttctgccattgttcctccggccgttgtttcaaaagactcggtaatagtgttgaatccgggtaactgtttcaacgaggagacccgccagaatctgaaacagaactataccggattgtttcaggcaaggacagaattttatgccaactttgatacttatctttcttatttgaaaaagaaagatgtaacgaatgcgaagaaattgttggatgtgaattatcagttaagcacgcagatgtccgaatataaacagaatatttttgatattctgagtccgttcaccgaacaggccgagctggtacttttggtggataatccgttaaaagcacaaattatgtctgtccgaaaaatgtcttccacgatgcagagtattctgaatctttatgcacgtaaacataggatggacggtccacgtattgatctgaaggtagccgagctaacccaacaactggatgcggcgaaaaaacttcctgttgtgaatggtcatgaaggcgaaatgaagtcttatcaggctttcctttcacaagtggaaacatttataaaacaggtgaagaaagtaagggaaaaaggagaatacagcgacgctgattatgatatgctgaccagtgcattcgagacttccatcatttagaatattagaatgaatgttatacttttcgatggtatatgtaacctttgcaatggtgcggttacatttgttgtaaagagggatagaaaaggcttgtttcgttttgtttcattacagtccgaaacggggaaatccctcttgaaacgatatgctgttgaaagtactaataaaactctttattattttcggaataatcgttgttattccaaatctacagctatactctatattttaaaagatttggggggattctggcagtgtctttatccattaattcttattccggctaagctgagggatgcgatttatttattggtttcgaaatatcggtatagaatatttgggaaagcagattcatgtataaaaccgtttggtttttcttcggaagaatctaaaagatcagattaattttaacttatctaaaaaaaatatatctttgtggcaaagatgtacatttttaaataaagaaatatggataaagtgattattaattcttatgaagattttgagaagttgataggtcagcagattggagtctctgactatctggaagtttctcaggaacgtatcaatctttttgctgatgcaacattggatcatcaatggattcatgtggatacggaacgtgctaaagtggagagtccttatcatagcactattgttcacggatatttgacattgtcattgcttcctcatttatggaatcagattattgaggtcaataatttaaaaatgatgatcaattatggtatggacaagatgaagtttggacaagctgtattgtcaggccaaagtgtacgtttgaaagcaagtctccattctttgactaatctgcgtggtgtggctaaagccgagattaaatttgcgattgagattaaagatcagccaaagaaagcccttgaaggtatcgctatcttcttgtattattttaattgagagtagtactgaaggtgtgtcataactcactacagagtaacacagggttccacaaagtgaacttaatctattgataactaacgatgctgatctgtggcgtatccgggttttgacacatcctcatttggtggactcgctctatttatttaaaaaacgaaagaaaatccatcctgtaacattggttacaaattatttgtatctcatttccgacctttgcccactgaataataaaagatgaaagttatgaaagattataaactaatggcggttggacaaattgtagccgattgttttgattatgcaaaggtcttcaataagtatggtattgatttttgctgtaatggagatgtttccctggctgatgcttgcgggaaaatggggatagacgcagattgtttgcttgaagaattgaagcaaataaaatcggaacagtccttaactcttgactttaaaagttggcctatagatttattagtagattacattttgaagttccatcatcgtaatatccgttatcagggaccgcaaattctccagttgcttgatagggtttgtgaagcacatgccggaaagcacccggaactttatgaagtgcgtgaactgtttcaggaatcctggatagatttgaacaatcatcttactaaggaggagatggttttgtttccttatatatatgatttatttgatgcggtggctcaacatcgtcctattccggctttccattgtggaagtgtgagtagccctatttcggtaatgatgagcgaacatgatgccgaaggagaacgttttcgcaggatttccgggttaactcatggatatctggtacctggtgatgcttgtagtagttataggttgctacttgagatgttgaggacgtttgaagataatttgcaccatcatattcatttggagaataatattgttttcccaaaggctatagagttacaagagaattgtgaacgaatgtgttaattgttaacgcttttaatgcgaagtattaacaaaataggagtgaatattaaacggtgttataatacggaatatttttgatctgatatttgctaattgattgaaattcggtatatttgtattgtgtttttttcataagtattagatttaaggttaacaaaagattggttgctcgggatgagtagccattttttgtataagacactttggttgcttattctacaattaaaataggaggatcagaatctgtatcctaaacctattcttaaacccggataaacggcagaagttccatttgaggatccgatatagccgactccacccgatagatcgaatagaaaatgcttccatacgcgacggaatccccaatagggggtgataacatatatgtgggctgctttcactccactggtaatggttattggaaaagaatatccgaaattaacagataaatacccgccggaattgccccaagtacgtttgccattgcgatgtcttttcttcaggttataataaaagcgtggttctatggctaaatctccggttactaaatgatagtctttggtgtcgatatgaaattcgcggagtgattccattttgagctgtagtattcttccaaaagcataagaagatcctgcgctaaaaataatagtacctttgggggcaaaagcatattcataactataggctagtccgatgccatttaaactgatgctgtgaccggagacggtttggaattgggcagatacatcgggtctttttcgaggattgtgttcggcacggatagaaagagcgaataatgtaagtaggattgtggtgataaagagtactttctgcatatgttttctgtttttggttttataattgatttcttgattataaagacagaaaaaataagaagattccctattcggatgataagaataattttacgataaaatataaaatctaaagtttaggtagatcgctatcaccgttactgacctaaactttagattctgtatgctatgcaaaatgcttgttatttacggatacatctgacagaaagagctctgtctgttatattaccatcttttatttcatttgtggtatgcagcaaatagattgctctgtttgtttgatttccagatgaattggtagaccagtataccaccgtatataagccgttggtatatccgttcttactttttagaatatatccttctggtactccattgaatcccgtaatgtttagtatgggaagcttgtcaccattttcatcgctcgaccatggtccgaatttcagtttagaagcatcgttgtttatatattgctttaatagttcccactcggtttcggtaggaatactccatccttgaggtgatagcttgcctgaaataacagcttctgaattgtaaaagtaaaagtcttgaggtgcatctttaaatttgccggtgtaatagcctgctgttgttgtaaaatctttttttaaagtaattgctttaccgtcagtatagtgtgtcgcttctagactacgtcccatccaatattggattcctattttgactatagggtaagtttgggtttccgtatttcgtatatctgtcaagacctcttcttgtaatcgcaccggtagagggttttccggcttagaaattgatattgagttgtcttgggttatatagaagtcgctgatgatgctttgattgcctggcgtgtagtctaatgcattattaactttgttccaagagactttacctccatgaatggatgctggttcgtcaagtaaacaaattactgttccgttattcagatctgttgctccgtttagaacgggatagacgacaatggcttgtgcgtcgatgttatcagctaaaagatactctttacatatttcagctacctgagttccttcattaattgccttataaacgttacttttactgaattttagagctgagagatgaattacgcctgatgtttcctgggctgtcgtttcaccggaatccccttctgtccagtctgtaatgctatgatcgaaattgttgatttggataccttcggatgatttatagataatggctatagaacaatttttttcactggctaattgaaaattatcaggaaatggacaactatagcttttaccgtttatatctatatttatatagtgattgtcagattctattttttcgggtattaatatgacttctttgcctgtcagagcgttattctctattttccattctccatgaggtgtgacactaattgtttgtcccgatggctcgaatcgatctgtgagaaaatcatatgatgcgtccgaatggaatccatttaatgatagagatggattgtcatttaaaagttcatctatatcttctcccggagctggttttatagtgattttcagtttgcagagtttatgtttatattccatagataccatattttgactgggggtaatatcactgtttgtagcgatcataaagtcggagagcgagtgtttgcttacagaactttggtcggtatgtatttggacttgcattatactttggtcttggttaatacctgtttcttgaaaagggtaataacttataaaatcacatttaccgtctcccttgggataatagattgtttcttctggttcgaaaccggttgcttgggaacatgtgaaacgcatattgtcaatgtatcgtttctggttgatggttgataattgtgtcaatacatacagaccgatggcatctttttcctgaaattcgttattgatagcacgtgtgtggttacataaaatttgtgtagaaagacggatgggtatctctccgggaatatctacaggatcttctgaaatttcatttacacatgagattgtaaagagtagaggcatcattacgatttttatcataaaagatgcaattgacttgtttttcatgatttagttttggggttatttatttgtctttttagtcgtttggtttatgtgataacaaaactagtgttattaatataattattactatgaattacgataatattttgaatttatataataattgtttaattggatacgatgcttacattattatataagagaaagggtagttgggggagagattagtatgtattatttgtattgaatatatttattgcagtagtaccaataggccggcaagagaagaaaatgccttgcctgcctatattcttttgaagatttaccggattgggatgtagatttcggttaataactcttcgggaggagtacatgatggatcattaagatacctttcagcacttggttcatcgcttagtgtacactccatttcaggtagatatttgccgtaaattgtgtcatacacggcttgcaactgatcgtatgaacccttgtataggaaggttgcataacgtccggcaggcaattgcttgaatcctacatttcctttcggccttgcatttgatggtaacaacatacatacgtcagtacgaagtttatcggttggggttactttggggtcatcatggtagatacagagtggagaagggtctcccatcggaagattttgttctttcacaaactgaatgaggtgcatccatgtgcctgcatagtcatttagtttataatcaccaaagaggcggatataaattacatttcgttgggggagttctctgatttcctttttcaattccagatccggtttaataattgctggtttcataattacatagtttttattattacgatattctgttggagagataccatacatttgtttgaatattttggaaaaagacgatggagaagcatatccgatccgataggcaatatcggatatggaagttgatgaataacgtaataggcgtgccgctgcttcagttcgtgtccggacaataaaggtaccgatgggttcacccaaaaacgctttcataatgcggtgaaagtagaagggggagaaatgggaaatcctggccaatgatttcaggtcaatttcttcacccaagtggagattaatataatctactactgcatttacacacttctgatattcttcttgcgttgtcttttttccttccatgattcaattggtatttcaatgttgcaaagatagggtgaaaagaaagagagcacttgtccgatgttgctgaatgcaaataaaaatgctaccagtcaatttcttctatgcctctgcttcgtaaaaaggtattggctttactgaaatgtttgcaaccgaaaaatccataatcggcggatcggggagaagggtgtacggcggttaatattaaatgtttatcggtatcgattagtgatgctttttctttggcatatgatccccataacatgaataccaggttttcacgttcttcacttaattttttgatgactgcgtcggtgaaagtttcccatcctatattacggtgtgaacctgtttcgtgagctcgtacggtaagtacggaattcatggggaatactccttgtttgacccatctatccagattacccgaattgggaatcggcttgcctagatcctgatgtatctctttaaaaatgttggaaagtgaacctggaatagcgacaccgtccggtacggaaaaacatataccataatattgtcccggattaggatatggatcttgacctaaaatgactacctttacattctgaaaaggacatgaattgaatacatgaaaaatttgatgtccgggtggaagtatatgtgccttcccgtattcattcttgacaaagttcactaatttttcgaaatagggtttatcgaactcttcttgcaggcgctgttgccagctactttctattttgacattcatcgtattgaggtaagatttgatttcaacaaagatattaaaaaaattaggaataaacttacctaatacattattcttctatctcaatccagaatgttgtatcagaggattctactctttaatcattgtcagtaacattttaaatctttcaatagctgtcaatgcatgcggcgcattagccggaaatacaatactttctcctgcatttaccgtaaaaacttgtccatttacaacaatattcgcagatccttccaatacctgtactaaagcatcgaatggagcactgtgttcgctaagtccttcgcctttgtcgaatgagaataaagtaatgtttccggcagggcttttgattaactgcttactgataattccaccttcagaatattctactaatgaggctagatggagtacaattccctttttgaatgactgttccatattcttatttgttttttcattctatgtgaaaataaaacgtttgagggagaaaattgtttatccgcttcttttttatacttttgttccgtattcatcattaagtcattaatctcctacatgaaactttgtatatagctaagctcgacgaataattttttctaaataaaattattcagctataggatagatgccccggcttctctccctgagtttcatatctatttatttatttatcagttatgtacatgttgatactgttgggtaggatatcttccttgtgtcataaatgtgcagtattcataaagttgagcaatgaattatacttatcgacaaatttggcttatcaactatcctgtgatgttgagcattctgatggaacaattaatcaatataaccgatgctgtttttctagggcatgttggtgaggtggaacttggcgcttccgctcttggcagtatttattatcttgctatttatatgttaggatttggttttagcttgggagtacaagtgatggttggacagtacaatggaaagggacattataccggaacaggcagaactttctttcaggggttagtctttctatgtgtacttgctatcttgcttagcctctcttcttattttttttctccgtttcttttgagatattttgtgcactcttctgagatatattgtgccgtgattgattatctggattggagatgtttcggtttgcttttttcttttccctttctggcatttcgttctttttatattggtattgtccgaaccaatgctttgtcatgggcggcactggcagccgttctaataaatattccctgtaattattggtttgtttttgttcttgatagaggaatagcgggtgcagcgatagcttcttctttgtccgaagctgcttctcttctgattattatggtttatacttggctgaaaatcgatagaacagactttggactaaaatttatatttgacaaatgtttgttagtggagctatggcacctctccgtatggagtatgctccatgcctttatcagtgttgctccgtggtttctttttttcgtggttattgaacgactgggagaagctcagcttgctgtttctaatattattcgaagtgtctctacaatcttctttgtgattgtcaattcgtttgctgccactacgggagcattagtcagtaatttgatcggagcaggagagaggcaatacctgtttccgctttgtaggaaaattttaaagttgggctatgcaattgggcttcccctggtagtattagctatggtctttcgtcggcagattactggattctatacggacagttctcaacttattaatatttcaagtatcccttttgcagtgatgttgctgaattatgtgtttgctttgcctggatatgtgtatattaatgcggtgacgggtacgggtaaaacccgtattgccttttggttccagttgataacgattgttatttatttgttctatttgtatctgctaagtcattataccgcctctctggcagtatatctgacagcggaatatctttttgtgattttgttggctgttcagtccgtactctatttgcggatatcatcgtaagatctttttagtccatgggcactcttccttttttctgataaaagcataaatggtcgtatacatgtccgtcataagtcatttctgcttcatggagtataccttcgtatacaaatccgttccgttccaataaaagtcgggaacgggtgttatgcggataacagttcgctgaaatcaaatgcaatcccagtacgttaaatccataattcaatatggttcgtgtcgcttccgaggccataccttttccccaatggcactctttcagccagtatcccagcatacgtgtccgggtattttcccgtttggggtcagtaataataccgatagaacccaccagtgaattatcttctttgagaattatggcaaaaactccttcatttcccataaatacagtatgtaaaacctctttggaatcttcgatacttttatgtggttcccagccggcgttatttcctaagtttgggttttggcaacattcaaagagctcttgcagatccgtttcccggaaaggacgaagaaggagacgttcggtttctaaaatggtggtatgcatgggatttgataatttgttttaggtaaaatgaatataatattgtgcaaatatggcattttatttccaatgggtgatatttattcattttttattatctgcttaatcatatttgaggcaaaaaaacaggaatcgatgtaataaatccccgttaccaaagaagaaatgcgatcaaaataacatgaattgctttcggatcttaattatactaccgggggaagagataaagtgatgctctaccaatcgtcaaagtttgaccggaattgtactttggttgttgatggataatatataattttctctttccttcttcataaatcatctttttttctcttttctcactttttcttatacgatttcgggacataattatccaaatttatgtcataagatacagctatacttttatgtcatggatttataaagcacctttcagtgtatcttatacttttgcaggcagatttcagtagttattagagaaattgattaggtgaaagaggttttataaacaaaggaaaagaggatatcttaaaaatatcctctttaaaagaaagtaatgatacacaataataatctaacagagcgacaatgaactcaaaaaaagtacttttcatcatcttcatttgtgcattgactgtgaccggatgcgatacacaagaacaaactactatagatagtggcttaactctgatacgggctacacaaacacttgattctttatatgcaaattattctgtatcaggaacctgtctgttaagagagaattatccttctaatgtaggaaattacacagccacgtatctggcttctgaagaacaaaaagaaatccccaatcaatattcttacttatggccttattccgggacattttctgctgtaaatgcactatgtgcagcaaccggggatgagagctataagacattactcgataacaaggtattgcggggacttgaaaaatatttagatatcagcagaagccctgccggttatgcctcgtacataaacacggcttcccaatccgaccgcttctacgatgataatatctggttgggtattgacttcacagatgcttatctaaatacaaaagaagaaaaatacctgaagaaagcccagcttatctggaaatttatagagagtggagcagatgacaaattaggcggaggtatctattggtgtgagcaaaagaaagtatctaaaaatacatgttctaacgcaccggcatcagtgttcgcattaaaaatgttcaaagctatccgagatagttcttacctgataaaagggcaggaactatatgagtggactaaaaaaagactgcaagattcgaccgattatttatactttgacaatatctctttggatgggaaaattgataagtctaaatatgcctacaatagtgggcaaatgatgcaggctgccactttattatatcaacttaccggtcgtagccattttttgaaggatgctcaaaatatagcaaaagcgtgttataactatttttttataaattttatacctgaagaaggggaacctttcaaactcctaaaaagggggatgtatggtttactgccgttatgctgagagggttcattgaactctaccaaactgaccataataaaacatatatcaactctttcaatcaaaacatggattatgcatgggaacatgtgcgtgatgagaaggggctttttgatatcgatttcagtggaagaacccatgatgaccgcaagtggctgttaacgcaagctgctatggtagagatgtatgctcggttagcagtaactaaataaatataaacacttattaaaaaagaattggtatgacaaaagaaaactcttcctagctcattcttcctgtttacataaacaaggaactatcagatgttgaaaaataaatgtctttttaatcaaagttagtattatgaaaataaaaaaacacattctaatacctctaatggtattgctactttttggaagtatggacgcgatggccgccatagagcaggctatacaagtaaaaggtaaggttgtagacaatattggcgaacctgtaattggtgctaatgtagttgtaaaagggaccacgaccggagtgattactagtatagacggtagttttgccatcgacgctgtaaaaggttctactattgtggtatcttttatcggttatttatctcaggaagtaaaagtaactggtaattttctaaatattacattagagaacaatacggaattgttagacgaagtagtggtagtgggctacggtgtacaaaagaaagccaaccttacgggtgctatcgccacagtgggggcgaaggaacttgaggaccgtcctgtaactaatgctgccgcagcacttcagggtaaggtagccaacttgaatatctccaatggagacggtggtccgggtaagaaggcatcgttcaatatccgaggttatgccggactggacgcaacctacagtccattggttatcatagacggtgtaaccggttatttcgatgatttgaatcccaatgacattgagacgttgactgtattgaaagatgcagctgcaagtgctatctatggagcacaagctgcctacggtgtgatattggttaccactaagtcaggtaagaagaatgaaaagactgtcatcaattataacaataatttttcgttcaacagtccgaccgtactacccaaaactgccggttcattggagttttccagactttttagagaagctgacatcaatggaggcggtagtggtattattgacctggagacgatggagcgtattgaaaaatattactatgatccgaccagtattcccaacaacgtgccgcaacgagataatccggaccgttgggctgattggggagacggacgttcaaatgccaacgaagactggcaaaaagctatgtttaagaataaccagctgaaccaacaacacaacatctcaattcggggtggtagcgacaagactacatacgtcatgtctctgggatatctgaaagacgaaggcaaactgagatattacgatgatcattatcaacgttacaatgcgttggccaaaattacgactgacgtgatgaagtggctgaccgtgggcttgaatgtacgttattcacacgaaaagagtgtatctcccgcttacggcatgaatccgggtggcagtgtcaacgatatgattggttggacacaagtagtgtggcctactattcctgtgcgtgatcccaatggacatttctctccggccggacgtatggtattcattgccgatgccaatcctcagacctcatacaccgataacttctggggcactgctaacgtagtcatcaagccactgaaaggttggactatcaatgccgactttacctacaacaaatggatgaacaaacgtagttactccaaaggtctcatttattcctactcggtgagcaacgagccttaccttgaaggtggatttggaactgaagatacgcgtgtatggcaggaatctaacaatgatgacttcacatcaatgaatgcatatactacgtatgaaaaagagttcaagggacacaatttcaagataatggccggtatgcagtcggaatataagaagaacttcggtctttatgctaataaaatggggatggtattaccgggccaaccgtccatttctaccagtacaggaaagatagaggcctgggattctttggatcattatgctactctcggtttcttcggtcgtttcaactatgactacaagagtcgctatctctttgagttcgacctgcgcagagacggttcttcccgttatgccaaaggacaccagtggggaactttcccagctttttccgccggttggaatgtggctaaggaagctttcttcgaaccttatacttcaatactttccgaattacgtttaagaggatcttggggagaattgggcaatatgcggggaaaaaattaccaatatatctctaccgtaccttataacgctacgaccgattatattatgggtgacaaacgaatcagtgcctttggtgctcctaatatgattgcctataatacatgggagaagaatcgtactttggactttggcgttgacatcgccgcactgaacaatcggcttactatgtcgttcgactggtacagaagagatattatcggacttattacaaagggtgtcactttgcctgccgtgctgggtgtaaactctcctgatacgaacaatgccgatatacgtaatgagggttgggaactgacactcggatggagagaccagttctcgctggcatctaaatcattcaactacagtgtatcgttcaatctttcagattaccaaggaactgttttgaaatattcaaatcccaaggggctgatatatgactactacgtaggtaagaagatggggaccatatggggatataccaccgatcatataatgaccgatcctgctgaagcgaaagccattaacgattctggcgtacagaacaagtttggtggtgactgggttgtaggtgacatcaagtatgtgaatctggatgatgatcctaacattaacgatggaaatcagacgctggaagaccatggagacctctctatcattggtaatgatactccccgctataattttggttttggcttcaatgcagactggaacggtatcgacttttcgatgttcttacaaggaaccatgaaacgtgacttatggctggaaggtcctgttgcctttggactcggaggtgggcaatggggttccaatgtatggaaaaacacactggactgctggcgtgaggatggaagtaatccggatccatggttaccaagactctatttgtggagcaccagtaagaatttgcagaaacagacccgttacatggatactggtgcttattgccgcctgaagaacattcagttgggatattcgttaccgggagctattattaataaggtagggctggaaaaagtacgcatttacttcagtggagataacctgctgactttctccggtattaacgagaactttgatcccgaagctccgtggggcggtgcatatcccatctccaagtcaatttcctttggtgttaacgttacattctaaaactctaaaaatacaaaaagatgaaaaagttaatctatacactttgcctatttaccggcatggcaatctcttcttgtgaagactggttggcaagagacccactggatcagattgcggatgtgaatctgacctatacggcagaagaatgcaaactgtacgtaaatcagttttatacctcattttggggctcgcctaacaactatatttatcatattgatcgaggttcggataacctgcttagtgacaattatcaagataacaaagacttgattgaaggtttgcaccaggttccttccagtggcgaaggctggggaactactgaatggggaaaaatacgcagtgtcaactttttgttggataactgtgacaagtctcccgaaccggaaaaagcccgcaaatacattggtgaagcttacttcttcagagctatgctctactatgaacagtttctgcggaagtttggcggtgctccctggattgataaaacactggatcttgaatcaggagaattgtacggccctcgcctgaagcggcacgagttagctgataagattctgaatgacatggatgatgccatagacagattaccgacatatagtcagcaggagaccggacgtgtctcaaaagaggcagctatgctatacaaagcacgaattgccctgttcgaagccacttgggaaaagtatcatgccggtacgcctttcgccggagagggaaatgtacaggcttatatggaagaagcggccagaatggcgaagttggtcattgacagccagttgtttgacttggacaacatgggcgtggaagacggctatcacacactgttcaaccgttgggactattcaagcagcaaggagattatgctatggaagaaatttgatcgctcactgggattttggcacaatgataaccgtaatcccggacgtaatggtgccggtgtaggattgaccagggcattggttgattcctatctctgcatcagtgaagacggtacacaggcattgccgataagcctggccgaaaattatgcaggggatactaatttattgaatgtggttgccaaccgtgacccacgcttggcacaaacaatgtttactcccggacgtccgagaactatcaacgggaaggatacaacggttgtgttcataaagccgaatattaccctttccggtgtagagaagtgttccacaggatatgaactggccaaaggtgctgatcccgatgccaacgaacaggagaccatttcgggaagtatcaaaggaagtatcatttttcgctatgctgaagcactcctgatttatgcagaggcaagagccgaactgggtaacatcacacagaatgatttagacattaccattaataaactgcgtgatagggtaggtatgccacatctcacactttccgtaggttataccgatccgaagggagactttacggcagcaagaggttatgagggggtaccggtttccaatctgctacaggagattcgacgtgaacgccgtatagaattagcatgtgaaggttaccgccacgatgacttaaagcgttggcgtgcccaccacttatggaatcacgatagaatacagggggcaaacgctgctcagtttgaaaacctggattggttagtgaagtatttccaaaacgacttccacattcccgccgcaatcaataaggcagatttcatggaaaaggtggggcattggagtcccgaacgtaatcaggacaactactgggtggacagtgaaggttattttgaaccttatcaacgccacattccggacggacattttcatttcgacccaacaaaagcgtatcttcagccgattcctactgaacaattggtgttgaatcctgacttgaaacaaaatcccggctgggaaaaatagtaatagttaaagttaaaaatttaatgtaatatccatacctttgtttttccctgtctgtagggagggggaaaagcaaaggtaaaaaacagaaaatgaatatgaagaaaaatgtaattcagacattgattagccttaccgtcatcatcggaatttgtagttgcactacctccccaaagaaaacaatacaaaaagaggaggccacaggaaaatgggtaaaatatgaaaataatcctgtcttgggtggtggcgatttaggtacggtattcgatatttgtgtactgaaagatagtgactcttataagatgtacagttcttggcgcccccaaaaaagtattgcattgtccacaagtaaagatggaaaaaattggagtgcgccgcaaatagttttgccacctgttgaaggcagtagttgggaggctgacatgaatcgtccggttgttgtttacaaagacggactgtatcacatgtggtatacgggacaaaatgacggtaagtcatggattggatatgctataagtaaagacggctataactttgaacggcaaagcaaagaaccggtcttgtcagcggaacagccttgggagaaagttgcggtcatgtgtcctcatgtaatttgggataaacacgagaatatttttaaaatgtggtattccggaggagaacaatatgaacccgatgctatcggttatgcaacgagtaaagacgggttacattggactaaatgggacaaaaatccgatatttaaagccgatcctgcacaaagttgggaacagcataaggttaccgcatgtcaggtgatagaacgcgaaaatgattatttaatgttttatatcggtttctatgacattaattttgcgcagataggaatggcacgttccaaagacggaatcaatgattgggaaagatactccgaaaacccgatcatttctcctacggaaggtgggtgggatgccagtgccacttacaagccatttgccattcaagagaaagactgctggatgctttggtacaatgggcggaatgaacatttggaacagattggtttggctatttatgacaatcatgacttaaatttctaagctatatgcaaataaagaagttatttatagctttaggtatagttttgcccctgcacatgcaggggcaaaacttcctcattaaagaggctccggaagtaatcgagtcttacgtcaatcaattcaatcgtgaagataatgaattgtataaacaagatatccctaactgtggtgcatctgattttttaagaaagaatattccattttttgagtgtccggataaggagttggagaaaacatattattttcgatggtggacctatagaaagcatataaagaagactcctgacgggttcgttattactgaattcttgccggatgttccttgggccggaaagtataataccatcagttgtgcggctaaccatcatttctacgagggccggtggctgagaaacgctgaaattttatctgattatgcttctttctggttttctggtagcgggaatccgaggctatacagctttggggctgcagacgctatctacaattactatttaattcacaatgataaaatgctactggccgatttgtatcccaagctaaaagataactttgcaaagtgggaagaagaaaagcgggattcgactggaatgttctggcaggttgacgacagggatggaatggagatgtctgtttccggacatttgtcagaaggtggacgtggttatcgccctaccattaacagctatatgtacggtgaggctgttgcgttggcaaaaatagcttcaatagtagatcgtgacatggaagcccggacctatcagaagaaggctgataagttaaaaggaataataaaccggaggctatgggataaacaggctgatttctataaggttatacctctaaatggcaagatggaattctcttatgcacgtgaacttcttggatacattccctggttctataatataccgccggataactattccatagcatggaaacaactatttgattccaagggatttgaagcagcctatggcccaactactgtagaacagcgttgccctgatttcaagatttcatacgaaggacacgaatgtcaatggaatggtcccagctggccctatttgacttccatgacactggcagcaatggctaactatttcaatagttatgattctcccatcatcactaaaaaagattatttaagtcttttgaacatatacagtaatagtcatcgtattttatcagtcaataacgatacgatttgttggattgatgaaaatatcaatccctatacgggagattggatatcgaggactcgcctgaaatcatggaaaaacggaacttgggatgattctaaaggtggtgtagaaagagggaaagattataaccactcttctttttgtaatttgattatttcaggattaatgggagttcgtccgcaggaagatggaagtattatcataaaccctcttgttcctgatggatgttgggactatttttgtttggataatgtatattgccaaggcaaaaccattaccattatttttgataagaaagggaaaaaatatggtaggggaaaaggttttatagtttacgtggacgataaatgtttatcccatacgacaagggtgcagaaagtagtaatccggtaatttatttatgtaacattcaggatacccttggagaccatatatcagcatttacaaaataccctcatacctttcgtttaacagtgacaaaggatgagggtattttatgagaacaattaatccttttgtgtaattcctctccagtcatctgttcggaaaggtgaagccggaagtcctgctccattatacaaattgcagaccggattattggcccaagcatatcgcacagcaaccggataaggtaccgcttcaggtgcactgactataattttgtctccgtctatctcagctttggcccaatggaattcatgattgcgcccggctatagcaaagcctttcaactccttgccatcgctacttttcaatccaccatcggtatgatcaaaagaaagaattatcttatttcctacaatctgatgggagcgatagatcgggccggaataaggcagtttttccccatatgttttggcacgggcaatcaaagccagtcgatgtcctacggtttgtttatctttagggtgaatgtcgttggcgtcacctctgtctattattacagccataccggtattgcctactgccaatgcacgcatttgtgcttcacgaagctctgcccactctgattctgccggttgggaaacttcatgcataaaattggccagttgcacaaaatagaatggaaaatcctgtttccaatcccggcgccaattctctattaccaatgggaaaagttcccgatactgataggctctggaagaattattctcaccctgataccaaattgctcctcgaataccataagatatcagtggatgaatcattgcattataaagggaagtcggtaaattgggatctacggatctgtctaccggaagtgcccctaccttatgagtatccgcagcaacctgatatttccaattaccggacagactaatctgttcatcatttgtagagcgaagataaaggtctccccaaatgccacagttaccacctgtatccaagactcgaatggctaatattgcttttccagcctttaccattttttccggaatgatgtatttgcgttgaagagtcggcccatctgtacggcctatttctattccattccaataagtaatatcattatcatcaatagcccccagggatagttgtacatctttacctgcccaactagcgggaatttcgatttcttttctaacccacataactccatcaaagccggccaattgtggacccacttcacccgggaaattcatactttcccaatctttgtcatctaatgatgcagcagctcttaccggttttccttcagcaaaaccttcgtccacacggttattccaggcagtgagctcctttaaatattctgctttgagtattttcttatcacccggcatcttctgaatggactccactgttttcacaaattccggcatctccttcaagacttctccacttatccaggattcaacgtttgtgcctccccaagaagtatgtatcaagccaaccggaacattttgtttctctgagatttctctgccaaagaaataagccgtagcagaaaactcagggatggttatcggtgaacaaacctgccaactgtcattgcggacttttatattcgtttccggttgggtactgttgatttgttctatttgcagaagtcgtatattagagtgtccggcttctgcaatttctttctggtaatttgtaatctttccccatccccctaatggcatttccatattcgattgtcccgaacatatccatacttcgccaatcatcacattttttaaacttactttcttaccatctgtcaaggcaatctcgtatggtcctccggcaacaggcgtgtgaacagttactttccattttcctgatttatcagcctgaaccgcatacgtcttcccatcccatgaggtggttacttttacagttttcataggctgcgcttcaccccaaatgggagcattggtttgttgctgcaacaccatattatcagagaaaataggtgggagcacaatttttgcaaatgctgtacctgacaagatcagtaaaattacaactagcatacatttgtttttcataccctttagtttttactttgatatacacattattttagttttattcatttgtacaaagatagaaatctatacttaaaaacgcacccaaatacatgacattaaagtatatagaacccataatgacataaatggatacatatatgtcacaaatgcagaacagaatattctatttatgtgctaattttgcaaacaataaaactttaaaacacatcatttagtatgaaaaaacaattactgctgctattaatttttagtatttctttgtatgttcagggacagaacatacataagctggcttcgccggatgggaatattcagatttcagtgaatctttcagataaaatctactacgatgtcatttgccggaatgagacattgttaaagcagtgtcaccttgcaatggaaatcggtgaccaggaattgggaacgaatcctaaaatgactaaagtaagccataagaatatagacgagtctttaaagcctgttattccattgaaattttcgtctgtaagtaatcggtacaaccaacttcttctagacttcaaaggaggttattccgtagagtttcgtgccttcaatgacggaattgcctaccgttttataaccaataaaaaaggaatgatcaatgtgaagaatgagaccctccaagtgaacttccctgataattatttgctacacatgcaacagtccggaagttttaaaacggcttatgaagaagaatatacccatttgtatagcaaagaatggaaatcatctgcctcaatggctttattgccaattctgattgatactcaaaaaggaagtaagatattaatcagtgaaacatcactaaccgattatccggctgtttttctgaaaagtaatggcagcaatggtatggtttctgtatttcccaaagtacctcttgaatttggagaagacggtgatcggagtgtcaaaatactgaaagaagccgactatatagcacaaaccagtggaaagcgtaatttcccttggcgctattttgtcattagtacagaagatagccaactcattgagaatacgatgtcttatagattggccgaaaagaacatattggaagatacttcctggattaagcccggattggcaagctgggaatggtggaacggtgctactccctacggaccggatgttaattttgtagcaggatgcaatctcgatacttacaaatattttattgattttgctgctaattatggtataccatatattattatggacgagggctgggctatgagtacccgtgatccctatacaccaaatcctgcggtagatgtgcatgaactcattcgttatggcaaagaaaaaaatgtaggcattgtgctttggttgacatggctcactgtagaaaacaatttcgggctgtttgagactttcgagaaatggggtgtgaagggagtcaaaatcgacttcatggacagaagtgaccagtggatggtgaattattatgaaagagtagcccgagaggctgccaagcaccatctgtttgtcgattttcatggggcatttaagcctgccggattggaatataagtatccgaatgtattgtcttatgagggcgtaagaggaatggaacaaatgggtggatgtcgaccggacaacagcatatatctgccttttatgagaaatgcggttggtgcaatggactatacgccgggtgccatgcttagtatgcaaccggaaatttattgttccgaacgccctaattcagccagtataggtacacgagcttaccaaatggctttatttgttattttcgaaagtgggttgcagatgatggcggacaatcctacactttactatcgcaatgacgaatgtacccgatatattactcaagtcccgcagacatgggatgaaaccattgctttgaaagctaaggctggggaatatgtgattgtggcaaaacgtaaaggagataagtggtatatcggtggcatgactaacaaccgacagcaagagagaacctttgaattggattttgacttcctgaaagaaggacaatcttatcggatgacttcttttgaggatggggttaatgctaaccgacaagctatggattacagaaaaaaagaatatactcttaaaaaaggagataaaataatagtgcgtctggcacgtaacggaggatttgcctctgtcattgagtgataatcctatctcgatctttatccaatccggactagttgcatcatttctctcctttcatattgctttgcagggagaagttttggagcaagtccggattcggatactattttgatagaaatggcaatctcttcgggagaaaacatttatcatgcacttgagaattatttgtccggcatgtattatctttgtgaacccactaatgcattatatctaacatgaaatacatttatcgaacatacttgtcactactgtattttctttgcttactattttgcctgcctttggaggttcatgcatacagtttgagacaattttccaatagagatggtctttcaaatagtgctattctctctctttatcaggatgatcggggcatcatttggatcggctcttgcgatggcatgaatatctttgatggaaccgacatacatttgtatactccaataaactcttccaaaaccttactttccggaaacttgataaatcaaatcatcgaatcggagaaggatatattatgggtgcagactaattatggattgaatcgcttagataccaagcaacagaccagccagagtttcactgaattcaaagggcaatactttatggctaacaataaggatgacatgctttttattctgaaagatgatggctatctttattattatcagcgagaagcacaatctttcaatagattggaaattcccaatcttgaatttagccatgtactctctatgactgtggattcaaacgatattttatggatatttacctccaatgaagagactcaaagttatcgtattgagaatacaaaacaggggctgatattaacccgtaagaatctttttacgcattcgtgtaaattataccatgcctttgccgagaaagatatggcttactttattgacgaaacctacgctctttacgaatatgattttaataaccggcaagcatactatatagctgacctaagaggtcagattgaagtgcatggggaagtatcttccatcatcaagcaaaaaaacgattactacatcggtttcaaaaacagtggtctcattgttctaaaatatatgtcctctcaaaagatgaaatatcagatacagaaaacagaaatacattccggtattttctgtctgatgaaagataaatttcaagatattgtatggataggaacagacggacaaggtgtatacatgtattataatgacaccttttctattaccaatactcttttagacactcctgtatatcaaataagtaatccggttagggctctttactacgatcaggagcaaacgctttggataggaaccaaaggaagtgggatactccgcattaaaaagtatactccggataacagtatgcctatgtcgtctgatcggattacaccatataatagtgcgctggcagataattccgtctattgttttgctcccggatgcaaagataaattgtggatcggaaccgaaaatggaattaattattattcgtacttaagcaggcaattaaaagaactgcctatcattgccaatggagaaaaagtgaagtatgtgcattctataaaacaaccgaatgatacgaccttatgggtatctacggtaggtgaaggcattgtaaaagttatctttgatgcttctactgctactcctactgtaaaatctgcttcccgtactgttattgataacgggcgtatggcttcgaactatttctttacttcttaccaggaaaacgactccatactttggtttggcaatcgtggttgcggtgcataccgcatgaatgtagagacaggggaaatgattccgcatcgttttgacagtattgtaagcagtcagacagctaacgacatttttgctatttacaaaaacgcaaaaggttattggttaggaactagctcggggttgttgcatcttgaacaagatgattccttatatacgaaagcggacttgtttttaaataacactgtacacggagttttagaggaccaccaaggcgatctttggttgagtaccaaccagggattgatacgtttcaaccccgagactcgtacagggcaaacctataacagtggaaatggattggaaatcaccgagttcagtgatggtgctttctataaagatgtcgtttcggaaacactgttttttggaggtacaaatggttttatttccattcagacaaatgactgtatcaccgaagagtatatgccgcaaatcaccctgaaaggactgtctatctttggcaaagaacacaatattcataagtttctttatgaaaaggagggtaaaacaatccttcaactggattacagtcagaacttctttcagctaaattttatggctattgattacatcaatggcaacaactattctttttattataagcttgaagaaatgagcaaccaatggatagaaaacggaacatccaccagcgctattttctctaatcttgctccgggtgaatattctttattagtaaaatacaaaaacaatataaacgggcaagaaagccaaacacagtccgtcattatccgtatcactccgccgtggtatctcagtccgctggcctatatggtatatttcattctatttgcactgttgtgcactgcagggatatataggctcatttatatataccgtcgcaaacaacaccgtatgttggacaagatgaaccgggagaagaaagaagaaatctacgaatcaaaattgcgttttttcactaatatcactcatgaattctgtacgccactgaccttgatttatggtccttgtgagaagatacttgccaatccggagattgacgcatacactcagaagtatgcaaagatgatacaacaaaatactgaaaaactgaataatctgattttagagttacttgaatttcgcagattggaaaccggcaataaagtactttctattcaacagttatccgtgtcggaaaaggttagaagcatagcggaatctttcgaagaactggctgaaaataaagaaatgaattatcagttgcatatttctccgggcattgaatggaatacggatatcagttgctttaataagattgtcagcaatttaatatccaacgcttttaagtacacgcccgacaaaggaattatcacaatagagttgaaagtggaaaaccagtcgttaattttttgtatatccaattctggaaaagggatagccaaagaaaatttatccaaaatattcgatcgttataaaatattggattctgttgagatgaacggtaagaattctcgtacaggacttggattagctatttgtaagagcatgattacgcagttgaatggggaaatcagcgtaaatagtgttctctatgaaatgacaacattcaccgttaccttgcccaatcttcccataactgaacgggacactacacaaactacttatgaaaccggactattacatacggctacggaggaacctattgttttagaaaagactgccatagagtttgatatgggtaaacggaccatcatggttattgatgatgataattccatgttatggttcgtttcagaactttttgcagacaaatacaatgtgcgctcttttgataatgcaaaagatgcattgagcagtctggagcagaagcaacccgacttaattatttcagacgtcatgatgcccggtatcgatggactgtcgtttgctcagaagataaagcaacacaaattatggagtcacattccactgatcctcctttccgccctacatcacgaagacgatcaggtaaagggcatcgagtcaggagcagaagcctatgttaccaaaccttttaacgtgaagtatctggagaaaatcgtttatcgtctcatcaaacgggaggcagacttgaaagaatattatagctctattttcagttccttcactatggaacatggcaattgtatacataaagaagatcaggagttcctggataaaatgctcgagattatagagaagaatattgcaaatcccgatttacaagtggaattgctaagtagtgagatggggtatagtacccgccagttctaccggaaactaaaaccgataaccgaacagtctcctgctgatatcattaaggaataccgtttaacaatggcagaacggctgttaatagccaagaatcttactattgaagagattatggaccagaccggattcaacaaccgcggaacattctataaactgttctcgaaaaggtatggcatgcctccgcgacagtatagagagcaacaaaaggaaaatgtaaagaaggagaagatattgggcatatcagacgaatagggcgtctgaaacttgtataacttattattggggctatactgcattattctttctgaaatttgtggggctgcaacctctgtattttttaaatagtttatttaaatggctttcatcggtgaagcctaattctgctacaatctcactgattctcatttcactatgcaataatctgttttctaccagtttcagtttataattcagtatgtactgttgcattgtttcgtttgtgtgttttttaaagtaacgtcccaaataattctctgaaatgccgaaatgttgactgatagctttcgttttgattttctcggattgataaatgtaggtctggatatattgcagtataccgagtgatttctcttcggagcattcatttacttgttcaggcagaaacatggcgatattgcgtgcaacgactattattatggtgtttatcagttgcgttatgatttctttgctatataagtttctattgacgtattccctgatgatggcttcaatcataggttttacgagtagtttgtctgttcgatttcgtaaaatacagccaggttggtggttggcatgctgtaagataaattctaatcgttttatgttttctgtaccgaaaacagcggaatgaatgtagatatcattgaacttaatattgataaacttagtagtggaatgtatttcaaatgaatgtgagtctccgggagttatcataaataggtgtccgtcgtgataagaaaatttattattgttaatccattggatacctgtacccgataagatgtagaccaactcaaaaaaagtatggtcgtgttcttttagcattgactcgtcaaactcactgaaactaatctcaaacggttgatgtaagttttctcttttcataagacaaatatagtctaaaaaacgtaattttaccgatataacgaaaagtaatacataataatagatctggaaatggtataactttgctttaaatataaaaaattgataggatatgaactttttagaacttacaaaaaaacgtttctcggtgagaaattataagtcagacagggtcgaacaggataaaatcgactatatcattgaatgtgcccgtttagctccttctgcagttaattatcagccttggtatttcatggtggtagtcagtgaagaacaaaaacagaatttacggcaatgttataatagagaatggttcgcacgggcaccggtatacattgttgtttgtgccgataaatcgatagcatgggtacgtaaatccgataacaaaaatcatgcggatatcgatgctgctattgctacagagcatatctgtttagccgcagccgaaatagggctgggaagttgttgggtgtgcaactttgatccggaattgtttaaagctaatttcgggctgtcgtccgaaagatatccggtagctattgtatcattgggatatatccaagagcaacctgatcactttactacccgaaaggacaaggatgaaattgttactttcttataaatccgcatgggagggaacgaatgaaaacagagatggagaaatgcttggctggtgaatggtatgattgccatgctccggtttttctagaactaaaaggaaaaactcaccgtttgttgatgagatacaattcactgtcttatgaacaaaaagaagaaaaatatgcgattctgaaagaaatgttcggtagtatcggaacagaggtttccgtaggacattcttttctctgcgattatggatgtaatattcatattggtgataatgttacggtaaatataggctgtgtgtttgtcgattgcaataagattacagttggtaataatgtactgattgctcctaatgtccagatttatacggcaacgcatcccattgatttgaatgaacggttaacacctgttgaggcaccggagggagttcgatatgtccgtcatacatttgcccttccagtcactgttgaagatggttgctggatcggtggtggagttattatattgcccggggttactattggtaagggaagtgttattggtgccggaagtgttgttgccacaaatgttcctgcaaacagtctggctgttggaaacccatgtagggtgattcgtcaaatcaataaatctgaaaattatgatccggctggtagcttttgatctggatggtacgataggagatactattccgctatgtttagcagcattcagagaggcgactactccttatgtagatcatgaactatcagatgacgagatagcgcggaccttcggattaaatgaagaaggtatgatcaatcaagtggtttccggtgatagtcgggagaaggcattaaatgatttctatgtaatttatgaagaaatgcatgccattttatgtcccaagccatttgaagggatgaaaacattgatcgggcaattacatgaaagaaatgtaatagtagttcttattacgggaaaaggtataagaagttgtgatattacattgaaacaatttggtatggatgggtgttttgaccgaatagaaaccggctcttctgaaaagaacagaaaatcagaagcaatgaaggccatatcattatattatggctttaagtcgaatgaaatgatatatgtaggagatgcggtttctgatatcgaggcatgcaattccgtaaagatacagtgtttgtcagcggcatgggctgcatcgacagactgtgagcagttagaaaaatataattccggttatgtctttagttcagttcggttattacgggattttctactttgttgaagtactagtttgaaccataaaaaggttactaatatagtttgtggagataaataaaaaacgttgcgaaagatgattcacaacgttttttattttgaagtggtgccaccaggaatcgaaccggggacacaaggattttcagtcctt

SEQ ID NO: 5016 - DNA, 6567 bp, Unknown
  gut microbiota DNA sequence
ccaactgagctatggcacctttcttgtttgcggttgcaaaggtagtgaaagtttttgattttgcaaaccttagggtaataaaaaacactgataaaaagctattctgcttattatcagtgtttttctttcggaattttttatttattttcctgtagtggattccatccctgagcttttaactcgaattcctgaccatcgcgtgtgatcagtgcgcagcctaattcgggctttgtaatatgtccgatcaggcggacaccttccatttccgatactttttcgtgatcggcaatgggaacagtgaaaagaagttcataatcttcaccaccgttcatggcacaggtggtgaggttcatattgaactcttctgccataactgcagtttgataatcgatagggatatgctcttcgtagacacggcaacctgctttactttgagtacatatatgcaatagctccgaagaaagtccgtcagagatatccatcatagaagtcggaacgatatttgcggcggacagtttctcaataatgtctttgcgggcttctggtttgagctgtcgttccaacaaatactcttttccggagaaatccggctgagcatcctgttcgcctttaaagactgctttttcgcgttctaacagttgcagccccatataggcggcacctaagtcgccactgacacagatcaagtcggtatctttggcgccattacggtaaacaactttatctttgtcggcttcaccaatacaagtgatactgatggcaaaccctgtcaaagaagaggtggtgtcaccacctacaatatcgactttatattgttggcatgccagacggagtccggagtaaaaatcatccatatcttccacactgaagcgtttggagagagcaagtgaaactgtaatctgtttgggcgttccattcatcgcatagatgtcggagaagttaaccacagcagatttgtatcccaaatgctttaacggcgtgtaggttaggtcgaaatgtacaccttccatcaagaggtcggtagtcaccaacacttgcttgtcggcaggataggagaggacggctgcatcgtcgcctactccatatttgctagattcattttctaatttaattccttcggtgagatgcttgatcagtccgaattcacctaaggttgctatctctgttctcatatatcttattttatgataaggaagtatctatgcacggtttatcagttcgcgcatgatggtggtcatcttcggttgggcagcatcggctgctttctgaacttcttcgtgtgatacttctacaatctttccttctaccccaagatctgttacgacagaaatgccgaaaactttgataccgcagtggttggctacaatcacttcggggacagtagacattcctaccgcatcagctcctaagatatggaacagtttgtattctgcaggtgtttcgaatgtgggtccctgtgtaccgatgtatatcccgtgttgtactttaatgcctttttctgctgcaatggcatctgccttgcggatcagttccttatcgtatgcctcgctcatatccgggaaacgggggccgtacgggatgtttttaccacgtaacggatgttcggggaaatagttgatatgatcagtgataatcatcagatcaccgatttcgaattcaggattggtgccgccactagcattggacacaaacaatgttttgatacccagttcacgcatcacgcgtaccgggaaagtcacttctttcatagagtaaccttcgtagtaatggaagcgtccctgcattgccataatctctttattacccaatttaccgaaaataagcttaccgctgtgcccttctacggtagacacaggaaagttggggatatcttcgtactttatttcatacttttcggtaatttcgtttgccagactgccaagtccggttcccagaatgattgctgtttcaggacttgtgtgcatctttcctttcaggaaggctgccgtttcttgtattttctctaacatagccaataatgtgttggttaaaattatcttgttgattttgtaatatttctacttcaatgggtagggcataaataaatggtttcagcccatcatccaattcctgatggcatatcaggcgtgtcgcgtctttttcggttgtgacaatcaggcgttgcccttttcttaatttaccgaatctctcttttatttgcgccaagtctcgctggctgaaattatgatgatcactaaaagcgagtaagtcgatgttccgtgtatgtatttccaattcacggatgatcgtatcgggagatgcaataccggtaattagcagtatctgttcctctgtctgtaaagaggataattttctctcttgtacagtggcacaatcgggaaagactgcccgcaggtttccgtatcggaaagacgagaaatataactgctggtaggggaacagattcaaccttttcgtaataatattgtagtcaataggtttgatatccggcggacatttggttacgatgactatctgtgcccgatttttgccttgtgcaggctcccgtaagcgtcccgcaggcatcaaggtgtcatcgcagaacagacggtgataatctgtcagaagaatatttagtcctgctttcacgtatcgatgttgaaacgcatcgtccaacaagataacttcgaccggaggctctttaagtgtgagtaacttttcgatgccatggcagcggtcttcgtcaactgctacctggatatcggagaatttcgattgtatttgataaggctcgtcgccaatactgcgggcgtcactttctgctgttgatagtacgaatcctttggtatggcgcttgtacccccggcttaatacagccacttggaattcatcatgaagcaactttatcagatactctgtgtgcggcgttttacccgtaccgcccactgcgatgttcccgatacaaataataggaacattaaaactctttgactgaagttttccccagtcaaagagtttatttcgtaatgctactcctgctccatataaccatgaagccggatatagccatttatgtatcttgatagagttttcttccatgcagtttgctatttcacattcagttcaaacggaacgcgtgcttgaatcatggcgcgttcttttatatttttcagcaggctgaaatctttataatagtctcccagttgacttttcagcacttgggattctacataattaccgggttggacatcaagcaacgtagacagaatatcctttttggcaggataggatataatggtgtatccttttaaatcggctttttgtgcagctatttccagtgctttacctattccacccaattcgtctaccaatccgatttttttagccatctctccggtccatacacgtccttcagctattttctcaattttatctttagacatatggcgtccctcggcacaacgacttacaaataaatcatatccttggccgatcatcatctgtagcaaagctctttcatcgctgtttaccgggcgcatcagattgccgaagtctgagaattgattagtttttactacatcgtatgtcaatccgattttttcggttaatcctttagcgttcggaatcatgccgaagattccaatagaacccgtcagagtggttggctcggctatgatactgtcggcagcacaagagatataatatccaccggatgcggcatagtcgcccatcgagacgatgaccggtttcttagccttcagctcttttacggcatgccagatctgttcggacgcaaaagcacttcctcccggagagtttacgcgtaatacaacagcttttacatcgtcatcttctttcagtttacgcaggtcacgaatcattttgctacctataataccttcatcagacgctgctgatccggcataatcggttatctcaccggaagcataataaacagccagaatattcccgctcttgtctttaggaacattctttttaatgttaaccatctcttcgagtcctaagatgggcaggcgatcgtcctcgtcgatttttacaagtgttttcaaatagtcgcgtacgtcattttgataaatcagcgtgtcggccagtccgcattttacgctttcgtctgacggatagaacatcagcatgcggtcagcatacatattcagtgaatcttttcctattttacgtgaagcggaaacaccatccaatatttgattccagatagaaccgatgaaagctgtaacctgctcccggttggctggagacatctctgtggcggtgaaaggctccactgccgacttgtaagtacctaccttgaatacctgcatctcaattcccagtttctgtaatagatctttatagaaaataggtgctgaagcgagtccgcgccattcgatcatgcctttggggttgagcatcaccttgtcggcaacactcgaaagataataaagtccttgcgtataattgtcgctatatgctacgacaaatttgccactctccttaaagtcatccaatgctttacgtattgcctgtagcgaagcgtacgaagcatccagccatgaggcttgtatataaatgcccttgatgttatcatcttctttagctttcttgattgaagccagtatatcgtccagtccgtatgtatcggctgtttcaccggtaaatttacccagtaaaccttctaaactctcctgagtgcgctcaaccagtgtacctttcaagtcgagcatcatcacagaattcttctttaccacagtttctgtatccgatgacgaaatgattccgacaagcgttacgactccgataatgaataaaacaatgcccgataacacgatgccggtcactgtagcaagcgtaaatttaaagaaatctttcattgtacatattgtttttatgccagctcttttaaagctaacaaagataaataattgagttgaaattcatcccataagtcgcatagttttttgttttgtcacggttgcgacatataaaatgtgaatatttgagtataaccggggagtaaaggagaagttattgtatggagataaacaataaaaagaggaaacagcctcaggtggggtatttcctctttctatttctgaagaaactaatatttatttcttaagaaacgattctttcattctggcaatgtcagtcagataatcctgtaggtcttgttcatgctcttcttcttcagctaaaatatgctttgcgatgtcgcatgtagtatagtctttaccgtttgtaaagttagcaatctcctgataacggagaatagcgcaacgttcggaagagacgttctgatttaacaggctgacagaatcgaatgctgttggagaatcgtatttacaacgagccagttcaaaccattttttcggatcgagtaccggaactccttccaattcaatgattcggtcagcaatcaattgtgcgtgatgacgctcctcttcagcatgttcttcgaattccccttgtacatcagcgcgcatagcaccttccactaccaatgcacctacccaatattgatagtatgccaaccattcttcagataatgcagcattcagctgatcaatcaaactttttacatcgagctttccttgcaggatttttacactttctttagccataattcttttggtttaggttataaaaattaagttggttatgtaacatggggtaggggattttgttttctgaaagggtgattttaacaggaagacatttgctttaggagccggtttcgggagcgggtggggtactgtgctccggctgtttccttttagtttcaaaccaaggccctttaccttttaaatcaacgccctcttggtttcaaaccaacatgtctttggcttgaaaggtagccttcttccgtttccaccccgaacttcgctgatgaaaatattgtgcaacttagcttcccggaccgcaaatgcgttctttcggattgcccctatacttgccctaatcgcaactatccctttctacccgcgacttatccctttttccaggaaagacccccttttttctctatttcattcattctcaatcctttttccctttttgtttttcctcttcctattacttgatttaacagaaggttaaatcaagccttttgtttcccaataacaagtcttttcgaagccaaagctttgttctttccgcccctgaaataaatatcttcccaaccgcattaacaatgttaacgcggtcttccgttcaatttttgtttgattcctgtctgattcccgccaaggtcccaccgagttttttgcttaaaccccgtttaatttccgtcaagttcccgttaaattccctattttctcctcaatttcctcccgcaaacacttctccttccccctttctcggcaaatccccttttccctctccccgataaatttcccctatataatataataatgtgtccctttccttccccgaccttttccttttccataatcgattatcagaaccgtcctctccctcagccctttacgtttttattcaaaatattttcaaaaaaatccccttttatatttgtctcttatctcctaatgccttacttttgcatccgctttccaa

SEQ ID NO: 5017 - DNA, 646 bp, Unknown
  gut microbiota DNA sequence
caccaaataaatgaaatctttagttggataataagatataatagagaaataatcgaaagcttttctttctttaaaccacaagtgagtaacttcatagtctcctttctcttctcctgtacaaattacatattgaggcaagagttcattcgtcgcatcgtcatagtaataaattgtatcggtatctggatatttaagggtcagttgattattgtaagtatttatactggtttgacattccatccaaagattaatcattctaccttgatcggcacaattagctataatttgctcttctctacctatatgtgctggattcttaaacaattttttttcttgaaaagccgtgtccaaaaaagcaaaagaccacaatgaatctttatctattaatttatataaagctatattctgagtagcaaagaattttccattatgtagaacatattgactatatacagatgagaacagattgttgattatctgctgatcaactattttctttttaaactctcctttgaaattatataccaaaatgccattgttattagaaacaatatagacctcctctttatattcatcaacgagaaaggttgaaaaattgacatattctcctggagcttgccctatactaccaattctattcaaaaat

SEQ ID NO: 5018 - DNA, 486 bp, Unknown
  gut microbiota DNA sequence
ctttacgtttttattcaaaatattttcaaaaaaatccccttttatatttgtctcttatctcctaatgccttacttttgcatccgctttccaagagacggacagcatttaattttgacatgttgcaacggcgtaggacctgccttacagaataacaaaaataatttcctttttatttggatcattattataaaagtcgttatctttgcagtccgattcgcagagcgagggcctttgttcgacacttctttccctttcgcacagagaggcttggaaataaaagacgggcattgaaaaaaaacttcctaaaacatttggtagtttaaaataaaccccttacctttgcacccgcttttgaaacgaagcagaaattaaaaaagaagagttctttgaaaaattgataaacaatacaagtagtacaagtcaaatttagaaccgtcaatacttattatataggtatgtaaaaaatgaccgtcaataaattttcg

SEQ ID NO: 5019 - DNA, 5588 bp, Unknown
  gut microbiota DNA sequence
tgttgcaaggcatttactttggattgcagtgcttctacggactcaatcaggtaggacaacgcattcggcatttcctccaatgaatttactttataagccatttttttcttcgtattaaagttgatgccgcaaaagtatagggatgcttataggtgctaaataggtgcttgaccgccaccaatcaaccgttcatttaccactgacagatttaagtttcattaatacgagaatttattggaagccataataaaaggagaataaaccactattgggactaacacattccttaccgaaagcctcaatactacaaaacacccctcaaaaagccgatgcttcatgaggggtaaacggtggtaaatacatgataggtatcacataagtcgttggtgctcagaggtgggatcctccaccacaacctataaatccaaattgtctatatgcagcgtattggcggctttctctttttgttcgtttacaatatgcgtataaatctgcgtggttttgacattagtatgtcccatcaaagacttgatggtatatatgtcaactccattttccagcaacagcgaagcgtagctatggcggccacaatggaaagtgatgtgcttcttgataccggatgcttctatccagactttcaacgggcgagaaatccaagaggcatcagtcaatccttcaaaaacaagtgcttcatcatcgtctggacgtatgccgcatagttgaagtgcttgttgagtgactggcttgtaatcgggcctttttgtcttttgctgaattacgactgcttgccatgtacccttgcttgtttgctgaatttgtttccatttcaaagtttgaatatcactatgccgtaatccagtgagaatagagaacaagaacgcacgtttcaaaacatcatctttgcaaggagtatcaaccaacatttgcacttcattcatggtaagcgcaacacgaggtttctcaatgtttgttattccctttactttcgcacttatatcaacggtcagatattcatcaatgaatgcctgtttcaatccagctttgagtatagagaaataagtcgatgccgtgttttgtgagatagtacctttcttattccctcccattggggcacggggaaggaacatcttaatgtcttcaagcagtttaacggaaattgccttgaatggaattggctgcccttgcgaatacattttcaataattcgcctacacgcctccaattgactattattgaatcagaactgttgggatgacgtgtgcttataatactattgaaatacttgataaaatcctgttcactccgctctttctgtgcagcgatttcattttccttatcagtgtataggatggcactatcatattcatgttgccgcaacttacgcacattatcggcatagatacaagcctcttggtctatcgttgaacgacattggataattccattcaaatcacgtttaggcttatagttgaatgttccatccggtaagatacgtgcaatggacgacttgtcccaaacaggtgtggatatagtccggttaatggattccactacacggcttgcacgggttgaacctcgcttgtaaactgggtacgactctataatcagataccattcttctttgtaattcgaccttctgagtttgacggtcactttggtgttaggtaatgctttcttcataatgacttatataatttatcaatttcagatttgggaacataaacatagttaccgatttggcgtgtaggaatagaatgacggcgtatgtgcttaaagacactgctgtcattgatatggaatttcttggcaatctctccgatagtataacagtctttgggttcaaaggacaatgcttccttttttctctttctactccctgcctttgttttgaagtgttcatccatatactgccgactaaggcgtatcagacgctggccagaattgtatgacggtatcaagccttgccgtatcatacgataaagtacatctttactaataccgtaaatcatcatagcttcctttacggttagataccctttgctggatggtattcgtctaatcagtgcttggcgtatcgcttctttctcttttgcgatttgtcttttcttatatgctctcttggaacaagccggacaacaatacttcgacactaatgtcggaggagtaaagattttaccgcactcctcgcaacttctttgaatggtgtaatttcctcttggcatattcttctcgttttaaatggtttatatcaatctaagttgtaccttatcgccaaataagacgtgtcgcaaacatgtcgcaaataagagataaaaaagcccatagaaaacacatagcaaccatgaaccccataaacgcaaaaagcgtgcaactcattgagctgcacgcttttgcttattgtttattatctgtttccttatcggaatcatttcacttcctcaaagtcagcatcctgaacattatcgtcttgtttgccattattttgtccggcatttgactgacctgcgttcatatccggaccggcctgtgcaccaccttgtgcaccgctctgagcgtacatttcggcacttgcagcctggaatgcagtattcagttcagccatagcgctatcgatagttgtcatatcctgagccttgtgagcatctttcagtttctggagagcagcctcgatcggagctttcttatctgccggtaacttatcacccaattccttcaactgagtctcagtctggaagatcaaactgtcagcctgattcagtttatcaatcttctcacgttctttcttatcagcctctgcattagcctcagcttcagccttcattttttcgatttcctctttgctcaaaccgctggaagcctcgatacggatagcctgttctttaccagtagccttatcctttgcagatactttcagaataccgttggcatcgatatcgaaagttacctcaatttgaggaacgccacgacgtgccggagcaattccagtcagattgaactgaccgattgatttattttgtgcagccatcggacgttcaccttgcagaacgtgaatggtaacttctgtctgattgtcggcagcagtagagaatgtttcgctcttacgtgcagggattgtagtattagcgtcaatcaatttagtcatcacaccacccagtgtttcgatacccattgacaacggagtaacatccaacaataccacacctttgatttcatcagtcagcacagcaccctgaacagcagcacctacagctacaacttcatccggattaaccccctttgaaggagttttaccaaagaaatcttcaaccagcttctgtacagccggaatacgagaagaaccacctacgaggattacttcatcaatatccgagttactcaaacctgcatcctgcattgctttcttacagggttcaagacaagcctgaatcaagttgtgagccaaagattcaaatttagcgcgagtcagcgtcttaaccaagtgcttaggtacaccacctaccggcataatatacggcaagttgatttcagtgcttgtagaagatgacaattcaatcttcgctttttcagcagcttctttcaaacgctgcatagccatcggatcctgagtcaggtcggcaccttcatcgttcttaaattcctgaaccagccaatcgataataacctggtcaaagtcatcaccacccaaatgggtgtcaccatttgtagaaagcacctcgaatacgccgccaccgaactccaagatagaaatatcgaatgtacctccacctaagtcgaatacggcaatcttcatatctttatgagccttatcaagaccataagccaacgcagccgctgtcggttcgtttacaatacgtttaacctccaaaccggcaatctgtccggcttctttagttgcctgacgctgcgaatcagagaaatatgcaggaacggtaatcacagcttctgttacttcttgtcccagataatcctcagctgttttcttcatcttctgcagaatcattgctgaaatttcctgtggagtatatagacgtccgtcaatatccacacgtggagtgttgttatcacctttcactactttataaggaacgcgtgctatttctttttgtacctgatcccaattctcacccatgaaacgtttgatagagaaaattgtacgggtagggttcgtgatagcctgacgttttgcaggatcaccgactttacgttctccgccatctacaaatgccacaatagaaggagttgtacgtttaccttcactatttgcaattactacaggttcgtttccttcaaatacagaaacacaagagtttgtagttcctaagtcaataccaataatttttcccatgatcgttattcttttatttattattatttcagtttcttttgtccggttgttcccgcacccccttcaggagtttgtcttaagcggacgactataaaaaaacaaaccttgtgccaaaaggttgagtaagatcgaaaatgacaggactctgacagaaagtcagattttgacattctattgtcacttgaaagatgaaaaaaagtcaaagttacagggaaaataaaataataattccccgccctgtaacagatgaggaattatcgttgagatgaaaaaaagaaaaagtaatagttagatcctgttttcgaacatctcttatttctctacacccatcgatatgtctctgacagcaacaaacctaaggatggacttagaaaagcattcaatctttgttcatacaaacttgtagattcaaacaggttcttaaaatttttcaatccattcttcaggtacagcaacacgaaaacatcccatagaatgaaaacggatccttatccgaaaccctgtgtccgaagtatccagttcgcccactaacccagtcaaaggacctcctgttacacgaaccattgtggcggattccaagcaatcgggtatccattccacagcggtatccatttgagaaaacaatagttgataactttccacctgccattccggaacacgataatcccagatgttttgaggaataatcaatcctgatattccggataactgccgaatgtcggacaatgacgtccaaataaggacgcaacgagctatttgtggacataatgcctccctggaacgtccctgccattgataagtaattttacgtagtggaagatagtttcggactttccgctgatccagttcttgcttcacgcgttgctctgcccgagaagcagtaaaagcaagataccaatgacatgactgtttttctgtcatttcgggcctttcgtttgtattcatctatttcttattttgttaaactcaccatcgaagcaaccatcgcagctatagaagcaatggagctactcatgccaactgctcctgccgtagtcattttcttccgttctcctttgctgggcacaattatttcacacccgggttcaatggcatttgccgtatttcttctcaatcgggagactgtaccattcatatatacaacataagcacgccgtttcaaggcccggtttccaaaaccaccggcttgtcctatataataatcaattccacttcctttctgataaagcacagtattggggtac

SEQ ID NO: 5020 - DNA, 16073 bp, Unknown
  gut microbiota DNA sequence
attaaattgcaataatctatcattcaggcagctatgtatgctgcatcggaaaataaacaacctaagaatcattgccttatacccaatttgaattcctaaatattatggcagacaattatatcgaaagacaatacgagcaatatgaagccagaaaagcggcttgggaaaaagcacgcaaatatggcaaaaagaaaacggggatcactcaccctgctagaactgaacaaccgggccaaacgacaacagagccccatcattataaaagagtatttgttacgggaggagccaatggaattggtaaagccattgtagaaatattctgtaaaagtgggtatcgggtggcattttgcgacaaagacgaaatagcaggaaaacgtactgcagaagaaacaggagccatttttcatcaagttgacataagcgacaaggatatgcttgaacactgcatgcaatccatcattgaggaatgggatgacattgatatcttaatcaataacgcaggtatcagtgacttctctcctatcactgaaacaagcatagaagatttcgacaggattctatccattaatctacgcccggtatttattacttcacgcttcatggctatccaccgtcaatcgcaaacaacatccaatccgtacggaagaatcatcaacatctgctctaccaggtatttaatgagtgaatccggcagcgagggatatgcagcttctaaagggggaatctattcactgacacacgcgttagccttgtcgcttgcccaattccatatcacagtcaattctattgcgccgggctggatacaaacccatgactacgatcgtctccgtccggaggaccatgcgcaacacccttcgagaagagtcggtaaaccggaagatatagcccgcatgtgtagattcctttgtgaagaaggaaatgactttatcaacggtgaaaacatcacgattgacggagggatgactaaaaagatgatttacacggaataatatagttccgaaccaaacatacagaagtaaatggaatatggtattataacgtactaaaaccatctccacttttccactccatgatacattttactttaaagtccttgtttctatttaaatgatactccaaataaaaagctgcccggaaattttccgggcagctttttatttgcctccgttcaaacaacggagtattcttttacagaagtttaaaacttacgtgtgttcaggttcttgtcgaccaaaacgccatcaatagctttcagatcaaacttcacagcgcgtttcgctttcagcttcagaataaacagatcgtttgttccttcgagggcttctttagctccgaggttaacaaatgtaggatagagtgcttttgtaccattggtatggagtctgtcataagtcagattttccatagctttgaggttcagaggttctacacccacgaattcataatcctgctgattgtatggcaacgcaaaactcaacgcatttacagagcggaggttgacaccttttacaagcacttcaacaacatcacccttactgtaattccgtttagcagtactgatttcaatggtaccatccagtttctcaatcggctcttcacttacaccatcttccaattgtgttgccactacagaaatatcataagcgtcaatcaaaccattctgatcaatgtcgcctacactgatatagccttcatagtcggaatcaccttttctcagaccggtatagttggtatacgaggttaaatcgttattgtcgatcttaccatcgttattgatatcaccctgcaaacggctctcggttccgggaactttaaatacatacaattccctacccgaaccatagttgtttacaccttctgttacagccagtttgatatagcgtgcagtcggacgttcagtaaatgtaaatactttcacatcaccattacgtttccagtcgattgctccggcctcggtccagttttccttatccatactataatatacagtacctttcaggatcgttccgttaccaccatcggtacgtggcaggtattcgaatttatccagctggttcactgttcgcagatcgataatcatatcataaggcagtgcttttgctccatacttcgtatgccacatatcacccagctcggcaaagtcgaacaaacgatcgatatcaaatccttcctgattcttcgcagttgtttcacccttgattccgtgaagagcaaattccagcggattagcttttgtcttagcaccgaattcagcccaatccgaatagccatccttgtttacggcacgaatcttaaatgtatagtctgtttcagcagccagtccgtcaaatagcaactcagtatcctttattgttgtatacagcatgccattgaattctatttcatagaaatcagcattcggcactttgttccatgtcggcttcaaggtataagcctcaatatcttcggcagcaattcgggcagcaggagcggtcaacgaaccggaggttactctgtaattatcggcaggtgcatattggaagccttcgatatccattacaacttgatttttagtaatatcggtagcagccagtttcacaagaacttgaggattcttagtgataaccttcttctcaaattcactgccctttgtagcaaacttattcaaattaggagcagcgtcatagaagtatacgttttcacctttccggaaatcatccatagaagacacttcggtcaacttcactttgcctttacctatctgagcagaaaccttcttcggcttagcagtaacatttactctgaattctgtggctttctcttttacaaagccgtcgaaatcaccctgtgtaggacgaatagaaatcttcacattattctttgaatcaacattcgattcaatgaaagtagtggttcctttaccctctttatatgcttcagatataccgtcatcgtcatattcaacggtcatcatgtgcttatacggatagatttcgtagatacgaagtcccttattaatttcagcaacgttattattaggattggtcatcgggatgatagctccgttctttacgaataccggaagcttccagagaggagcggcaaaattgttgagaacacagttaccctgatatttctctccggtaaaataatcgatccactctccttctggcaaataaatgccatcacggatatcattgccttcagcatctgctttggtagctttgtaaatgggggctactaaaaaatcggtaccatacataaactgatactgcgtagctgttcccaaggtgtaagcattcggatattccaggaacatggcacggataagcggcataccggttacagcctcttttgcaaaactataagtgtaaggcaataattccgatttcagtttcagataccagcgattgatagaagtggcaggttcgcccagagcgtgaggatacttttcattagatccccatccgtccatattcaactgcatcggagtgaaagttttccactggaagtctctggtgttgacaatcatattcttgccgccaaagatgccatccatatccgaagaaatattaggttggcctgacaggcctgaaccgatataagtcgggatatggaaacggatgtactcccatacaccgcctgtctggtcacccgaccagattccggcatatcgttgcgtaccggcccaaccgtcaagtgaaataatgaacggacgtgcatcgttaccgtaataaggcataatgtgacccacatctgccactccattcaatccgaacgaatatccccaaccgacccatgctacgtctgttttcaacacacgcacaccggcatctctaacttctttcacgatatctctttgcagcaatgcactgacgccttctttcggatgtaaatccgattgtgtccacaatccaatttcaacgccattcttacgggcatagtcacccagacttttcagattctgaatgtttccgtcgagtgtctccgtctgtccgtatccggcaccatatccatcattcggcaggagccagcccaacggcatatcgtgattcttgtaacggtcaatcactgcacgggccgagaactgataattattcttttcaccgttcaatgattctttgattccgccattatctttctgactttctttataacgctttccatcttcgaacaagattcctttttcgtcttctttccaatagtcgcgattgtaagcattcaaatgtccctgatagaaaccgaacttgggcagcaacaccggattaccggtcaactgatagaaatcattcaacacgcccacagctccgtcgctaaccatataaaagagatcgagatatggagaatcatgtgtaagtttcacttttcccttctcgtctgcaccgaaatcatatttacccggtttgaaggtataccacatcataccatagccattggtcgaccaatagaatggcgcaggagaagctactccaccgtcagtccaactattctcgtttacaatattaatggcttttcctttgtgtgaaaaacgtccgttctgcacaccgccaccataaaaatattcattgggattttctttcagggttacagtcacttttcccttatcgaacagtacgggttctacctcttcaaaggcaacagtattcttttccaagtcaatcactttcatcaaagaagtattcttgtcgatttccactttgattttccccgtagtgatagagatgagattgctgccatcattcaagttgagtgtagaaactgtgtttctgggattgtttaccagaatttgtgcttcaggttttgcttccggatcacggatgattcctccggcattgtcctgaaatactctgaagatgttttccccgtagaaatcgaatgtcattctctgattattagagaataatacttcaatcgttgtcggattgattttctttgcactaacgatcttcaagttttgttgtgtcacttctctaacgatttcggacctgtgcattgcctgcgcaggcgaaccggaaaacatcagaggcaaagcgagggcgaacagcactgcttttcgctgcctacaattaccaattgcgtttttcatgatttttactataaaatttcaactaaatattactccattctgtcaatagattgaatacgcaaaaataggcaaaagtattcataaaagacatattttatgaaaataaatacaagtaaatacgcttgcttcctataattcaggaagtactttcgcaccttatgcctctttcctcctaatcatcaatctcaaaacatggggatgttcttatactaaacatccccatgttgtccacctaaacatccccatgttttgatagtaaacatccccatgttttcctatgtggcattagaacataagactatccggtcagcaagataaagcacttgccttgttacgtaagctaacaaccggttcgtgatatcggtagactacttccttaaacacacattatttatagaggaaattagccaatcagaatgaaaatcttaactttgcagaacaaaaatgaaatcatatatggaaaagctaaaaatggaatctgtgagcatcgcagaggacagcctgaataaaatagccgaactcttcccaaacgtagtcactgaatcgatgggtaaggacggacaactacataaagctatcgactttgataaactgaaattcctgcttacagccaaccaagcagaaatgggagtggtatatgatgacgacgaacgttacgaattaacatgggtgggcaagaagcaggcgataagagaggtggcgcatcctatccgaaaaacattgcgtccctgcccggaagagagcaggaattgggaacagacccaaaacctatacatcgagggagacaatctggacgcaatgaaactcctgaaaaagagttacgcaggaaaggtagacgttatctatatcgatccgccttacaacacgggtaaagactttatcttcaatgatacattcgctctttcacaggaagagtccgacgagaaacagggaagatataatgaagaagggcaacgattgtttcagaatacggaggctaacggaaagtttcactccgattggtgtagcatgatgtatgcccggctgatgcttgcccgcactctgttaaatgataatggcatcattttcatttccattgatgatcacgaattggcaaatctgatcaaaataggaaatgaagtattcaatgcttctaatttcatcgatgtatttaattgggccaagacggaaactccggaaaatctctcaaaaaaaagtaagcaaatcatcgaatacatcgtctgctatcagaagaagaaaaacgacatgaaattccagggtctgaagaaggaatcggtcagttcgaacggtttgttgaatcaaccgaattccgtcggtatcctgaccttccccgccaacaaagtagtcacttccatccccgacggagtgatcaaagcaggcatgtacggaacagatgcttatgatgtggaattactggaagacaccaccgtacgtggcggactgtttacagcccccgtcaaactgaaagccaaattcaaatggagccaggcgaatctggacaaagagatacaaaaaggaacaacaatcaaaataccgactctcaagttaagtccttcgtacgaaaagctggaatatgatccggaagttccgcccaacctgatcaattacaaagtaggagtcgaaaccaatgaacaggccggtaatcatcaactacagttctttgataagaaagtgttcaactttccgaaacctgtcagcctgatccaatatttatgtgagtttatcgacaccaaaaacaaagattgcatcgtgatggattttttctcaggaagcggtacgaccgccgaagcagttatgcggatgaacatgaaaccacgtaaaaacaaggtgaaatacatcctcgtgcaactgccggaagatgtgactgaaacaataaaaaaggccaaaactcccagtgaaaaagagattatgcagaatgcaatcgacttccttacggaaaaccataaagcattgaacatctgcgaactgtccaaagaacgtattcgacgtgccggagacacaattgaggcggaatgcaaccagcgtaaattaaaggacctcccggacatcggtttccgtgtttttcggattgccgacagcaatatgaaggacgtgtactacagtgcaaaggaatattcacagagtgatttattctatttcactgataatatcaaagaagaccgtaccggactcgatctgctttatggttgcctgaccaacctgggactatccctgtctctaccacatgatgaagaggatatacatggatatacggtttattctgtcgacaagaccgaattaatggcatgtttcgcagaacagattcccgaaaaagtcttccgtgaaatagccggcaggcaaccacgccgggttgttttccgcgacgcctcattccgtgacagtgccgatcgtatcaatatagacgagatattcaaaacattatctcccggtactacgatcgagattctttaaacagagaaggaagatacagaaatgaaattaaaattcaaacatcagaagtttcaggaagacgcagcaaaagcggtatgtgatgtctttggcgggcagccatacaagacgttcgactatcaagtagagacccggaagaaagacggacagaccagctttgaaaagtttacaggattccgcaaccaccctatcgtacctcaactcacagatgagatcgttctgaaacacatccgggatatccagcgtgcccaacaaatcaaaccgtcggaagcgctggaagggaaatacaatctcaccatcgaaatggagacgggtgtaggtaaaacgtatacctacatcaaaaccatctttgaactgaacaaacgctacggttggtgcaagttcatcattgtcgtacccagtgttgccatccgcgaaggagtccacaaaagcctggagattatgaaggaacactttgcctcggattacagcacccctctgtcttatttcatctacgactccaaacagttgggtgaattgaacgcatttgtcacagacagcaaaatccatgtaatgatcatcaattcacagaagttcaatgcaacgaataaagatgcccgccgcatctacatgaagctggatgattttggcggaaactgtcccatcgatgtgattgcgcagatgaatccgatactgattatcgacgaacctcagtcagtagaaggagccaaaacaaaagagggattgaaacgattcaatcccctgttcacactgcgttattcggctacacaccgcgaactctataatctggtctatcgcctggacgcaatggaagcttacaacctgcaactggttaagaagatcgctgtcaagggtatctctatcagtgggacaacagctactgaaggattcgtttatctggaaggtttgaacctgtatccggacaaaaacccgactgccaatatcggattcgaagtaaaaagaaccaaagcagtgaatcaggtagtacgagctctgaagataaatgatgacttgtatgctaaatcaaaccatctggaagaataccggaacgactatgtaattacagatatcaacggcgttgaagactccgtcaccttccggaacggcatcaaactttatgcaggtgacgtagcgggtagcgtcaacgaaactcaactacgacgtatccagatacgggaaaccatcttgtcacacatagaaaaagaacaggaactgtttgagaaagacatcaaagttctctcccttttcttcatcgatgaagtagccaaataccgccggtataacccggacggaaagggagaatatgccgagattttcgaacaggaatataccgatatcataaagcacctggatccttcgttattcaatcagccggaatatatcgattacctgaaatcgactgtggcatcgaaagctcacgaaggatacttctccaaagataaaaaaggaaaactgattgacagtaaaaccgagcggggaaccaaagaatcggcagatgaagatgcttacgatttgattatgaagaataaagaacgtctgcttgaccggaaagagccgatccgctttattttctcacattccgctctgcgggaaggatgggacaacccgaatgtctttcagatctgtaccctgaaacaaagttcggcagaggtacgcaagcgtcaggaagtgggacgagggctgcgcctctgtgtaaacggacagggagatcgcatggacgccaacgttttaggcgaagaagtgcatcgtgtcaacctactgaccgtgatagccagcgaatcgtacgaatcgtttgccaaaggcttacagacagaaatggcggaagccatagccgaccgtccacagaaagtaaccatccaattattcaaggaccagtcgctccgattagctaacggtgaaaccatcatagccaccgaagatatagcacaaagtatctacgactctttacttgaaaacaagtacatcaagaaaggagaactgacagacaaattctatgaagaccgtaaacagggagaagtgattttcgacgacgagctcaccgattataaggcgtctatcatgaccatcctggcctctatctataatccaagggagatgcagccgaacgatgcaaggaaaagtaagataaatcttcggttgtcaaaagataaacttgaaaacagcaaacttcaggaactgttaaaactgctatgcagtaagtcaacctacaccgtaaagtttgacgaaaaagaattggtagagagagcgatcgaaagtttaaatgaaaagttaagagtatcccagctctatctttctgtcattacaggccaaatggaaaaaatcaagtccaaagcagctttaatttcgggagaggcatttaaggtagatgccaatcaggcgcactatgaaaagatagatgccatggcaaacgatcaagtaaaatatgacttgctcggtaaactcacagacgccaccaatctgacccgacaggcagttgctcagattctctcccggataaaaccgaatgtattcggccaattcaaaaacaatcccgaggattttattatcaaggcttcggaactgattaatgaagaaaaagcatgtctgatagtaaaacatatcgaatataccccaatcgaccagtactatgatgtatcggtctttacccgggcaactattcaggggcgtttgggagtaaacacaataaaagcagataaacatctgtacgatcatgtgagattcgactcccaaaatgaaaaaacattcatggaaagactggaagaaaatgacgaaatagaagcttatgtaaaactacccggcaatttctatatccctactccgatgggaaaataccatccggactgggccatcgtcttcaaacaaaagttatcgaagtatccttattttattgccgaaaccaaagccagcgattcctccctacaagatcggagaatagaagaggcaaagatcgaatgtgccaaaaaacattttgcgaagacaaacggtgggaagcttaaatataataaagtaagctccttcgaagaactcttgaaaatcgtcacacaagaatccgtttaaatccaataaagtagcatgtttcattccttccagacctccattgccggcatcgaattgccccgcttgtttacttatcccttccattacactcctcatccgttatgtgtaatggcagcaggagaagtacaggcttacataaataagcagacaagatggaaagaagaattggacaaaggaaaaatgttcggcgtattgatagtccgtacttctaacggacaaacgggatatttggctgctttttcgggtaatttgtgcggaagcaattcacactctttctttgtaccgccggtatacgatctgttgaaaccggatggtttcttcaagatagaagaagaacaaatctcggctatcaatcaccaaatcggacagttacaaaactgtgaccgatatctggaactccaacaaaagatggagagagaaacagcttcctcacagcaggcattgtcagaggccagaaaagttctgaaagcagcaaaagagaaacgggaacagcgcagacttcaccgaccgaacgaaaatgaacaagttgccatgattcgcgaaagtcaataccagaaagcagaattcaagcgtttggaaagatactggaaagaacaaatttccgaaataaagacagaactggaaagtttctcgtcacagatagaggctctcaaagccgaacgcagaaatcgttcggcagcattgcaacaaaagctattccaacagttcaacttcctgaatgccaagggggaaactaaaaatttgtgtgctatcttcgaagaaaccgttcaaaaaacgccacctgccggagcaggtgaatgtgctgccccgaaactattgcaatatgcttatctaagcgaattaagccccattgccatggccgaattctggtggggggaatctcctaagacagagatcagacaccacggttattattatccgtcttgcagaggaaaatgcgaacccattttgcgacacatgttgcaaggtctcaatgtagagccagcaccctcagaaagatactctttatcacaaaatatgccggagattcttttcgaagaccaatggcttttagttcttcataaacccgaaggagtactctccgtacccggaaagtcagaagaacaatcgatctacagtctgcttagagcccgctatcctgaagcgacaggtcccctcgttgtacatcgattggatatggccacttcaggattactgctggctgccaagacccaagaagtacaccggcacctacaggcccagtttgaaaaccgaagcatcaaaaaacgatatatagctctattggatggtatccttccggaagaagaaggagttatcgatcttcccatctgtccggattatcttgacagacccagacaaatggtgaacgaagagctaggaaaaacagctatcacccgatatcgggtgatggatcggaaaaacggacagacccgtattgctttcttcccgctgacgggacggacacatcagttgcgtgtacatgcagctcatccgttgggattaaactgccctatcgtaggagacgagctttatggacggaaggcagaacgcctttatctgcatgccgaatatctggaattcatccaccccgtatccgggcaaagaatggtcatcgaaaagaaagctgaattttaattgataaatcatgatagaacaaccttccccaaaagtatatgatgaacttctttccatctgggaagaagctgtccgaagcacacaccatttcctgaccgaagcagacatacaattttataagccgctgatccgacatgaatatcttgccgcagtccgattgtacatcattcgcgaagattcaggaactattgcagccttcatgggattaagcaatgattgcatagaaatgttgtttgtccgtccgaatgcccatggacatggctacggtagtcggctggttgaatttgccattcggaaaaaacgaatctataaagtagacgtaaacgaacaaaatgcagcagcactgggattctatttacatatgggatttgagactaccggtcgcgatgcattggatgcaacaggtaagccattccccattttacacctgcaaattcctcccatccgactccgaaaatcaactcttgaggatatagatctgcttagaaccctatttacacaaagcgtgcagaatacctgttcggctgactataacaggttacaaatccaagcatggaccggacggggaactctacaacgttggcatgaactgtttcaaagcgacctatactttctgttggcagaagacagcagaaagtctcaagtggcaggattcacatctgtcaactctaaaggatatctgcatagcatgttcgtacatcccgactatcaacgccagggaatagcttcgcgcctattgctaaaagcagaagagtatgtccgtatccgtcaaggcgtatctgtctattcggaagtgagcatcactgcccgcccattttttgagaaacacggctatagtatcgaaaaagaacaaacagtatctgttggtgacatagaaatgactaatttcttgatgtataaacgaatttaacagaacgaactgagatttttttatagctttgcgatagattaccatttaaaatcagctcatgttaaaatcaaaatatctgtttctttcacttatttgcctgctgacatcgttccgactccatgctcaatttatggattacggctcggatcctgctaaattcaaatggaatatcgcgagattaccccactacaatctggtttatccgcaaggaaacgattccatggcttaccgttatgccctctttctcgagaatgtttatccacacatgtcaaagaccattggaaaaccgatcaaaactaagtttccggtcattcttcatccgggcaacatgcaatccaacggaatggtatcctgggctccccgacgaatggaacttattacaacgccttcttcggatctgaataaccaaagttgggataagcatctggtactgcacgagtcacgccatgttttccagacaggaaaggtaatgcacggcattttcaaaccgctctattatataataggtgaacaggcagccggagtagcctcttttttcttgccggtatggtttcttgaaggagatgccgtaagtacggagactgccatgtctaacggtggtcgtggacgactaccggaatttaacatggtctaccgtgcccaaatgttaggaggaaaaaagaactattccttcgacaagtggctaatgggatcttacaaaaactatactggtacctactatgcactggggtttgatatgacctcttatgctcgtcaacgttacggagccgatatttgggataaaagcaccggtagatacattcggaacctactgttcgaaggttcatttaagcattatacgggcagtagttttaagcgtctccaacatgatacgttcgacttcctgcgtgcagagtgggagaaacaggatacttgtacacagtccccgcaatatctatcacctacaaaagagacttatacctcctatcgatacccacaacccatcaacgattctatagtgattgccgtaaagtcgggattgaaagatatcaactctttagtgatcatcaataatggcagagaaaaacatctggactatataggtagtattaatagccgtttgagctatcgaaacggccgggtttactggagcgaactagtacccggactacgttgggcacaccagaattactcaattataaagtactatgatctggataagaaaaacataaaaaccctcactccccgacaacgttatttatccccggccattgacgagcaaggacagcacattgccgtttcacgtcctacagtcgaaggtaaaaaccaactcgtgctgatacaagcagaaaaaggtaatgaactcgctgctttcgacgttcccgataatgcatttatcaaagaactgacatttgcaggaggcgacacaattatctcgatagctgtcgcagattccggtatccgcctgttacaattcaacttcggaaacggaatatggaaagaactgctaaaaacagcttccgccaatatcacttctcctgtttggaaagatggaaaaatctttttcgaatcgggagccaacggcaccaacaacatctacagcctcaatccggcagacggacaagtccgccgaatgacagctgcccgcttcggggctttcgatccttcttttggatcgtcagacggacgtttgttcttctctgattaccaagccgatggatatcgcattgcctcactcccgactgacagtatgctctttgaaaaggcagatctcaaccggccggcttccatgccatttgttgaaacacttgccgctcaagagcaattcaacctggactcggcacgtctgacatcagtcgatttcaatccgaaacgttatagaaaagcggaacatacgttcaaaattcacagctgggcccctttctattatgatgtggctgaggcaatgaactcaggtgccagtgatctgagtacaatagtaaaacccggagcaaccctgatgtcccaaaataccctgaacacagccatcatgcaggccggatggtatatagacaaaggctatcatcatggtaaactgtcatttatctatcaaggctggtttcccgttatcaacctgtcggtagactatggtgataaagctttcaatgtagactggacacagaatgacaaagggcaagacattacacagggccattatacccaacgaaatctggtggaagcagaagcacgtgtctatctcccttttaacttaacacacaaccaacgaatacgaggcatacaaccggctctgacttattattttaccaataataaatatcaggaatatcacagtcggaaattccataacttccaatatatcctaccggaaattctattctatgattacagacgaaaagctcagcgagacattctcccccgcacaggctatcaattacgttttcaatacctgaagactccattcaattctgaaaattacggaagcctgtatgccgcccgcctgactacttactggccgggaatcatcaggaatcatgggctgatgatccgtgtcggctatcagtatcaggatcttgacaacaaagcattataccttcccaaacatcttttggaaaaaccccgaggataccatttccagtatcaaacccgccagcaatgggctttcaaagcagattatgctttacccctgctgtcacccgattggagcatcggctcacttatttacatccgtcggttgcgtgcaaacctcttttatgatctatcgcgcaatcaagccagttctaaaagtaggtggagtaaccaaagttcatacggaggcgatctgattttcgactggaatatactacgaatgagttatccgcttacaacaggcatacgcttgatacagccgatcgattatggcaaatttcaagtagaggcactgttttcaatcagtttctgacattgggtgcaagttactttatttcaaaactttccaaacta

SEQ ID NO: 5021 - DNA, 11236 bp, Unknown
  gut microbiota DNA sequence
caacagactctaattgttttgctttcgcattacgtaccgattctaccgatgccgattcgttgttatcaacgcaagctcccagtgacaaagcacccaggagcactgctaccatcatgagtttctttttcataatctcaaaatttaaatgaataatagtaataatataaatgttatgtttcactctgttttttctcccgctaccggaaagtgttgcttcacccctcttggtgattcgctgcaaatatatcctaatttatctgataaaacaaataaattatgaacaaaatacaaaaatagacagatattcttttatacctataaacctaactcttcagattatgttgtactttcatgcaaatgaaaaaaagcaatatttatataggtgaaattatcaaaaatgtgatgtctgagagacaggttacaaaggccgaactcgcaagacggttggatgttaagcctcaaagtgtagattacttactgacaaggaaaagcatcgacacggatacattatacaatatttcaatagcgctagactatgatttttcccttttatatagtatcaaacaagaacagagaaattctgataacgaaggtatcagatataaactaggaaatgccaaaattatggtagagatagaattacagcaagatgaaattataaagcttaatttgaaaaagaaaatagcagaactgttggatggaggggctaataaatagatcttcttataccttattatatatagcgaacaaaaacttccaataaaaagatatcatccgggaagaataatttaacaatgttaataaaggcagaaggctattggttttccctgcacaaagaacaaagcttttgcagacaaataacttgttctttgcatttacaagacttgttttaacatcatgttaaagctaatattataaacaattagagttaagaagcaatcaactgaataatggatatataagctaaagacaaagctataacaaaaagaaagcccagcttccaaacagtatatattattaagaatacaacaactataaattaaaaagagtccggattatatactcaatatatccggactctgtcatttcaaaaaataaccaaactaaccttttttacaccaactatctttatttccactttttaagttctttcttatcggcaggggtagcctctatcaaactaatagcaaaacctccactacgggccaagtcagtggaaatcttcgtcttataagtcaccagaccttttttaatctgataagaagtcggatttttttcataatccgcatctttaccatcggcatataaagtagctacatattgctttcccggttccaggaaatcaagcacaaacgtagatgtgcgtgcattttcaccagtaattcctccaacgaaccaattattggtgtttttagctttacgggccacagtgatgtactctcccggttctgcttcaatatacttactttcatcccagtctactgctacatctttaataaactgaaaggcatccatatagcgttcataactctccggaagatcggcagccatctgtaatgggctataaagagtgacatacaaagccaactgtttggccaaagtagtatgtacaaaactatgctcaccactcaggaaagagagttgagtatcgaaaatacccggagtataatccatcggaccacctatcagacgcgtaaatggaagcaacgtagtatggaaaggcttattgcctccgaaggcttcatattctgtaccacgggcagattcattaccaatcagattcggatatgtacggcacaatccggtagggcgaacagcctcgtgtgcattcaccataattttatgatccgcagctttcttcactgcatacagataatgattattcagccattgaccgtagtggtgttcaccacgcgggatgatgttgccaacatatccactcttcaccgcattgtaaccgttatcttccataaattgataagcttcatccatatgacgttcatagttacgcacagatgcagaagtctcatgatgcatcatcagcttcactcctttacttctagcatactcattcaacattttcacatcaaaatcaggatacggagtaacgaagtcgaacacatagtcttttgacttgccgaaccagtcttcccagccttcattccagccctcgaccagcacctgatcaaaaccgtgttcggcagcaaaatcaatataacgtttcacgttctcattattggcaccatgacgaccattaggcttagttttagtataatcggtttcgcccaacttcactgaataaacatcatccgtataagcccaagtactctttccggtaatcatttcccaccatacacctacgtattttacaggcttaatccaggaagtatcctccagtttgcaaggctcgttcagatttaatgttaatttagaagcaagaatatcacgcgcatcatcactaaccataatcgtacgccatggagagtggcaaggagtttgcatatatcctttggtcccttgagcatcaggagtcaaccacgattcgaaaacaaaattcttatcgtccagattgagatgcatgcaagaataatccaccaaagcagcttcgtgcagattgatatacaacccgtcgtctgttttcatctgcaaagcagtctgtacaccggtaggagaaaaaggagtttgagaagcattgggagtgacagccgtcttcattaagccgcgtatttcagaaagtttcgaccgagtataatcatattcctgcgtatcataatctcccggtatccagaaagccgtatgatcaccggccatagcaaattgagaatgttcctctttaattacaaaataattcagattcttttgttgtggaaattcgtagcgaaatccgagtccgtcattatacagacgaaaacgaatcaccattttgcgatcctgagctttctggtctaaagtaatcgcaagttcattataattattgcgaatttgcttgacctcgccccaaacaggctcccaagtctcgtcaaaagaagaagttttggcatcagacaacgtaaaaccgtccatcaaccccggatcgtctttcagttcaagacccagtttagaaggtttaatcacttctttacctttataagaaagttcatacacaggttcccccttctcattcacagatacattcagtttcaagagtccgttgggagaagtaatactttcggccattgccacactactcactaaaagagagagaaaaaagcaagctaacttaaaagtcagttttttcatgttcttcatgatatggttcaataaaaattagtaatcatgcagcaaagataagcaagaagcagattcatgttcgatgaatagaaccgaaacaaagaagaattatcagaaaacgtttgcataaacagttgacagtggtaactttgccgataaaatcaaaaaaaagatgaaagagattatttatatatttatcggaggaggcatgggcagtgtaacccgctatctgacacaaatcgccgtcaacgaacggcttagcccggctctcttcccatttccatggggaacatttgccgtaaatatcataggcagcttattaatcggttttttttattcattttcggagcgtttcaatctatctttcgaactgaggctatttctgaccgttggtttctgtggcggttttaccacattctccactttggccaacgacagtctgagtttgctgaaaggaggtttttatggcatattcaccttttatgtattcatcagcatattgcttggacttttggctgtattggccggaggatatcttggcgaacaatttaaataacaaacgaatcatatatgaagccaacaatcaaaaaagtgcaacccgtcaaagtcgtagctccgttccttaacagtcagtccgaaagtccggtcccactggatgcacttaccgaccaagagaaagtttccgatttgtacttccttaagggaaccgtacatcaaatagctaaaccttatctaagtattaataattgcactttcaaacaacaaatattcagcgaatgtcagtttaaatcagctcaactgacagacgtacgttttgaaaattgcgatttatccaacgtttcgtttgccggaactactttctaccgggtagaatttatatcttgcaaattgctgggaaccggtttcccggaagccaccctcaatcatgttttaatggatcattgctacggacaatacatcaatctctccatggtaaaaatgcgaacagtccgtttcagccattgcaatttccgaaacggtagcctgaatgacagcaaactgatgccggcagcttttgatacttgcgaattgttagaagccgacttttcgcacacttcactcaaaggtatcgacctgagaaactctagaatagcaggtattcaactcaatatagccgatctgaaaggagccatagtcagttcgttacaagcaatagatctgttacctctactaggggtcaaaatagaagacgattgaacctttcttctcttttctttgttttataatataaaagtaatgatactgatttatagggaaagaacccgaacggaatacctattaatagtgattcttccgcttcccataagtgagtaaatttgcagagactaaaaaacaagagaaacaatgaaaatagaaaaaattacaggacgagaaattctcgactcaagaggtaaccctacagtagaagtagacgtagtattggaatcaggcattatgggacgtgcatccgttccatcgggtgcatcgaccggtgaacacgaagcgcttgaactccgcgacggtgataaacatcgttatggcggcaagggtgtacagaaagcagtagagaacgtcaataaagtcattgctccgcatctgatcggtatgtcggccctcgaccaaataggcattgatcatgccatgttggcattggatggaacaaagacaaaagccaaactgggtgccaacgctattctgggtgtttcgcttgccgtagctaaagctgctgccaactatctcgatattcctctttacagatacatcggaggtacgaatacgtatgtattgcctgtaccaatgatgaacatcattaatggaggctcacacagtgatgctccgatagccttccaggagtttatgatccgtccggtaggtgcaagttcttttaaagaaggattgcgcatgggtgccgaagtattccatgctttgaaaaaagtattgaaagaccgtggtctgagtacagctgttggtgatgaaggcggttttgctcccaacctggaaggaacagaagatgcacttaactctattcttgccgctatcaaagctgcaggctacgaaccgggcaaagatgtaatgattggcatggactgcgcctcttccgaattctatcatgacggtatttacgattacaccaaatttgaaggtgaaaaaggcaaaaaacgtacagctgacgaacaaattgactatttggaaaaacttatcaacgaatatccgattgattccattgaggatggtatgagcgaaaatgactgggaaggctggaagaaattgactcaacgcatcggggatcgctgtcagttggtaggcgacgatttattcgtaactaacgttgacttcctggcaaaaggtatcgaaaagggttgtgctaactctatcctgatcaaggttaatcaaatcggttcactgacagagacattgaatgctattgaaatggcacaccgccatggatatacaacggtcacttcacaccgctcaggcgaaacagaagatgcaaccattgcagatattgccgtagcaaccaacagcggacaaatcaagaccggttctttaagccgttcggaccgtatggcaaaatacaatcagctgcttcgtattgaagaagagttgggagaccgcgccgtatacggatataaacgaattgtagtaaaaggctaaacaaaatcatgatagcatagcatgataaaaggttagttatttataataattgaatgtaaatgcgaaaagggatgtatcataaacaggttcatccctttcctttttcatgaaccatcagaagaataaacgcaaaaaaagcaccccggcagtgccgagatgcttttccttttttgagcctcttgtcggattcgaaccaacgaccccgagattacaaatcacgtgctctggccaactgagctaaagaggcaagtgggtaagcttactatatcgcgccgctacaaccaactacctttgctgcgatcaagccctggaggattcgaagggagctggccgtataggacttacccgggtgcaaaggtaggtatttttattaaacctgcaataggggatcggtacttttttgcatgctttaccggtaaactcctacttttcagatatttaaaatcgaaaaaaaatgttttttttctgaccggatagctttattaactttaacaggcataaattccataccaaacaatattatttgtacctttgtgcgctatttattaataaaatgacagaaagcagaagtaacttacaaaaatatgccatgcattttggcacctatatgggagtatactggatacttaagttcattctattcccattgggattgtccattccgtttcttttattcctgtttttcgggcttactttaggagttccgttcatgggatattattatgcacgtacctatcgtgacaaagtatgtggcggctcgatccgcttcctgcaagcatgggtattcatcgtttttatgtatatgtttgcggcactcctcacggcagtggcccactacatttatttccggttcatcgaccatggtttcattgtaaacacttacatgggaatgtttgacgaactgagcaataaagaagtaccgggaatagaagggtacatcagccaactgaaagaagtgatggaaatgatcagtacattgacaccgatagacattactatgcaactgatgtcacagaatgtgttctatggcagcatattggctgtccccactgccttgtttgtgatgagaaagcccaaatcaccggaggtgcaacctctatagtttgtaatatctaatttataagtaaaatggatatatctgttgtcgtaccattgttcaatgaagaagaatccattccggagctttttgcctggattgaaagagtgatgaaagccaatggcttttcatacgaagttatctttgtaaatgatggtagtaccgaccgttcttgggaaattatcgaagagcttcagaaacagtcgtccactgtgaaagggatcaaattccgacgaaactacggaaaatccccggctctgtactgtggctttaaacgtgccgaaggaaatgtggtgatcacgatggatgccgacctacaggatagtcccgatgaaataccggaattataccgtatgattactgaagacggatatgaccttgtttcaggctataaacagaaaagatacgacccgctgtcgaaaactctacctaccaaactatttaatgccacggcacgtaaagtttcagggattcataatctgcacgactttaattgcggattgaaagcttatcgcaaagctgttgtaaaaaacatcgaagtatacggagagatgcatcgctacatcccgtatctggctaagaatgccggattccagaaaataggcgaaaaggtggtgcaccatcaagcacgtaaattcggaaaaactaaatttggaggatggaatcgcttctttaacggatatctcgatttaatctctctttggttcctctcaaagtttggaattaaaccaatgcactttttcggtttattaggctcattgatgtttatactgggattcatttcagtggttattgtcggagccagtaaattatatagtatgaatcacggtatgccttatcggctggtaacagattctccctatttctatctgtcgttgactgccatgattattggaacacaactctttttggcaggatttcttggcgaactgatttcacgcaacgccccggaacgcaataattatcagatagaaaaaataatataacgaacgattaatgaaacctgtacgatgaaaaaattaataaaactggtactcttcctgatggtagcctatccactaacgggtgctatcctttcggcttgctcggaagagagtgattgctccatgaccggacgcccgatggtctacgccaaaatgtataccatcaatccggaaaccaaggctgtactgaatgacaccctcgattcattgagtgtgacagcattcggaactgattcaataatcatcaataaccagaaaaaggtacatgatatcgctctcccactacgctatacaagtgactcgactattcttgtgtttcattacacccggttgttaagagatacaatggtgatcctgcaaaccaatactccttactttcagtcgatggattgcggatacagtatgaaacaaaatatcatcagtattcatccgattgattatacggaaaccaataaaaagaaatatcatagcatagactctctatatatcaaatcaaatgcagctaacattaatggaacagaaaatctcaaaatattctaccgctacaatcgttagcctgctgtgcctcatattcagccttccgctccaagcacaacagcaaagacccggtgcacgtcctgctgtcaagcagaaagcaaaagaggagataaaagcggatacgattcccttttacaatgggacgtatgtcggtgtggacttattcgggttgggcagtaaactactcggaggagattttctaagttctgaggtaaatgtgagagtaaacttaaaaaagaaatttattcctacagtagaaatcggtttcggacaaacagatatctggagtgataccggtatccattataaaagtgccgctccttattttcgcgttggggctgactataatgttgttaaagaatatttgtatgtaggactacgttatggatttagcagtttcaagtacgacatctcaagtacacctttttctgaccctatttatggaggcagtatggctaatcccggattgatagacggcatttggggaggaagcgtaccttatcattacaacggactgaaatctaacatgcaatggcttgagctggtggccggagtcaatgttcaaatctataaaagcttctatatgggatggaccttacgctttaaatttaaaacagcgagctcgatcagcgaacatggaaatccatggtatgtaccgggttttggtgaatatgactcctcaaacataggtatcacatatacactgatttataaattaccattttaacgacatgacaggattagagatttggctacttgcaattggtttagcgatggattgcctcgctgtctctattgcaagtggtattattttaaggcgtattcaatggcggcctatgctcatcatggcattttttttcggacttttccaggctataatgcctttattggggtggttaggagcaagcacattcagccaccttatcgaatcggtcgatcactggattgcctttgctattctggcctttctaggcggacgaatgatcaaagaatcttttaaagaagaagattgctgccaaagatttaaccctgcaagcctgaaagtagtgataacaatggccgttgcaaccagcattgatgcattggccgtaggagtatcctttgcttttctgggtatcaaaagctgttcgtctatcctttacccggcaggaatcatcggatttgtttctttttttatgtcccttataggattaatcttcggcattcgcttcggatgcggcattgccagaaaacttcgtgctgaattatggggaggaatcatactgatccttattggaacgaaaatattaatcgaacacttattttttaataattagctatcaacctcaaacaacaaaaggctgtgtaatcataaacagatttgttgcttacttactttttacttattatggaaaagaaaacaagaaaaagcttcatttggctggctatcctgctgttgggaacaatttggatactagcccaacgaaataaacaaataccttacaacagtatcaatgggcttgtattcggcacagtatataatattacctatcaatatgacggcaatctgaaagcggagatcgatgccgaattaaaaaaattcgacggttcactttctccattcaatgatacatctgtcattacccgtgttaatcgtaatgaagaaatcgtcacagacactttcttccaaacctgttttaaccgatctatggagatctcagccgaaactcgcggagctttcgatatcacagtagctccattagccaatgcctggggattcggtttcaaaaaaggagccttccccgactcgatcatgatagatagtctactccaaatcacaggataccgaaaagttaaactggaaaacggcaaagtgatcaaagaagaccctcgggtgatgctaagctgtagtgctgtagccaaaggatattccgtagatgtagtagcccggtatttggatagcaaaggtatcaaaaactatatggtagatataggtggcgaactggtggtaaaaggggtgaatcccaaagaggaagcatggagaatcggcataaacaagcctgtagacgactccttgtcgcttaaccaagagatacaaacaacattaaaactgaccaatgtaggtatagcaacttccggaaactatcgcaacttttactacaaagatggcaagaagtatgcccacaccatcgacccacgtaccggatatccggttcaacataatattctttcagcaaccgtagttgccgacgattgtatgactgccgacgcattagccacagcttttatggtaatggggctggatgaagcggaagcttttacaaaatcacaccccaacataggtgcttattttatctacagtgatgaaaaaggggaggtgaaaagctattttacaaagaacatgaagcaatatcttgacaaatagcgtgaatacctgctcccataaccggccccatgggagcaggtattcagaatgaccggcacagaaattaccaaaaaagcaagttgattccgaagcaagaataacgcattatcaataagcatattatctctttttaaagcatctttatctcagctcgggtacgcaggttcacgaacccacatacccggcatgtggttcaagataagctccctaccattttcactaaagatactaagaaaaacaaactgctttaaatgctatatttgacaccccata

SEQ ID NO: 5022 - DNA, 10412 bp, Unknown
  gut microbiota DNA sequence
tgctatcaagcagacaaaagctgccacatgattccaatgcagtgactcccctttaaataataaggtagaaaaaacggtaaatataatcagtgtgatcacctcttggataattttaagttgcatcaatgaaaacggccctccgtttccgctgaaccccagccggttggcaggaacctgacaagaatactcagccaacgcaatcacccatgaaaacaaaaccacgccatacaaaggccaattactgattatttttgtttcctgtagcttcaaatgcccgtaccaggcaaatgtcataaaaatgttggaaacgactaacaacgaaatagcataaatacctttcatattttattcaaaattaaaactccacttctttgggtaacaattcttcctgtacatttgtcatgctcccccacagactgtaccgagcctccggattcatcttttccaattgtcggagtatccccttcatatcgctacggctcgattgggattcataaggacaatttttcacttgtttgcgatatccccgtatttgcgccaactccaacaaatccgcttcatgcaccaggcacatcgggcgaataatggtcatatcaaatttgttcattaccaaacgtggtggcattgtactgaatgcaccctgataggtaatgttcattaataaagtttccaaaatatcgtccatatggtgtccaagggctattttattgcaaccctgctctttagcaacagtaaacagagctttcctccggttccatgaacagagaaaacaaggtgatttacgcgtatcggtagaagggtcgaaagaagtctcgtagacaactaaaggaacaccattcttttcagcatgttcacggaggtagtcccaatcactctggtatggaatattcttcataaccacatgtacagctaccaccgaaaaacgaggtttgaaaatatgcgaacgtttacccagcaattcgactaatgccagggaatcttttcctcctgaaaggccaacaagcactttgtcaccctcttcaatcaacccatattgaaccatacctttgttaaaacgcttttcgatacgccgaatggttttctcttcttccgtaaactgtgccataactctcttgaaaaatcggctgcaaaagtaagagaaaagaatgatttaaagaagaattaacataatagaagaagagaaaaaaggtttatttccaattaatttgtatttttgaacttctgaataataacccaagaccatttatgaagaaaaaaaatatcctattctttctattatgctttctcctgacaagcctatcggcacaaactttggaacaagcaagaggcatgtatggcagagggcaatacgctgaagccaaacctgtttttcaaaaatatgtcaaatcgcaaccggcaaacggtaattacaacctatggtacggtgtgtgttgcctcaaaacaggtaatgctgccgaggccctaaaatacctggagacggcagtaaagaaacgcattccgagcggacaactatatctggctcagacttataatgatttataccgctttcaagatgcagtagattgctacgaagaatacattgcagacttgtctaaacgcaaaaaaccgacagaagaagccgagcagcttttagaaaaggctaaaggaaaccttcgcatgctgaaaggggtggaagacgtatgtgttattgacagttttgtaatagacaaagccaatttcctcaaagcttataaaatcagtgaagaatccggaaagctcttcacttacaatgactatttcaagacgaaaggctatcatccgggaacagtttacgaaacagaaatcggaaaccgtatttactacagcgagcagggagaagagagtctgaatattctgtctaaaaccaagatgctggacgagtggagtcagggaaaaccacttccgggaagtatcaacgcctccggaaatgccaattatccgtatgtcctgtcggatggagtgaccatttattatgcctcggatggtgatggctccatgggaggatatgacatttttgtaacccgatataacacaaatactgatacctatctggtaccggaaaacgtgggtatgcctttcaactcaccttataacgactacatgtatgtcattgatgaatataataatttaggatggtttgcttctgacaggtatcaacctgaagataaagtttgtatctacgtattcgtacccaatgattctaaacgaacttacaactacgaagctatggaaccggaaaaaatgattgaactagcccagctccattctctagagagcacttggaaagactctaaaatagtggatgatgcccgtcaacgacttgaagcggttatcaaccataaaccggctgtagaacaaaactttgattttgaatttatcattgatgaccactctacctaccatcacttaacggatttcaagtctccaaaagccaaacaactgtacctgaaatatgaacagatggaaaaagattaccgccagcaaaccgataaactgaagagccagcgtgaaggattcgcacggtctaataaagacgaacaaagtaaaatggcaccggctatccgcgatcttgagaagagggtacttcagatgtcagaagaactggataaacaggctattgaagtccggaatgcagaaaaacaaaacttaaaataacaaactatggatgtactgatcatcattgcactgatagccgccgcagtaatactctttttagttgaactgttcgtaattccgggtatcagcctcgccggtatttcagctttggtctgcattatttatgcaaactattatgcttttgctaacctgggaacaggtgcagggtttataacacttattatatcgggaattgcctgtatcggttcgcttgtctggttcatgcggtcgaaaaccctggataaattggcattgaagaaagacataacatccaaaatagaccgaagcgctgccgaaaaagtaaaagttggcgatacaggtatcacgattacccgactggctcaaattggcaatgctgaaatcaatggcaatatcatagaagtcaagtcaatggacggattactgaatgaaaaaactccgattgttgtcaatcggatcactgatggaataatctttgtcgaaaaattaaaatcctaatattcacttaaaatcaagcacaattatgaatgtcgaacctatgtatctgactatcttcttgatagcgggaggtattatcttcctggttcttttctttcattatgtacctttttttctatggctatcagccaaagtatcaggagttaatatctctttggtacaactttttctgatgcgtatccgtaatgttccgccatacatcatcgtaccgggtatgattgaagcacataaagcaggtctgagcaacatcacccgtgatgaacttgaagcacactatctggcaggcggacacgtagaacgggtagtccatgcattggtatctgcatcgaaggccaatatcgaacttccattccaaatggctactgcaattgatcttgcaggtcgcgatgtcttcgaagccgtgcagatgtcggttaatcctaaagttatcgacacaccacccgtaacagctgttgcgaaagacggtatccagctgatagccaaagcacgtgtgacggtacgtgccaatattcgccaattggtgggtggtgccggcgaagatacaatcctggcacgtgtaggtgaaggtatcgtttcgtcaatcggttcctctgaaaaccataagtcagtacttgagaatcctgattccatatcaaaactagtgctgcgcaaaggactcgatgccggtactgcatttgaaattctctctattgatatcgctgatattgatataggtaagaatattggtgctgccctgcaaatagaccaggcaaatgccgacaagaatatcgcgcaggcaaaagcggaagaacgccgcgcaatggctgtggctaccgaacaagaaatgaaagccaaagcggaagaggcccgtgctaatgtaattcaggcagaagcggaagttccaaaggccatggctgaagctttccgtagtggaaatctcggtattatggattattataaaatgaaaaatattcaagctgatacatcaatgcgtgaaaacatagctaaacctatcggtggagctaccagtaaaccgttgagcgattagagaaagcatttcaccacaaacaacagagagcagtataaccgccggagagaacaatctcgggaaacaagcggttaatccatgtagtttgtggtgaacatatttattaaactaaaacctttcaataacatgaaaaagtattttccttcctccgaattaattatcaacgaagacggttcggtattccatttgcatgtaaagccggaatggttggcagacaaagtaatattggtaggtgatcccggacgggtggcactcgtagcttctcacttcgaaaataaagaatgtgaagtggaaagccgcgaatttaaaacggttaccggaacttataaaggcaaacggataactgtcgtttctaccggtatcggttgtgacaatatcgatatcgtagtcaatgaactggatgctttggcaaatatcgacttccagactcgggaagaaaaagagcacctccgctctttagagttagttcgcatcggtacatgcggaggattgcaacccaacacaccggtcggcacattcgtctgttctgaaaagtcaatcggctttgacggactgttgaacttctatgccggacgcaatgctgtttgtgaccttccctttgaacgggcatttctgaatcacatgggctggtccggtaacatgtgtgctcccgcaccttatgttattgatgccaatgcagaattaatagaccgtattgcccaagaagatatggtgcgcggtgttactattgcagccggtggtttcttcggaccgcaaggacgcgaactccgtgttcccttggcggaccctaagcagaatgataaaatcgaaaagtttgaatataaaggttacaagataaccaacttcgaaatggagagttccgcccttgccggcctcagcaagctgatgggacacaaagccatgaccgtttgtatggttatagctaaccgcttgatcaaagaagcgaacacaggctataagaataccatcgatacattaattaaaacagttctcgatcgaatctgatgaatttatcatttgccgccattgactttgaaaccgccacaggatacatggaaagtgcttgtgcggtaggtatcgttaccgttacagacggagagattacagacgaatattacagcctgattcaaccaccggagaatgaatattggcgtgcaaatatgcttgtacatggaataacgccgggaatgacagagtcactcccgggatttcatgccatctatcccgaagtcaaaaagcgcttacaaggcaacgtagtagttgcgcacaatgaacaattcgaccgcaatgtactgaagaataccatgcggatgtacggactggattatgatgagttatcgcttcctgaacgttgggaatgtacctgccgcatctatcgttctttaggatacaagccggtcaacctaagcgcctgttgcgaacgggaaggcatcgaacttaaacaccacgaagcactttccgatgcccggggatgtgcaaagctatatctcaatttccttgaaaaataccgtccgctcagtaccctatggtgaaacgctcctgatgatgctccgacttctcaagctcatcaatcatggcagccgcataatcttccacagatatatgactgttacctaccatatccacaatcatctcatctttccccaggcgatatctgcctgtacgtactccaggagccatatctgccgccggcgagaagaaaacccagtcaacctctttttctttcttcagaaaatcaagataaaaatcactcaaggctctcacaccaggcaatatcttttcgggaacttctcccgaatcgaccagtcggatgccgggagcaataaacagtgaaccggcaccacccaccatcaaaaaacgattaactccagccttttttacaccatcgataatcgtcagataaacctcaatggtttccttgtatatatcgggattattccaccccgggttgaaagcactgatcacggcatcagcacctttacaaaccttacatacttcatccaatgaagaaacatcagctctcttcacttccagattttcattctctatcctgatcttttcaggatgacgaactaccgccgtcacatggaatccacggttcaaagcttcattcagaatagccgaaccgacgaagccgctggccccgattagtactactttcttcataatccaatttatctttatagcattatttactacagaacatactatatgacaaattgttgcattgaaagaccgactattcctccctcctataaataagtttcgatcgtttctttcagcttctccagaggatatggttttgcaatcacttcattacaccctgcttcaagagctcgctctccttccggacaaaaggcatatgctgtaattgctataatcggtatctcttgcgagatagcacgaatttttgctgttgcctgaataccattcatcaccggcattcggatatccatcaaaatcaagtcgggcttctcgcgtatgaaactcttcacagcttcttctccattaggcacccaaagaatcgtatattcttttttcagaaaggcattaatctgcagataactggactccacatcttccgcaatcagtatcttcttctgccggttctccactcccatattacccgctgcgttttctctttcgccaaccacaacttcctgtacttgcctattgggcaaataaagaatgaaagtactcccctgcccaagctcggattccacttcaatccgaccgcccaaccgctctacaatactcttacagataggtaatcccagccctgttccttgtacaaaatcattcaacttctcaaagcgggtaaatatcaaaggtaatttctctttggaaataccgcagccggtatctgttacataaagtttaacccattcttcctcttttacaagtccgaaagtaatgctaccctcaatggtatttttaattgcattcgacaagaaattgaacaatacctgcgtcacccgattcctatctgtcgaaatccaaatttcctctgatggacgaatcacattcagcttgactccttttttcattttaagacgatgtactttatccacttcatctaccaatccgctcatttccgtcaactgacaatgcatttccgacttacccgactcgattcgtgacaaatcgagaatatcattaatcagttgtaacagtagattgctattctgctgaatgatccctaaatactcttctttctccttttcatcctcagtcaaagctataatttccgaaaagcccacaatggcatttaaaggagtacgtatctcatgactcatattggccagaaatactgatttcatccgatcagcctcttctgcccgttgcttggcttcaagtagctcttgcgaacgtcgcatccgatcaccaatatcatgaatcaaggccagcaccttatttccctcaaacggagcaatgcgtgcctgaaaaaaatgtctgccggcttcgacatccacaggatactctatttcttttaacttcccactttttaggcattcatgaatactgctaataaacaagtcactgacctcagaagaataaatagatcgcccatctgctcctgttaacacttccaccggatgcaacaactctgtatcgggtgccatcaatacatccgtaataaaaaaattatcatcaaaaataaatatgaactccggtagtgcttcaataattttccggtttcgttcctcaagctgcctgatctggacttctttttcacaacgtgaagtgatattggcagtatatgctataattttatcagagccattctccttattcttcttataagcaataaaattatcttcaagccaaattgtttctcctcgcctccctacacaacgtaccacaatttgggagattttggtttccgattcaagcatccgcgcaaaagtcgtttggtaagagataacatcctccggatgggcaaaccgataaaagtcattaatatctctgaatatgattccggcctccttcaaccctaaaatatggaaatattcatctgtgaaattacactctcctgtaggaatatcatattcccaaaatgcaatctgatgtcctgccaggacagaagtgattttctgataattatctttcaaattctcaaggtttccggtatccgggaatgaatccagtgtgtgtgccatagccataaagtttgtcttgctgtacgcgaacaaagataaaataataaagtataacttctatctgtttgctctgttttttaccaagaaagctctatctttgcttctcaaaatgaattagataatgaatcaagacacaatttgcgccatagcaaccgctcaaggaggagccatcggaagcattcgtgtttccggtcctgaagctattaccatcaccggccgtatttttaccccggccaaatccggaaagctgctgagtgaacagaaaccttatacgcttactttcggccgaatttataacggagaagaaatgatagatgaagttcttgtcagtctcttccgggctccacactcttatacaggggaagacagcactgaaatcacctgtcacggatcatcttatattttacaacaagtgatgcaactactgattaagaacgggtgtcgcatggcgcaaccgggagaatatactcaacgagcgtttcttaatggtaaaatggatttaagtcaggccgaagccgttgccgacctgattgcctcttcctctgctgctacccaccgtcttgccttgagtcaaatgcgaggtggctttagcaaagaattgacaactctacgtgagaaactgctgaacttcacttcaatgattgaactggagctggacttcagtgaagaagatgtagagtttgcggaccgttccgccctacgccgactggctgacgagatagaagaagtcattgcacgtctagccaattcgttcagtgtagggaatgtcataaaaaatggtgtaccggtagctattatcggagaaaccaatgcaggaaaatcaactctactgaatgtcctgctgaatgaagacaaggctattgtaagcgatattcacggcactacacgggatgtcatcgaggatactgtgaatataggtggtatcactttccgttttatcgatacagccggtatccgggagaccagtgatacgatagaaagcctgggtatcgaacggacttttcaaaaactcgatcaggcagagattgtactgtggatgattgattcggctgacgcaatttcacagttaacactgctctccgataagattcttcctcgttgtgaacacaaacaattgattttagtctttaataaggtagaactgataaatgaaactcagaaaaacgaacttgcctcacaattttctgagcatataggttcggaaatagaatctatttttatttctgcgaaacaacgtttgcacacggatgaactccaacagagactcgtagcagccgctcatttaccaacagtcacccagaatgatgtcattgtaacaaacgtccgccattacgaagcactaacacgtgcgctggatgcaattcaccgggtacaagaaggattggacgcaaatatctccggagattttctgtcacaagacatacgcgaatgtattttccatttatccgatatagcaggggaagtgacaaatgatatggtgctgcaaaatatatttgcgcatttctgcatcgggaaatgatacatcgcaattaaccgcaacgaattagaatcaactataatgaagtcgctgaatttcagcggcttttttatttatccaaaatccagttcatagcgattggatagtgttgttcaccatatttttctaccgtatttctaccgcgaaacaaattggggtttgtccccgatgtcacagtgacacatttggcgacatgggtgaacaatggtttacgtagagagacaaaaagggaaattaaatctttatggtttcactaaaaatatggagaaaacaacatggaagtaaaaagaatttgtcaatggtgtggtaaaccttttatagctcagaaaaccaccaccaattattgtagtcctcaatgttctaaacgaggctacaaacatcgaatgaaagagcgaagaatggagctcattcagagtcaagaattgttggaggtaaagaagatgctggaaaatcaagagtactttaccttttcacaagcagctaaattgatgggagtttctcgtcaatacatctacaaattagtcaaagaggataagttgagagcaagtcggattagttc

SEQ ID NO: 5023 - DNA, 3817 bp, Unknown
  gut microbiota DNA sequence
attaatatatggagctcgactgttgattctgccattcgttgcattcgtcaatagtaatggaaaatctgtcacttaaaatagtaagatacaatgtgtttgaataaaaatattaaatcctttcttgggatacttatgtgtgggatattggcttttctgccggtatcctgttcagatgattctccggtaacaggttcacccttgcttccggaggctcctgaaggtaaagtgaacgtatttctttctcttcataaagggagtgattatgaatctcctgccacacgttcggggacagcggctgatgaaactattatgggacctccctgggtgttggtttttttggggaatgataaagatgcgactttcttggaagccgtacaagccgatatgacctcggtcggagagctttatgcacaattaagtgcctgcaattcttcagtggttttgctgttgatttcaaatgccgatgaattgatacaggcgaagttgggaagtcttacgactacgacaactttatccgatgcagttaccaatcttcttctgtatggcgatccgtcggattctcctgtggcgggtaattctgcattagcaattccgcaagcgacagttccttttacagggaagaagatcccgatgtcggcctattgtccattgccacagattattacaggtactactgtaggaactgtcagtacccctcttcgcctaaaacggatcgtatctaaattatacgtagatgcttccggtgcacatgcttccgatggttttattttgacaggagtatctgttattaacgtaccggtacaaggagcacttgcttttgaatatggaaatgcgaatgaaactttacctattacggctcaatttaccgattatggtcataaatcgggtagtgcttcccggttggacaatccgattatagcctcttcaacaggattcgccgggcatacaaccgcaggtatgggaagtgaagactatcctgtttatgtatatgaaacggcaggtggcccggctgaccgttcggatgttattcttgccggtaagtttgataacggaccggttcgttattatcgcgcgagtctgaaaaacagtaaaggagaaaagctggcatttaaaagaaactatctttatacgctaaatctggtacgtgtggaaggaggaggctattctacgatggatgaggcgattgctgctccttcgggtagtagcggaattctttgcaatgttacggtggtagacgattcgcatgaaataacaggtaatggtgtttattatttggggctgacgaattcttcttatgtgctttatacggatgaagaacagaaggatgttacggtatgtgtgatagggaccaatgcgtacagccgtccgggaagtacggttactccgggagtggtaagcatgtcgtccggaatagccggtgtgactcttaaaaccacttcgatctccgcagactcgactgccattaagttggattttgccaagggagcgcagggagaaacgacccttgatgttcaggttggaggattgcgtagggaaataaagctgaaagctgccggtatgggtgtttccggcaattatgtttcaggttctcaaggactcttgttgggagatttcaaccagatccgtattcttgaaagtacgtctaagtctggactggcaatatctcccgcatctccggaccgggatagcgaggtcatctcttccgttacttctccttctgtccctgtttacttctttgtcgaggaggctgcgggcccacaaagtgctaaattgtcgggccttgcgggagaatccgtcgttgttatagagaatcgggtgtataacgatctccctgccgcatctaatatttattgggacgcggcacaaggcagattgacgttcgatgatgttccgtcgtatgttcctgctgcccgaaaccaaaaacagggagtgtattttctgtatggttccttaattgcactgcaaggaggaagcagcgcaactgatgtgcgtcagctcgatgcagcagaagtgaatcctgtatggaaaaccaatcagtctccgaacattcctaagtttaatcccgcctctttagctcccggagcagatctggagaatgtattgacacatattcataatccgggtaatcgtattggtgatatctgccgttatcttacgcagcgcggatgggctcctccgggaaagaaatggaagatgcctgtgaaagaacgtttggaagctgtcttgaacagtatatatagaactgaaggatcttggttaccgatagggggacttgcgacagacggtactggtgaagttgttcacgggagattgataaaggatcgattttactttccggcatcgggttcacgcaaagaagatggaacctttatcgagcaaccgggtgtctccggacactactggagttcttctgtcatttccggcagtatcggatggcaacctgcttcgctgtggtttcagggaggggatgctgcaatacaggcaactgctttggacgtggctcttccggttcgttgtgtcgtagataatacgtctaccgattggccggaattagctactgtcacttattatgcttatccgccgggaggagcaacattaacctcggaactgccgaccaatcattttgtggagcaacgcaaaccttttgcgctgccctctacccctttgactctcagtgatccgtctgtggctcataccggctggggcaataatcttggattgggagaaaatactactataaacagtagtgttggcagttttcatgcgacttttagccaaggtgcttctctagagtatgactctaatcttcctgcaggtacggctttagtgtccggaacggttccgggagtctatgttgctgccggaggtacgagtatcaaactttcgacgaaccagttggtatgtagtaatccaggttatgtgcataccggatggagtatagatggagtttatcatggattgggcgcaaactatgtgatgcatgcatccggttccagaaaggcttttgccgtatggtcacgtgactgctgggttgagtatctggcaaaggcgcctgcgggtgcccctgccggtgttactgtcaccggtactttgccgtctcctgtgaaagtagcccagaattcatcggttactttagcaacggaagcccaaggtttacaggtttgcagtgatccgaggtggaaacacactgcatggacggcaggcgcttttggcggaaatacgatcgtgacaaatgaccttaaaatatatcccgaatggacgcggtattatcaagtaacttactcaccgcagccaccgtccggaacagtacccggctatccgcgttctgaaattgtggcgccgggaagtagcgtgatgttgccggttcaactgcatagcagtgatcctttgcaggtacatcaggcgtggctggtaggtggacaagagaaggcaccgggaacatcggtcattatcaatagggatatgaccataactgctaagtggctgctttatgaagtaagctatctggcaaatgctccggtagggaccacttcggtaactcctttacccgctttacagaagatagctccgggcaagatggtgactttatctgctgtccgtttggaatgcagtgatccggcgtggggacataccggttggagtgtcggaggtgtgcattacatttttggggccaatatacccgttctaagtaatatgcaggtatctgccgaatggacaaaaagatttaagatcaagtatcatctgaacttgccttcgggaaccagtcatgccagtggtacgttacctgcggatgaatatgtgatgcccgggcaggcta

SEQ ID NO: 5024 - DNA, 1000 bp, Unknown
  gut microbiota DNA sequence
acaggctatgattgcttgaatttatatttaagtccatactcttcaagtttgctgtatagtgttgtcctgcctattccgagcagttcggcggcgacactccggttgccgtttgcctgtttcaacgcacgcaatatccgctccttatcctccgcgtcattgcgcaaggcgaagctgacagtagaggtcggtttcgtcacggcaagttccagatgctctttcatgacaacaccttcctgcgcctacaatacagcacccataactttctgccgaagttcccgcacgttgcccggccatgtgtgggtcagtaacgcttttcgggcttcggaactgaaaccgctcacattacactccagttccttgttggctatctcgcggaagaactccgcaagcggcatgatgtcctccttacagtcacgcaaaggcggcacggttatcacgaagtcatgcaagcggtagagtaaatcctgtcggaaacgcttttcattcaccgctacttccaaatcctcgttggtggcggcgatgatgcggacattgaaactcctgtccgatttgtcaccaaccgggcgataccgcctctcttgtatggcacggagcaacatctgttgggtttccaacgcgaggtttcccacctcgtccagaaacaacgtgccgccttccgcttcatggaaataccctttcttggtgctgtccgcacctgtaaacgctcccttgacgtgtccgaagaatgccgacggcgcaagttcttttgagagtgaaccgcagtcaaccgccacgaagggtttgcccgtacgtttgctcttgtcgtgcaggtggtgggcgatatgttccttgcccgtgccgttctctccgaatatcatcacgctcatgtcggttgctgctaccagccttatgcggtgcatgattttctgaaaggcggaaccttcacgggcgaacacgggcatacgggattgtcccgcctgccgttctttctgtatggaacggagaagagggacaagtttat
